(19) United States
(12) Patent Application Publication
(10) Pub. No.: US 2004/0029133 A1
(43) Pub. Date: Feb. 12, 2004

(54) Mitochondrial DNA polymorphisms

(75) Inventor: Corinna Herrnstadt, San Diego, CA (US)

Correspondence Address: SEED INTELLECTUAL PROPERTY LAW GROUP PLLC, 701 FIFTH AVE, SUITE 6300, SEATTLE, WA, 98104-7092, US

(73) Assignee: MitoKor, Inc., San Diego, CA (US)

(21) Appl. No.: 10/308,264

(22) Filed: Nov. 25, 2002

Related U.S. Application Data
(60) Provisional application No. 60/369,539, filed on Apr. 1, 2002.
(60) Provisional application No. 60/369,131, filed on Mar. 28, 2002.
(60) Provisional application No. 60/333,622, filed on Nov. 26, 2001.

(51) Int. Cl. C12Q 1/68; C12P 19/34

(52) U.S. Cl. 435/6; 435/91.2

(57) ABSTRACT

Compositions and methods based on determination of single nucleotide polymorphisms in mtDNA or homoplasmic mtDNA mutations are provided that are useful for detecting the presence or risk of diseases, determining the haplogroup of an individual, and establishing genetic relationships between individuals for genealogical and forensic purposes.

### CROSS-REFERENCE TO RELATED APPLICATIONS

[0001] This application claims the benefit of U.S. Provisional Patent Application No. 60/369,539 filed Apr. 1, 2002; No. 60/369,131 filed Mar. 28, 2002; and No. 60/333,622 filed Nov. 26, 2001, which are incorporated herein by reference in their entirety.

[0002] The Sequence Listing associated with this application is provided on CD-ROM in lieu of a paper copy, and is hereby incorporated by reference into the specification. Three CD-ROMs are provided, containing identical copies of the sequence listing: CD-ROM No. 1 is labeled COPY 1, contains the file 461.app.txt which is 11.3 MB and created on Nov. 25, 2002; CD-ROM No.2 is labeled COPY 2, contains the file 461.app.txt which is 11.3 MB and created on Nov. 25, 2002; CD-ROM No. 3 is labeled CRF, contains the file 461.app.txt which is 11.3 MB and created on Nov. 25, 2002.

### TECHNICAL FIELD

[0003] The present invention relates generally to mitochondrial DNA polymorphisms and, more specifically, to compositions and methods based upon the identification of mitochondrial DNA polymorphisms for use in disease diagnosis, prognosis and treatment; patient and population profiling; pharmacogenomics; phylogenetic and population genetic analysis; genealogy; forensics and paternity testing; and related areas.

### BACKGROUND OF THE INVENTION

[0004] Mitochondria are the subcellular organelles that manufacture bioenergetically essential adenosine triphosphate (ATP) by oxidative phosphorylation. Functional mitochondria contain gene products encoded by mitochondrial genes situated in mitochondrial DNA (mtDNA) and by extramitochondrial genes not situated in the circular mitochondrial genome. The 16.5 kb mtDNA encodes 22 tRNAs, two ribosomal RNAs (12s and 16s rRNA) and only 13 enzymes of the electron transport chain (ETC), the elaborate multi-subunit complex mitochondrial assembly where, for example, respiratory oxidative phosphorylation takes place. (See, e.g., Wallace et al., in Mitochondria & Free Radicals in Neurodegenerative Diseases, M. F. Beal, N. Howell and I. Bodis-Wollner, eds., 1997 Wiley-Liss, Inc., New York, pp. 283-307, and references cited therein; see also, e.g., Scheffler, I. E., Mitochondria, 1999 Wiley-Liss, Inc., New York.) More than 5000 copies of the mitochondrial genome may be present within a single cell, due to the presence of numerous mitochondria within a single cell, and of multiple copies of mtDNA within each mitochondrion. Furthermore, since mitochondrial DNA is strictly maternally inherited, all copies of mitochondrial DNA within an individual are generally monoclonal. Finally, certain regions of mtDNA are highly polymorphic. Mitochondrial DNA includes gene sequences encoding a number of ETC components, including seven subunits of NADH dehydrogenase, also known as ETC Complex I (ND1, ND2, ND3, ND4, ND4L, ND5 and ND6); one subunit of Complex III (ubiquinol: cytochrome c oxidoreductase, Cytb); three cytochrome c oxidase (Complex IV) subunits (COX1, COX2 and COX3); and two proton-translocating ATP synthase (Complex V) subunits (ATPase6 and ATPase8).

[0005] The first complete sequence of a human mitochondrial DNA (mtDNA), also referred to as the Cambridge reference sequence (CRS), was originally published in 1981 and was more recently revised (Anderson, S. et al., Nature 290:457-465, 1981; Andrews, R. M. et al., Nature Genetics 23:147, 1999). The mtDNA is strictly maternally inherited and has a mutation rate ten times that of nuclear DNA, with certain regions exhibiting notably high degrees of polymorphism. During human evolution and subsequent colonization of the continents by human subpopulations, the genealogic pattern of mtDNA inheritance indicates divergence of distinct maternal lineages, which are observed to harbor population-specific mtDNA polymorphisms. Thus, nine different European mtDNA haplogroups (e.g., discrete constellations of homoplasmic mtDNA polymorphisms that are highly conserved among members of a common maternal lineage as well as distinct Asian, Native American and African mtDNA haplogroups, have been described on the basis of the presence or absence in mtDNA of one or several restriction endonuclease recognition sites (described in Wallace et al., Gene 238:211-230, 1999; Torroni, A. et al., Genetics 144:1835-1850, 1996).

[0006] A number of degenerative diseases are thought to be caused by, or are associated with, alterations in mitochondrial function. These diseases include Alzheimer's Disease, diabetes mellitus, Parkinson's Disease, Huntington's disease, dystonia, Leber's hereditary optic neuropathy, schizophrenia, and myodegenerative disorders such as “mitochondrial encephalopathy, lactic acidosis, and stroke” (MELAS), and “myoclonic epilepsy ragged red fiber syndrome” (MERRF). Other diseases involving altered metabolism or respiration within cells may also be regarded as diseases associated with altered mitochondrial function. The extensive list of additional diseases associated with altered mitochondrial function continues to expand as aberrant mitochondrial or mitonuclear activities are implicated in particular disease processes.

[0007] There is evidence to suggest that the genetic basis of at least some diseases associated with altered mitochondrial function resides in mitochondrial DNA rather than in extramitochondrial DNA such as that found in the nucleus (e.g., nuclear chromosomal and extrachromosomal DNA). For example, noninsulin dependent diabetes mellitus (NIDDM) exhibits a predominantly maternal pattern of inheritance, and in at least some cases this disease appears to be associated with a mitochondrial DNA (mtDNA) abnormality not found in the CRS or the revised CRS. Thus, for instance, approximately 1.5% of all diabetic individuals harbor a mutation at mtDNA position 3243 in the mitochondrial gene encoding leucyl-tRNA (tRNA^{Leu}). This mutation is known as the MELAS (mitochondrial encephalopathy, lactic acidosis and stroke) mutation. (Gerbitz et al., Biochim. Biophys. Acta 1271:253-260, 1995.) Similar theories have been advanced for analogous relationships between mtDNA mutations and other diseases associated with altered mitochondrial function, including but not limited to Alzheimer's Disease (AD), Huntington's Disease (HD), Parkinson's Disease (PD), dystonia, Leber's hereditary optic neuropathy (LHON), schizophrenia, and myoclonic epilepsy ragged red fiber syndrome (MERRF) (See, e.g., Chinnery et al., 1999 J. Med. Genet. 36:425). In addition, a limited number of specific single nucleotide polymorphisms that correlate with Alzheimer's disease or with type 2 diabetes mellitus have been identified (see U.S. patent application Ser. No. 09/551,941; see also co-pending application serial No. 60/333,448). Certain somatic mtDNA sequence changes have also been detected in tissues from colorectal cancer (Polyack et al., (1998) Nature Genetics 20:291-293) and in lung, bladder, and head and neck tumors (Fliss et al., (1999) Science 287:2017-2019). The identification of additional mtDNA mutations associated with diseases may provide targets for the development of diagnostic and/or therapeutic agents.

[0008] As is well known in the art generally, and especially with regard to extramitochondrial DNA such as nuclear chromosomal and/or extrachromosomal DNA, direct (e.g., by nucleotide sequencers) or indirect (e.g., by RFLP, SSCP, etc.) determination of DNA sequence variations in individuals and in populations has been used for a wide range of purposes. For example, identification of variability at specific marker loci is useful in a wide range of genetic studies (e.g., genetic counseling, diagnosis of inherited disorders and/or of cancer, pharmacogenetics, etc.), in commercial breeding, in genotyping of samples (e.g., for transplantation, transfusion, cell or tissue grafting, etc.), forensic analysis, paternity testing and the like.

[0009] Currently available DNA-based identification technology makes use of a variety of DNA fingerprinting techniques (for a discussion of common procedures, see Murch, R. S. and Budowle, B., (1997) Are Developments in Forensic Applications ofDNA Technology Consistent with Privacy Protection? in Genetic Secrets: Protecting Privacy and Confidentiality in the Genetic Era (ed. Mark A. Rothstein), Yale University Press, New Haven, Conn.). DNA fingerprinting includes a variety of methods for assessing sequence differences in DNA isolated from various sources, e.g., by comparing the presence of marker DNA in samples of isolated DNA. Typically, DNA fingerprinting is used to analyze and compare DNA from different species of organisms, or from different individuals of the same species. Many technologies have been used in DNA fingerprinting, including, inter alia, restriction fragment length polymorphism (RFLP; e.g., Bostein et al. (1980) Am. J. Hum. Genet. 32:314-331), single strand conformation polymorphism (SSCP; Fischer et al. (1983) Proc. Natl. Acad. Sci. USA 80:1579-1583; Orita et al. (1989) Genomics 5:874-879), amplified fragment-length polymorphism (AFLP; Vos et al. (1995) Nucleic Acids Res. 23:4407-4414), microsatellite or single-sequence repeat analysis (SSR; Weber J L and May P E (1989) Am. J. Hum. Genet. 44:388-396), rapid-amplified polymorphic DNA analysis (RAPD; Williams et al. (1990) Nucleic Acids Res. 18:6531-6535), sequence tagged site analysis (STS; Olson et al. (1989) Science 245:1434-1435), genetic-bit analysis (GBA; Nikiforov et al. (1994) Nucleic Acids Res 22:4167-4175), allele-specific polymerase chain reaction (ASPCR; Gibbs et al. (1989) Nucleic Acids Res. 17:2437-2448; Newton et al. (1989) Nucleic Acids Res. 17:2503-2516), nick-translation PCR (e.g., TaqMan™; Lee et al. (1993) Nucleic Acids Res. 21:3761-3766), and allele-specific hybridization (ASH; Wallace et al. (1979) Nucleic Acids Res. 6:3543-3557; Sheldon et al. (1993) Clinical Chemistry 39(4):718-719) among others.

[0010] According to certain commonly used methods of DNA fingerprinting, variable number tandem repeat (VNTR) regions within genomic DNA are genetically characterized by restriction fragment length polymorphisms (RFLP) analysis. Alternative approaches, for example, those that are generally based upon use of the polymerase chain reaction (PCR), include dot-blot assays, electrophoretic analysis and direct nucleic acid sequencing. By such methods, a variety of genomic DNA sequence polymorphisms can be analyzed, including, for example, polymorphisms in HLA-DQA1 (or other loci of the highly polymorphic major histocompatibility complex (MHC)), low-density lipoprotein receptor (LDL-R), glycophorin A, hemoglobin G gammaglobin, D7S8 and other group-specific components.

[0011] When such techniques are directed to analysis of nuclear (e.g., chromosomal) DNA, however, certain limitations become apparent, including, for instance, (1) the availability of only a limited amount of sample material because there are only two copies of each gene per cell, and (2) the presence in a sample of two different nucleotide sequences at a particular genetic locus where the subject is heterozygous at that locus (e.g., by having inherited different allelic forms of the gene from each parent). Given the devastating consequences of human diseases such as, for example, Alzheimer's disease and type 2 diabetes mellitus, clearly there is a need to develop improved compositions and methods for identifying the presence of, or risk for having, such diseases in individuals. In addition, there is a clear need in the art to develop more sensitive and reliable compositions and methods for use in forensics and in other applications requiring the identification of individuals and/or their genetic relationships to others. The present invention addresses these needs by providing compositions and methods that employ mtDNA as a source of genetic markers for diagnostic, prognostic, pharmacogenetic, evolutionary, forensic and/or genealogic analyses, and offers other related advantages.

### SUMMARY OF THE INVENTION

[0012] The present invention is directed in part to compositions and methods that relate to identification of mitochondrial DNA polymorphisms. Accordingly, it is an aspect of the invention to provide a method for determining the mitochondrial haplogroup of a subject, comprising determining, in a biological sample comprising mitochondrial DNA from a subject, the presence or absence of at least one mitochondrial single nucleotide polymorphism that is associated with a mitochondrial haplogroup. In certain embodiments the mitochondrial DNA is amplified. In certain other embodiments, at least one mitochondrial single nucleotide polymorphism that is associated with a mitochondrial haplogroup is present in a mitochondrial DNA region that is a D-loop, a mitochondrial rRNA gene, a mitochondrial NADH dehydrogenase gene, a mitochondrial tRNA gene, a mitochondrial cytochrome c oxidase gene, a mitochondrial ATP synthase gene or a mitochondrial cytochrome b gene.

[0013] In certain other embodiments at least one mitochondrial single nucleotide polymorphism that is associated with a mitochondrial haplogroup is a haplogroup-specific polymorphism or a haplogroup-associated polymorphism, wherein a mitochondrial single nucleotide polymorphism that is haplogroup-specific is, for A, B, C, D, E, H, I, J, K, L1, L2, L3, T, U, V, W or X, located at a nucleotide that corresponds to a nucleotide position of SEQ ID NO:1 that is selected from:

| Nucleotide | | |
|---|---|---|
| Position | GENE | HAPLOGROUP |
| 64 | D-LOOP | A |
| 235 | D-LOOP | A |
| 663 | 12S rRNA | A |
| 1598 | 12S rRNA | A |
| 1736 | 16S rRNA | A |
| 3316 | ND1 | A |
| 4248 | ND1 | A |
| 4824 | ND2 | A |
| 4970 | ND2 | A |
| 6308 | COI | A |
| 7112 | COI | A |
| 7724 | COII | A |
| 8794 | ATPase6 | A |
| 11314 | ND4 | A |
| 12468 | ND5 | A |
| 12811 | ND5 | A |
| 13855 | ND5 | A |
| 14364 | ND6 | A |
| 16111 | D-LOOP | A |
| 16290 | D-LOOP | A |
| 16319 | D-LOOP | A |
| 827 | 12S rRNA | B |
| 3547 | ND1 | B |
| 4820 | ND2 | B |
| 4977 | ND2 | B |
| 6023 | COI | B |
| 6216 | COI | B |
| 6413 | COI | B |
| 6473 | COI | B |
| 6755 | COI | B |
| 7241 | COI | B |
| 9950 | COIII | B |
| 11177 | ND4 | B |
| 15535 | CYT B | B |
| 16217 | D-LOOP | B |
| 249 | D-LOOP | C |
| 289 | D-LOOP | C |
| 290 | D-LOOP | C |
| 3552 | ND1 | C |
| 4715 | ND2 | C |
| 7196 | COI | C |
| 7694 | COII | C |
| 8584 | ATPase6 | C |
| 9545 | COII | C |
| 10454 | tRNA-R | C |
| 12642 | ND5 | C |
| 12978 | ND5 | C |
| 14318 | ND6 | C |
| 15487 | CYT B | C |
| 15930 | tRNA-T | C |
| 2092 | 16S rRNA | D |
| 4883 | ND2 | D |
| 5178 | ND2 | D |
| 8414 | ATPase8 | D |
| 11593 | ND4 | D |
| 14668 | ND6 | D |
| 3027 | 16S rRNA | E |
| 3705 | ND1 | E |
| 4491 | ND2 | E |
| 7598 | COII | E |
| 239 | D-LOOP | H |
| 456 | D-LOOP | H |
| 477 | D-LOOP | H |
| 951 | 12S rRNA | H |
| 961 | 12S rRNA | H |
| 3277 | tRNA-L | H |
| 3333 | ND1 | H |
| 3591 | ND1 | H |
| 3796 | ND1 | H |
| 3915 | ND1 | H |
| 3992 | ND1 | H |
| 4024 | ND1 | H |
| 4310 | tRNA-I | H |
| 4336 | tRNA-Q | H |
| 4531 | ND2 | H |
| 4727 | ND2 | H |
| 4745 | ND2 | H |
| 4772 | ND2 | H |
| 4793 | ND2 | H |
| 5004 | ND2 | H |
| 6365 | COI | H |
| 6776 | COI | H |
| 6869 | COI | H |
| 7013 | COI | H |
| 8269 | COII | H |
| 8448 | ATPase8 | H |
| 8602 | ATPase6 | H |
| 8803 | ATPase6 | H |
| 8839 | ATPase6 | H |
| 8843 | ATPase6 | H |
| 8898 | ATPase6 | H |
| 9123 | ATPase6 | H |
| 9150 | ATPase6 | H |
| 9380 | COIII | H |
| 9804 | COIII | H |
| 10044 | tRNA-G | H |
| 11353 | ND4 | H |
| 11560 | ND4 | H |
| 12579 | ND5 | H |
| 13404 | ND5 | H |
| 13680 | ND5 | H |
| 13759 | ND5 | H |
| 14125 | ND5 | H |
| 14350 | ND6 | H |
| 14365 | ND6 | H |
| 14470 | ND6 | H |
| 14582 | ND6 | H |
| 14872 | CYT B | H |
| 15466 | CYT B | H |
| 15789 | CYT B | H |
| 15808 | CYT B | H |
| 15833 | CYT B | H |
| 16162 | D-LOOP | H |
| 16293 | D-LOOP | H |
| 199 | D-LOOP | I |
| 250 | D-LOOP | I |
| 3447 | ND1 | I |
| 3990 | ND1 | I |
| 4529 | ND2 | I |
| 6734 | COI | I |
| 8616 | ATPase6 | I |
| 9947 | COIII | I |
| 10034 | tRNA-G | I |
| 10238 | ND3 | I |
| 11065 | ND4 | I |
| 12501 | ND5 | I |
| 13780 | ND5 | I |
| 15758 | CYT B | I |
| 16391 | D-LOOP | I |
| 228 | D-LOOP | J |
| 295 | D-LOOP | J |
| 462 | D-LOOP | J |
| 2158 | 16S rRNA | J |
| 2387 | 16S rRNA | J |
| 3394 | ND1 | J |
| 5198 | ND2 | J |
| 5633 | tRNA-A | J |
| 6464 | COI | J |
| 6554 | COI | J |
| 6671 | COI | J |
| 7476 | tRNA-S | J |
| 7711 | COII | J |
| 10084 | ND3 | J |
| 10172 | ND3 | J |
| 10192 | ND3 | J |
| 10499 | ND4L | J |
| 10598 | ND4L | J |
| 10685 | ND4L | J |
| 11377 | ND4 | J |
| 12127 | ND4 | J |
| 12570 | ND5 | J |
| 12612 | ND5 | J |
| 13281 | ND5 | J |
| 13681 | ND5 | J |
| 13879 | ND5 | J |
| 13933 | ND5 | J |
| 14569 | ND6 | J |
| 15679 | CYT B | J |
| 15812 | CYT B | J |
| 16069 | D-LOOP | J |
| 16092 | D-LOOP | J |
| 16261 | D-LOOP | J |
| 114 | D-LOOP | K |
| 497 | D-LOOP | K |
| 593 | tRNA-F | K |
| 1189 | 12S rRNA | K |
| 2217 | 16S rRNA | K |
| 2483 | 16S rRNA | K |
| 3480 | ND1 | K |
| 4295 | tRNA-I | K |
| 4561 | ND2 | K |
| 5814 | tRNA-C | K |
| 6260 | COI | K |
| 9006 | ATPase6 | K |
| 9055 | ATPase6 | K |
| 9698 | COIII | K |
| 9716 | COIII | K |
| 9962 | COIII | K |
| 10289 | ND3 | K |
| 10550 | ND4L | K |
| 10978 | ND4 | K |
| 11299 | ND4 | K |
| 11470 | ND4 | K |
| 11485 | ND4 | K |
| 11840 | ND4 | K |
| 11869 | ND4 | K |
| 11923 | ND4 | K |
| 12954 | ND5 | K |
| 13135 | ND5 | K |
| 13740 | ND5 | K |
| 13967 | ND5 | K |
| 14002 | ND5 | K |
| 14037 | ND5 | K |
| 14040 | ND5 | K |
| 14167 | ND6 | K |
| 15884 | CYT B | K |
| 15946 | tRNA-T | K |
| 16224 | D-LOOP | K |
| 16234 | D-LOOP | K |
| 16463 | D-LOOP | K |
| 185 | D-LOOP | L1 |
| 186 | D-LOOP | L1 |
| 189 | D-LOOP | L1 |
| 236 | D-LOOP | L1 |
| 247 | D-LOOP | L1 |
| 297 | D-LOOP | L1 |
| 357 | D-LOOP | L1 |
| 710 | 12S rRNA | L1 |
| 825 | 12S rRNA | L1 |
| 1048 | 12S rRNA | L1 |
| 1738 | 16S rRNA | L1 |
| 2245 | 16S rRNA | L1 |
| 2395 | 16S rRNA | L1 |
| 2758 | 16S rRNA | L1 |
| 2768 | 16S rRNA | L1 |
| 2885 | 16S rRNA | L1 |
| 3308 | ND1 | L1 |
| 3516 | ND1 | L1 |
| 3666 | ND1 | L1 |
| 3693 | ND1 | L1 |
| 3777 | ND1 | L1 |
| 3796 | ND1 | L1 |
| 3843 | ND1 | L1 |
| 4312 | tRNA-I | L1 |
| 4586 | ND2 | L1 |
| 5036 | ND2 | L1 |
| 5393 | ND2 | L1 |
| 5442 | ND2 | L1 |
| 5603 | tRNA-A | L1 |
| 5655 | tRNA-A | L1 |
| 5913 | COI | L1 |
| 5951 | COI | L1 |
| 6071 | COI | L1 |
| 6150 | COI | L1 |
| 6185 | COI | L1 |
| 6253 | COI | L1 |
| 6548 | COI | L1 |
| 6827 | COI | L1 |
| 6989 | COI | L1 |
| 7055 | COI | L1 |
| 7076 | COI | L1 |
| 7146 | COI | L1 |
| 7337 | COI | L1 |
| 7389 | COI | L1 |
| 7867 | COII | L1 |
| 8248 | COII | L1 |
| 8428 | ATPase8 | L1 |
| 8655 | ATPase6 | L1 |
| 8784 | ATPase6 | L1 |
| 8877 | ATPase6 | L1 |
| 9042 | ATPase6 | L1 |
| 9072 | ATPase6 | L1 |
| 9347 | COIII | L1 |
| 9755 | COIII | L1 |
| 9818 | COIII | L1 |
| 10321 | ND3 | L1 |
| 10586 | ND4L | L1 |
| 10589 | ND4L | L1 |
| 10664 | ND4L | L1 |
| 10688 | ND4L | L1 |
| 10792 | ND4 | L1 |
| 10793 | ND4 | L1 |
| 10810 | ND4 | L1 |
| 11176 | ND4 | L1 |
| 11641 | ND4 | L1 |
| 11654 | ND4 | L1 |
| 11899 | ND4 | L1 |
| 12007 | ND4 | L1 |
| 12049 | ND4 | L1 |
| 12519 | ND5 | L1 |
| 12720 | ND5 | L1 |
| 12810 | ND5 | L1 |
| 13149 | ND5 | L1 |
| 13276 | ND5 | L1 |
| 13485 | ND5 | L1 |
| 13506 | ND5 | L1 |
| 13789 | ND5 | L1 |
| 13880 | ND5 | L1 |
| 13980 | ND5 | L1 |
| 14000 | ND5 | L1 |
| 14148 | ND5 | L1 |
| 14178 | ND6 | L1 |
| 14203 | ND6 | L1 |
| 14308 | ND6 | L1 |
| 14560 | ND6 | L1 |
| 14769 | CYT B | L1 |
| 14911 | CYT B | L1 |
| 15115 | CYT B | L1 |
| 15136 | CYT B | L1 |
| 16148 | D-LOOP | L1 |
| 16187 | D-LOOP | L1 |
| 16188 | D-LOOP | L1 |
| 16230 | D-LOOP | L1 |
| 16264 | D-LOOP | L1 |
| 16265 | D-LOOP | L1 |
| 16360 | D-LOOP | L1 |
| 16527 | D-LOOP | L1 |
| 143 | D-LOOP | L2 |
| 1442 | 12S rRNA | L2 |
| 1706 | 16S rRNA | L2 |
| 2332 | 16S rRNA | L2 |
| 2358 | 16S rRNA | L2 |
| 2416 | 16S rRNA | L2 |
| 2789 | 16S rRNA | L2 |
| 3495 | ND1 | L2 |
| 3918 | ND1 | L2 |
| 4158 | ND1 | L2 |
| 4185 | ND1 | L2 |
| 4370 | tRNA-Q | L2 |
| 4767 | ND2 | L2 |
| 5027 | ND2 | L2 |
| 5285 | ND2 | L2 |
| 5331 | ND2 | L2 |
| 5581 | tRNA-W | L2 |
| 5744 | NON-CODING | L2 |
| 6713 | COI | L2 |
| 7175 | COI | L2 |
| 7274 | COI | L2 |
| 7624 | COII | L2 |
| 7771 | COII | L2 |
| 8080 | COII | L2 |
| 8206 | COII | L2 |
| 8387 | ATPase8 | L2 |
| 8541 | ATPase8 | L2 |
| 8790 | ATPase6 | L2 |
| 8925 | ATPase6 | L2 |
| 9221 | COIII | L2 |
| 10115 | ND3 | L2 |
| 11944 | ND4 | L2 |
| 12236 | tRNA-S | L2 |
| 12630 | ND5 | L2 |
| 12693 | ND5 | L2 |
| 12948 | ND5 | L2 |
| 13803 | ND5 | L2 |
| 14059 | ND5 | L2 |
| 14544 | ND6 | L2 |
| 14566 | ND6 | L2 |
| 14599 | ND6 | L2 |
| 15110 | CYT B | L2 |
| 15217 | CYT B | L2 |
| 15229 | CYT B | L2 |
| 15236 | CYT B | L2 |
| 15244 | CYT B | L2 |
| 15391 | CYT B | L2 |
| 15629 | CYT B | L2 |
| 15945 | tRNA-T | L2 |
| 16114 | D-LOOP | L2 |
| 16213 | D-LOOP | L2 |
| 16309 | D-LOOP | L2 |
| 16390 | D-LOOP | L2 |
| 200 | D-LOOP | L3 |
| 2000 | 16S rRNA | L3 |
| 3438 | ND1 | L3 |
| 3450 | ND1 | L3 |
| 5773 | tRNA-C | L3 |
| 6524 | COI | L3 |
| 6587 | COI | L3 |
| 6680 | COI | L3 |
| 7424 | COI | L3 |
| 7618 | COII | L3 |
| 8616 | ATPase6 | L3 |
| 8618 | ATPase6 | L3 |
| 8650 | ATPase6 | L3 |
| 9554 | COIII | L3 |
| 10086 | ND3 | L3 |
| 10373 | ND3 | L3 |
| 10667 | ND4L | L3 |
| 10819 | ND4 | L3 |
| 11800 | ND4 | L3 |
| 13101 | ND5 | L3 |
| 13886 | ND5 | L3 |
| 13914 | ND5 | L3 |
| 14152 | ND6 | L3 |
| 14212 | ND6 | L3 |
| 14284 | ND6 | L3 |
| 15099 | CYT B | L3 |
| 15311 | CYT B | L3 |
| 15670 | CYT B | L3 |
| 15824 | CYT B | L3 |
| 15942 | tRNA-T | L3 |
| 15944 | tRNA-T | L3 |
| 16124 | D-LOOP | L3 |
| 16327 | D-LOOP | L3 |
| 930 | 12S rRNA | T |
| 2141 | 16S rRNA | T |
| 2850 | 16S rRNA | T |
| 4688 | ND2 | T |
| 4917 | ND2 | T |
| 5277 | ND2 | T |
| 6489 | COI | T |
| 7022 | COI | T |
| 8572 | ATPase6 | T |
| 8697 | ATPase6 | T |
| 9117 | ATPase6 | T |
| 9899 | COIII | T |
| 10463 | tRNA-R | T |
| 11242 | ND4 | T |
| 11812 | ND4 | T |
| 12633 | ND5 | T |
| 13368 | ND5 | T |
| 13758 | ND5 | T |
| 13965 | ND5 | T |
| 14233 | ND6 | T |
| 14687 | tRNA-E | T |
| 14905 | CYT B | T |
| 15028 | CYT B | T |
| 15274 | CYT B | T |
| 15607 | CYT B | T |
| 15928 | tRNA-T | T |
| 16163 | D-LOOP | T |
| 16182 | D-LOOP | T |
| 16186 | D-LOOP | T |
| 16294 | D-LOOP | T |
| 16296 | D-LOOP | T |
| 16324 | D-LOOP | T |
| 988 | 12S rRNA | U |
| 1700 | 16S rRNA | U |
| 1721 | 16S rRNA | U |
| 2294 | 16S rRNA | U |
| 3116 | 16S rRNA | U |
| 3197 | 16S rRNA | U |
| 3348 | ND1 | U |
| 3720 | ND1 | U |
| 3849 | ND1 | U |
| 4553 | ND2 | U |
| 4646 | ND2 | U |
| 4703 | ND2 | U |
| 4732 | ND2 | U |
| 4811 | ND2 | U |
| 5319 | ND2 | U |
| 5390 | ND2 | U |
| 5495 | ND2 | U |
| 5656 | NON-CODING | U |
| 5999 | COI | U |
| 6045 | COI | U |
| 6047 | COI | U |
| 6146 | COI | U |
| 6518 | COI | U |
| 6629 | COI | U |
| 6719 | COI | U |
| 7109 | COI | U |
| 7385 | COI | U |
| 7768 | COII | U |
| 7805 | COII | U |
| 8473 | ATPase8 | U |
| 9070 | ATPase6 | U |
| 9266 | COIII | U |
| 9477 | COIII | U |
| 9667 | COIII | U |
| 10506 | ND4L | U |
| 10876 | ND4 | U |
| 10907 | ND4 | U |
| 10927 | ND4 | U |
| 11197 | ND4 | U |
| 11332 | ND4 | U |
| 11732 | ND4 | U |
| 12346 | ND5 | U |
| 12557 | ND5 | U |
| 12618 | ND5 | U |
| 13020 | ND5 | U |
| 13617 | ND5 | U |
| 13637 | ND5 | U |
| 14139 | ND5 | U |
| 14179 | ND6 | U |
| 14182 | ND6 | U |
| 14620 | ND6 | U |
| 14793 | CYT B | U |
| 14866 | CYT B | U |
| 15191 | CYT B | U |
| 15218 | CYT B | U |
| 15454 | CYT B | U |
| 15693 | CYT B | U |
| 15907 | tRNA-T | U |
| 16051 | D-LOOP | U |
| 16256 | D-LOOP | U |
| 16270 | D-LOOP | U |
| 16399 | D-LOOP | U |
| 4580 | ND2 | V |
| 15904 | tRNA-T | V |
| 194 | D-LOOP | W |
| 1243 | 12S rRNA | W |
| 1406 | 12S rRNA | W |
| 3505 | ND1 | W |
| 6528 | COI | W |
| 8994 | ATPase6 | W |
| 10097 | ND3 | W |
| 11674 | ND4 | W |
| 11947 | ND4 | W |
| 12414 | ND5 | W |
| 13263 | ND5 | W |
| 15775 | CYT B | W |
| 15884 | CYT B | W |
| 16292 | D-LOOP | W |
| 225 | D-LOOP | X |
| 226 | D-LOOP | X |
| 6371 | COI | X |
| 8393 | ATPase8 | X |
| 8705 | ATPase6 | X |
| 14470 | ND6 | X |
| 15927 | tRNA-T | X |
| −73 | D-LOOP | not present |
| | | in [H] |
| −7028 | COI | not present |
| | | in [H] |
| −11698 | ND4 | not present |
| | | in [H] |
| and 14766, | CYT B | not present |
| | | in [H] |

[0014] and wherein a mitochondrial single nucleotide polymorphism that is haplogroup-associated is, for haplogroup A, B, C, D, E, H, I, J, K, L1, L2, L3, T, U, W or X, located at a nucleotide that corresponds to a nucleotide position of SEQ ID NO:1 that is selected from:

| Nucleotide | | |
|---|---|---|
| Position | Gene | Haplogroup |
| 16362 | D-LOOP | A, C, D, E, |
| | | H, L3 |
| 12705 | ND5 | A, C, D, E, |
| | | I, L1, L2, |
| | | L3, W, X |
| 1888 | 16S rRNA | A, C, T |
| 13708 | ND5 | A, J, X |
| 8027 | COII | A, L1 |
| 153 | D-LOOP | A, X |
| 207 | D-LOOP | B, I, L2, W |
| 13590 | ND5 | B, L2 |
| 9449 | COIII | B, L3 |
| 499 | D-LOOP | B, U |
| 16325 | D-LOOP | C, D |
| 10400 | ND3 | C, D, E |
| 14783 | CYT B | C, D, E |
| 10398 | ND3 | C, D, E, I, |
| | | J, K, L1, |
| | | L2, L3 |
| 15043 | CYT B | C, D, E, |
| | | I, T |
| 489 | D-LOOP | C, D, E, J |
| 8701 | ATPase6 | C, D, E, L1, |
| | | L2, L3 |
| 9540 | COIII | C, D, E, L1, |
| | | L2, L3 |
| 10873 | ND4 | C, D, E, L1, |
| | | L2, L3 |
| 15301 | CYT B | C, D, E, |
| | | L2, L3 |
| 11914 | ND4 | C, K, L1, L2 |
| 16298 | D-LOOP | C, V |
| 3010 | 16S rRNA | D, H, J, U |
| 16311 | D-LOOP | H, K, L1, L3 |
| 93 | D-LOOP | H, L1 |
| 16304 | D-LOOP | H, T |
| 16291 | D-LOOP | H, U |
| 16356 | D-LOOP | H, U |
| 16482 | D-LOOP | H, U |
| 15924 | tRNA-T | I, K, U |
| 10915 | ND4 | I, L1 |
| 204 | D-LOOP | I, L2, W |
| 8251 | COII | I, W |
| 1719 | 16S rRNA | I, X |
| 14798 | CYT B | J, K |
| 15257 | CYT B | J, K |
| 5460 | ND2 | J, L1, W |
| 185 | D-LOOP | J, L3 |
| 11002 | ND4 | J, L3 |
| 4216 | ND1 | J, T |
| 11251 | ND4 | J, T |
| 15452 | CYT B | J, T |
| 16126 | D-LOOP | J, T |
| 9548 | COIII | J, U |
| 13934 | ND5 | J, U |
| 5231 | ND2 | K, L1 |
| 709 | 12S rRNA | K, L1, T, W |
| 1811 | 16S rRNA | K, U |
| 11467 | ND4 | K, U |
| 12308 | tRNA-L | K, U |
| 12372 | ND5 | K, U |
| 182 | D-LOOP | L1, L2 |
| 198 | D-LOOP | L1, L2 |
| 769 | 12S rRNA | L1, L2 |
| 1018 | 12S rRNA | L1, L2 |
| 3594 | ND1 | L1, L2 |
| 4104 | ND1 | L1, L2 |
| 7256 | COI | L1, L2 |
| 7521 | tRNA-D | L1, L2 |
| 13650 | ND5 | L1, L2 |
| 16278 | D-LOOP | L1, L2, L3, X |
| 189 | D-LOOP | L1, L3 |
| 2352 | 16S rRNA | L1, L3 |
| 13105 | ND5 | L1, L3 |
| 5046 | ND2 | L1, W |
| 6152 | COI | L2, U |
| 15784 | CYT B | L2, U, W |
| 5147 | ND2 | L3, T |
| 6221 | COI | L3, X |
| 5426 | ND2 | T, U |
| 13734 | ND5 | T, U |
| and 13966. | ND5 | T, X |

[0015] In certain other embodiments the mitochondrial single nucleotide polymorphism that is associated with a mitochondrial haplogroup is present in members of only one haplogroup and is a haplogroup-specific polymorphism as just described that is present in members of only one haplogroup

[0016] According to another embodiment of the invention there is provided a method for determining the mitochondrial haplogroup subgroup of a subject, comprising determining, in a biological sample comprising mitochondrial DNA from a subject, the presence or absence of at least one mitochondrial single nucleotide polymorphism that is associated with a mitochondrial haplogroup subgroup. In certain other embodiments the mitochondrial haplogroup is haplogroup K, U, J, T, W, I, H, V, X, L1, L2 or L3. In certain other embodiments at least one mitochondrial single nucleotide polymorphism that is associated with a mitochondrial haplogroup subgroup is a mitochondrial single nucleotide polymorphism located at a nucleotide that corresponds to a nucleotide position of SEQ ID NO:1 that is selected from the group consisting of position 3010, 16162, 16189, 16304, 1811, 3197, 9477, 14793, 16256, 13617, 16270, 7768, 14182, 3480, 9055, 9698, 10550, 11299, 14167, 14798, 16224, 16311, 1189, 10398, 497, 11470, 11914, 15924, 3010, 10398, 12612, 13798, 16069, 295, 489, 228, 462, 16193, 709, 1888, 4917, 8697, 10463, 13368, 14905, 15607, 15928, 16189, 16294, 5426, 6489, 11812, 15043, 16298, 12633, 16163 and 16186.

[0017] In another embodiment the invention provides a method for determining a mitochondrial haplogroup subgroup of a subject, comprising determining, in a biological sample comprising mitochondrial DNA from a subject of known mitochondrial haplogroup selected from haplogroups K, U, X, I, J, T, L1, L2 and L3, the presence or absence of a set comprising a plurality of single nucleotide polymorphisms wherein each polymorphism is located at a nucleotide that corresponds to a nucleotide position of SEQ ID NO:1, the set selected from the group consisting of a first haplogroup K subgroup comprising a polymorphism at positions 1147, 12308, 12372, 1811, 3480, 9055, 9698, 10550, 11299, 14167, 14798, 16224, 16311 and 709; a second haplogroup K subgroup comprising a polymorphism at positions 1147, 12308, 12372, 1811, 3480, 9055, 9698, 10550, 11299, 14167, 14798, 16224, 16311, 1189 and 10398; a third haplogroup K subgroup comprising a polymorphism at positions 1147, 12308, 12372, 1811, 3480, 9055, 9698, 10550, 11299, 14167, 14798, 16224, 16311, 1189, 10398 and 497; a fourth haplogroup K subgroup comprising a polymorphism at positions 1147, 12308, 12372, 1811, 3480, 9055, 9698, 10550, 11299, 14167, 14798, 16224, 16311, 1189, 10398, 497 and 11914; a fifth haplogroup K subgroup comprising a polymorphism at positions 1147, 12308, 12372, 1811, 3480, 9055, 9698, 10550, 11299, 14167, 14798, 16224, 16311, 1189, 10398, 497, 11914, 11470 and 15924; a sixth haplogroup K subgroup comprising a polymorphism at positions 1147, 12308, 12372, 1811, 3480, 9055, 9698, 10550, 11299, 14167, 14798, 16224, 16311, 1189, 10398, 497; 11914, 11470, 15924, 12978 and 12954; a seventh haplogroup K subgroup comprising a polymorphism at positions 1147, 12308, 12372, 1811, 3480, 9055, 9698, 10550, 11299, 14167, 14798, 16224, 16311, 1189, 10398, 497; 11914, 11470, 15924, 12978, 12954 and 114; a first haplogroup U subgroup comprising a polymorphism at positions 11467, 12308, 12372 and 1811; a second haplogroup U subgroup comprising a polymorphism at positions 11467, 12308, 12372, 3197, 9477, 13617, 16270; a third haplogroup U subgroup comprising a polymorphism at positions 11467, 12308, 12372, 3197, 9477, 13617, 16270, 7768 and 14182; a fourth haplogroup U subgroup comprising a polymorphism at positions 11467, 12308, 12372, 3197, 9477, 13617, 16270, 14793 and 16256; a fifth haplogroup U subgroup comprising a polymorphism at positions 11467, 12308, 12372, 3197, 9477, 13617, 16270, 14793, 16256 and 15218; a first haplogroup X subgroup comprising a polymorphism at positions 12705, 16223, 1719, 6221, 6371, 13966, 14470, 16278 and 225; a second haplogroup X subgroup comprising a polymorphism at positions 12705, 16223, 1719, 6221, 6371, 13966, 14470, 16278, 225 and 226; a first haplogroup I subgroup comprising a polymorphism at positions 12705, 16223, 1719, 10238, 10398, 12501, 13780 and 15043; a second haplogroup I subgroup comprising a polymorphism at positions 12705, 16223, 1719, 10238, 10398, 12501, 13780, 15043, 250, 4529, 10034, 15924 and 16391; a first haplogroup J subgroup comprising a polymorphism at positions 4216, 11251, 15452, 3010, 10398, 12612, 13708, 16069 and 16126; a second haplogroup J subgroup comprising a polymorphism at positions 4216, 11251, 15452, 3010, 10398, 12612, 13708, 16069, 16126, 295 and 489; a third haplogroup J subgroup comprising a polymorphism at positions 4216, 11251, 15452, 3010, 10398, 12612, 13708, 16069, 16126, 295, 489 and 15257; a fifth haplogroup J subgroup comprising a polymorphism at positions 4216, 11251, 15452, 3010, 10398, 12612, 13708, 16069, 16126, 295, 489 and 462; a sixth haplogroup J subgroup comprising a polymorphism at positions 4216, 11251, 15452, 3010, 10398, 12612, 13708, 16069, 16126, 295, 489, 462 and 228; a first haplogroup T subgroup comprising a polymorphism at positions 709, 1888, 4917, 8697, 10463, 13368, 14905, 15607, 15928, 16126, 16294 and 12633; a second haplogroup T subgroup comprising a polymorphism at positions 709, 1888, 4917, 8697, 10463, 13368, 14905, 15607, 15928, 16126, 16294, 12633, 16163 and 16186; a third haplogroup T subgroup comprising a polymorphism at positions 709, 1888, 4917, 8697, 10463, 13368, 14905, 15607, 15928, 16126, 16294, 11812, 14233 and 16296; a fourth haplogroup T subgroup comprising a polymorphism at positions 709, 1888, 4917, 8697, 10463, 13368, 14905, 15607, 15928, 16126, 16294, 11812, 14233, 16296, 930, 5147 and 16304; a fifth haplogroup T subgroup comprising a polymorphism at positions 709, 1888, 4917, 8697, 10463, 13368, 14905, 15607, 15928, 16126, 16294, 11812, 14233, 16296, 5426, 6489 and 15043; a first haplogroup L1 subgroup comprising a polymorphism at positions 8701, 9540, 10398, 10873, 12705, 16223, 769, 1018, 3594, 4104, 7256, 7521, 13650, 247, 825, 2758, 2885, 2666, 7055, 7146, 7389, 8468, 8655, 10688, 10810, 13105, 13506, 13789, 14178, 14560, 16187 and 16311; a second haplogroup L1 subgroup comprising a polymorphism at positions 8701, 9540, 10398, 10873, 12705, 16223, 769, 1018, 3594, 4104, 7256, 7521, 13650, 247, 825, 2758, 2885, 2666, 7055, 7146, 7389, 8468, 8655, 10688, 10810, 13105, 13506, 13789, 14178, 14560, 16187, 16311 and 182; a third haplogroup L1 subgroup comprising a polymorphism at positions 8701, 9540, 10398, 10873, 12705, 16223, 769, 1018, 3594, 4104, 7256, 7521, 13650, 247, 825, 2758, 2885, 2666, 7055, 7146, 7389, 8468, 8655, 10688, 10810, 13105, 13506, 13789, 14178, 14560, 16187, 16311, 182, 8027 and 16294; a fourth haplogroup L1 subgroup comprising a polymorphism at positions 8701, 9540, 10398, 10873, 12705, 16223, 769, 1018, 3594, 4104, 7256, 7521, 13650, 247, 825, 2758, 2885, 2666, 7055, 7146, 7389, 8468, 8655, 10688, 10810, 13105, 13506, 13789, 14178, 14560, 16187, 16311, 182, 357, 709, 710, 1738, 2352, 2768, 3308, 3693, 5036, 5393, 5655, 6548, 6827, 6989, 7867, 8248, 12519, 13880, 14203, 15115, 16126 and 16264; a fifth haplogroup L1 subgroup comprising a polymorphism at positions 8701, 9540, 10398, 10873, 12705, 16223, 769, 1018, 3594, 4104, 7256, 7521, 13650, 247, 825, 2758, 2885, 2666, 7055, 7146, 7389, 8468, 8655, 10688, 10810, 13105, 13506, 13789, 14178, 14560, 16187, 16311, 182, 357, 709, 710, 1738, 2352, 2768, 3308, 3693, 5036, 5393, 5655, 6548, 6827, 6989, 7867, 8248, 12519, 13880, 14203, 15115, 16126, 16264 and 14769; a first haplogroup L2 subgroup comprising a polymorphism at positions 8701, 9540, 10398, 10873, 12705, 16223, 769, 1018, 3594, 4104, 7256, 7521, 13650, 2416, 8206, 9221, 10115, 11944, 13590, 15301, 16278 and 16390; a second haplogroup L2 subgroup comprising a polymorphism at positions 8701, 9540, 10398, 10873, 12705, 16223, 769, 1018, 3594, 4104, 7256, 7521, 13650, 2416, 8206, 9221, 10115, 11944, 13590, 15301, 16278, 16390 and 182; a third haplogroup L2 subgroup comprising a polymorphism at positions 8701, 9540, 10398, 10873, 12705, 16223, 769, 1018, 3594, 4104, 7256, 7521, 13650, 2416, 8206, 9221, 10115, 11944, 13590, 15301, 16278, 16390, 2789, 7175, 7274, 7771, 11914, 12693, 13803, 14566, 15784 and 16294; a fourth haplogroup L2 subgroup comprising a polymorphism at positions 8701, 9540, 10398, 10873, 12705, 16223, 769, 1018, 3594, 4104, 7256, 7521, 13650, 2416, 8206, 9221, 10115, 11944, 13590, 15301, 16278, 16390, 2789, 7175, 7274, 7771, 11914, 12693, 13803, 14566, 15784, 16294 and 16309; a fifth haplogroup L2 subgroup comprising a polymorphism at positions 8701, 9540, 10398, 10873, 12705, 16223, 769, 1018, 3594, 4104, 7256, 7521, 13650, 2416, 8206, 9221, 10115, 11944, 13590, 15301, 16278, 16390, 2789, 7175, 7274, 7771, 11914, 12693, 13803, 14566, 15784, 16294, 16309, 3918, 5285, 15244, 15629; a first haplogroup L3 subgroup comprising a polymorphism at positions 8701, 9540, 10398, 10873, 12705, 16223, 15301; a second haplogroup L3 subgroup comprising a polymorphism at positions 8701, 9540, 10398, 10873, 12705, 16223, 15301, 13105; a third haplogroup L3 subgroup comprising a polymorphism at positions 8701, 9540, 10398, 10873, 12705, 16223, 15301, 13105, 3450, 5773, 6221, 9449, 10089, 10373, 13914, 15311, 15824, 15944, 16124, 16278 and 16362; a fourth haplogroup L3 subgroup comprising a polymorphism at positions 8701, 9540, 10398, 10873, 12705, 16223, 15301, 489, 10400, 14783 and 15043; a fifth haplogroup L3 subgroup comprising a polymorphism at positions 8701, 9540, 10398, 10873, 12705, 16223, 15301, 489, 10400, 14783, 15043, 2092, 3010, 4883, 5178, 6578, 14668 and 16325; a sixth haplogroup L3 subgroup comprising a polymorphism at positions 8701, 9540, 10398, 10873, 12705, 16223, 15301, 489, 10400, 14783, 15043 and 16362; a seventh haplogroup L3 subgroup comprising a polymorphism at positions 8701, 9540, 10398, 10873, 12705, 16223, 15301, 489, 10400, 14783, 15043, 4715, 7196, 8584 and 16298; an eighth haplogroup L3 subgroup comprising a polymorphism at positions 8701, 9540, 10398, 10873, 12705, 16223, 15301, 489, 10400, 14783, 15043, 4715, 7196, 8584, 16298, 249, 3552, 9545, 11914, 13263, 14318, 15487, 16325 and 16327; a ninth haplogroup L3 subgroup comprising a polymorphism at positions 8701, 9540, 10398, 10873, 12705, 16223, 15301, 489, 10400, 14783, 15043, 4715, 7196, 8584, 16298, 249, 3552, 9545, 11914, 13263, 14318, 15487, 16325, 16327, 289 and 290; and a tenth haplogroup L3 subgroup comprising a polymorphism at positions 8701, 9540, 10398, 10873, 12705, 16223, 15301, 489, 10400, 14783, 15043, 4715, 7196, 8584, 16298, 249, 3552, 9545, 11914, 13263, 14318, 15487, 16325, 16327, 289, 290 and 15930.

[0018] In another embodiment the invention provides a method for determining the genetic relationship between two subjects, comprising determining, in each of a first biological sample comprising mitochondrial DNA from a first subject and a second biological sample comprising mitochondrial DNA from a second subject, the presence or absence of at least one mitochondrial single nucleotide polymorphism, wherein either (i) the presence of at least one mitochondrial single nucleotide polymorphism in both of said first and second biological samples, or (ii) the absence of at least one mitochondrial single nucleotide polymorphism from both of said first and second biological samples, indicates a genetic relationship between the subjects, and therefrom determining the genetic relationship between the subjects. In certain embodiments at least one mitochondrial single nucleotide polymorphism is associated with a mitochondrial haplogroup that is haplogroup A, B, C, D, E, H, I, J, K, L1, L2, L3, T, U, V, W or X. In certain further embodiments at least one mitochondrial single nucleotide polymorphism is a haplogroup-specific polymorphism as described above.

[0019] The invention also provides, in other embodiments, a method for determining the genetic relationship between (i) an unknown source or biological subject from which an unidentified sample is obtained, and (ii) a known source or biological subject from an identified sample is obtained, comprising determining the presence or absence of at least one mitochondrial single nucleotide polymorphism, in each of a first biological sample derived from an unknown subject or biological source and a second biological sample derived from a known subject or biological source, wherein said first and second biological samples each comprise mitochondrial DNA, wherein either (i) the presence of at least one mitochondrial single nucleotide polymorphism in both of said first and second biological samples, or (ii) the absence of at least one mitochondrial single nucleotide polymorphism from both of said first and second biological samples, indicates a genetic relationship between the subjects, and therefrom determining the genetic relationship between the biological samples.

[0020] Turning to another embodiment of the present invention, there is provided a method of determining the presence of or the risk for having a disease associated with a mitochondrial DNA single nucleotide polymorphism, comprising (a) identifying at least one haplogroup-associated mitochondrial DNA single nucleotide polymorphism in a biological sample comprising mitochondrial DNA from a subject suspected of having or being at risk for having a disease associated with a mitochondrial DNA single nucleotide polymorphism; and (b) identifying in said sample at least one disease associated mitochondrial DNA single nucleotide polymorphism that is not a haplogroup-associated mitochondrial DNA single nucleotide polymorphism, and therefrom determining the presence or risk of disease. In certain other embodiments the disease associated mitochondrial DNA single nucleotide polymorphism that is not a haplogroup-associated mitochondrial DNA single nucleotide polymorphism is an Alzheimer's disease-associated polymorphism, and in certain other embodiments the disease associated mitochondrial DNA single nucleotide polymorphism that is not a haplogroup-associated mitochondrial DNA single nucleotide polymorphism is a type 2 diabetes-associated polymorphism.

[0021] These and other aspects of the present invention will become apparent upon reference to the following detailed description and attached drawings. All references disclosed herein are hereby incorporated by reference in their entireties as if each was incorporated individually

### BRIEF DESCRIPTION OF THE DRAWINGS

[0022] FIG. 1 provides a phylogenetic tree of European mtDNA haplotypes.

[0023] FIG. 2 provides a phylogenetic tree of African mtDNA haplotypes.

[0024] FIGS. 3-6 show reduced median network of the specified mtDNA haplogroups. For reduced median network analysis, see, e.g., Bandelt et al., 1995 Genetics 141:743-753.

[0025] FIG. 3 shows a reduced median network of European mtDNA haplogroups.

[0026] FIG. 4 shows a reduced median network of European H and V mtDNA haplogroups.

[0027] FIG. 5 shows a reduced median network of African mtDNA haplogroups.

[0028] FIG. 6 shows a reduced median network of Asian mtDNA haplogroups.

### DETAILED DESCRIPTION OF THE INVENTION

[0029] The present invention provides improved compositions and methods for identifying individuals, subpopulations and populations by determination of mtDNA haplogroup, genealogic, forensic, and related genetic relationships. As described herein, surprising diversity in mtDNA sequences permits expanded definition of mitochondrial polymorphism and redefinition of mtDNA haplogroups and subgroups at a level of refinement not previously recognized. The invention thus exploits the high mutation rate of mitochondrial DNA (mtDNA) to identify individuals, subpopulations and/or populations on the basis of specific mutations associated with particular characteristics such as race, genealogy and/or the presence of, or risk for having, certain diseases. In addition, mtDNA may be used to identify specific individuals. The present invention is directed generally to compositions and methods for identifying mtDNA mutations and thereby diagnosing the risk for having, or presence of, a disease. The invention also permits determination of other characteristics such as genealogy, population, race or ethnic group. In addition, the methods of the present invention are directed to identifying genetic and familial relationships between subjects or biological sources of mitochondrial DNA samples for a variety of purposes including, for instance, maternity testing, forensic studies, genetic counseling and genealogical analysis, and the like.

[0030] Biological samples may be provided by obtaining a blood sample, biopsy specimen, tissue explant, organ culture or any other tissue or cell preparation from a subject or a biological source, and in most preferred embodiments of the invention the biological sample comprises mtDNA. The subject or biological source may be a human or another biological organism, including a genetically engineered organism, such as a non-human animal, a plant, a unicellular organism or a multicellular organism or mitochondria prepared therefrom. The subject or biological source may also be a primary cell culture or culture adapted cell line including but not limited to genetically engineered cell lines that may contain chromosomally integrated or episomal recombinant nucleic acid sequences, immortalized or immortalizable cell lines, somatic cell hybrid or cytoplasmic hybrid “cybrid” cell lines (see, e.g., U.S. Pat. No. 5,888,498), differentiated or differentiatable cell lines, transformed cell lines and the like. A biological sample may, for example, be derived from a recombinant cell line or from a transgenic animal.

[0031] In certain embodiments of the invention, a subject or biological source may be infected with a microorganism such as a DNA virus, a retrovirus, a mycoplasma or a bacterium. In particular embodiments of the invention, for instance, those that relate to forensic sciences, a subject or biological source may provide material comprising mitochondrial DNA that is found at a crime scene or that may be otherwise associated with a person (including, for example, a criminal suspect), place or thing with which a suspect may have come into contact, for use as evidence. In certain related embodiments a biological sample may be derived from an unknown source or biological subject to provide an unidentified sample, which may then be characterized using the compositions and methods described herein. In certain other related embodiments such characterization may be used to determine a mitochondrial genetic relationship between the unknown source or biological subject and one or more of a particular species, a mitochondrial haplogroup, a mitochondrial haplogroup subgroup or a known source or biological subject having at least one mitochondrial single nucleotide polymorphism as provided herein, for instance, to identify the biological subject and/or to determine a genetic relationship between the subject and another individual, population or subpopulation (e.g., a haplogroup, subgroup or family).

[0032] In certain embodiments or the invention, the subject or biological source may be suspected of having or being at risk of having a disease associated with altered mitochondrial function, (e.g., Alzheimer's Disease, type 2 diabetes mellitus), and in certain embodiments of the invention, the subject or biological source may be known to be free of a risk for, or presence of, such a disease, or the risk or presence of a disease may not be known. In other embodiments of the invention, the subject or source may be suspected of being involved in an illegal activity. A subject or sample may be suspected of being genetically related to a specific individual or of belonging to a certain genealogical lineage, race or ethnic group. In other embodiments, the subject or source may not be suspected of being involved in an illegal activity or of being genetically related to a specific individual or of belonging to a certain genealogical lineage, race or ethnic group.

[0033] For example, and according to non-limiting theory, in certain embodiments it may be desirable to use as a subject or biological source a control individual selected according to criteria that will be apparent to a person having ordinary skill in the art based on one or more variables which may require normalization, typically an age- and/or sex-matched individual, a healthy individual or an individual appropriate as a control for a subject suspected of having or being at risk for a particular disease It may also be desirable to use as a subject or biological source a control individual for comparison purposes for maternity or forensic tests. Those having ordinary skill in the art are thus familiar with the design and selection of appropriate controls for different particular purposes. For instance, in certain embodiments it may be desirable to identify such a control individual who is believed to be free of a particular disease, and in certain other embodiments, a control individual may share a mitochondrial genetic relationship to a subject suspected of having a particular disease, such as the mother or sibling of the subject.

[0034] According to the present invention there is provided the unexpected discovery that determination of unprecedented polymorphism in mitochondrial DNA permits refinement of the assignment of individuals to particular mitochondrial haplogroups and haplogroup subgroups as provided herein. Additionally, the present invention exploits the surprising discoveries that in many cases, the haplogroup and/or haplogroup subgroup to which an individual belongs may not be determinative of a presence of a disease or of a risk for having a disease. Rather, as provided by the present disclosure, the improved ability to identify mitochondrial single nucleotide polymorphisms that are associated with particular haplogroups and/or haplogroup subgroups as described herein further permits identification of additional mitochondrial single nucleotide polymorphisms.

[0035] As described in greater detail herein, such additional polymorphisms, which are not definitive for a particular haplogroup and/or haplogroup subgroup, are useful correlates for other purposes, for example, in the identification of unique individuals (e.g., in forensics) and/or for determination of an individual's disease predisposition. Thus, in certain embodiments the present invention provides an improved system for distinguishing individuals belonging to the same mitochondrial haplogroup on the basis of particular mitochondrial DNA polymorphisms described herein. For instance, individuals of a common maternal lineage would fall into a common haplogroup according to standard mitochondrial genotyping methodologies without there being a basis for further differentiation, while the present invention provides one or more mitochondrial single nucleotide polymorphisms that are unique to each individual within a haplogroup (or haplogroup subgroup) thereby permitting such differentiation. These and other embodiments are also described in greater detail below.

[0036] In certain preferred embodiments it may be desirable to determine whether the subject, patient or biological source falls within clinical parameters indicative of a disease such as, but not limited to, Alzheimer's disease (AD) or type 2 diabetes mellitus (type 2 DM). Signs and symptoms of AD accepted by those skilled in the art may be used to so designate a subject or biological source, for example, clinical signs referred to in McKhann et al. (Neurology 34:939, 1984, National Institute of Neurology, Communicative Disorders and Stroke and Alzheimer's Disease and Related Disorders Association Criteria of Probable AD, NINCDS-ADRDA) and references cited therein, or other means known in the art for diagnosing AD. Similarly, signs and symptoms of type 2 diabetes mellitus accepted by those skilled in the art may be used to so designate a subject or biological source, for example, clinical signs referred to in Gavin et al. (Diabetes Care 22 (Suppl. 1):55-519, 1999, American Diabetes Association Expert Committee on the Diagnosis and Classification of Diabetes Mellitus) and references cited therein, or other means known in the art for diagnosis of type 2 diabetes mellitus. Also, by way of illustration and not limitation, accepted criteria such as particular clinical signs and symptoms (or ranges or combinations thereof) will be known to those familiar with the art for any of the other diseases associated with altered mitochondrial function as provided herein. (See, e.g., Chinnery et al., 1999 J. Med. Genet. 36:425)

[0037] For example, according to certain embodiments the present invention provides a method for determining the risk for having, or presence of, a malignant condition in a subject. A malignant condition in a subject, as used herein, refers to the presence of dysplastic, cancerous and/or transformed cells in the subject, including, for example neoplastic, tumor, non-contact inhibited or oncogenically transformed cells, or the like. By way of illustration and not limitation, in the context of the present invention a malignant condition may refer further to the presence in a subject of cancer cells such as colorectal cancer, lung cancer, bladder cancer, or head and neck tumors, as have been described in the context of somatic mtDNA sequence variations distinct from the mitochondrial single nucleotide polymorphisms described herein (cf, Fliss et al., 1999 Science 287:2017; Polyak et al., 1998 Nat. Genet. 20:291).

[0038] In other preferred embodiments, it may be useful to combine the present invention with other procedures for identifying an individual, including methods of analyzing either mtDNA or genomic DNA (e.g., extramitochondrial DNA, i.e., nuclear chromosomal or episomal DNA) such as, for example, RFLP analysis, allele specific oligonucleotide analysis or any other technique for DNA analysis known in the art, including those described above.

[0039] As noted above, a biological sample for use according to the most highly preferred embodiments of the present invention contains mtDNA as provided herein, and may comprise any source of mitochondrial DNA, including any tissue or cell preparation in which mitochondrially derived nucleic acids (e.g., mtDNA) are present. In addition, a source or biological sample comprising mitochondrial DNA may include a source of mtDNA wherein cells or tissues are not present. Biological samples may therefore contain live cells, or dead cells or no cells. Compositions and methods useful for obtaining and detecting mtDNA are provided, for example, in U.S. Pat. Nos. 5,565,323 and 5,840,493. Biological samples may thus be provided by obtaining a sample of blood, hair, scalp, skin or other epithelial cells, bone, saliva, mucous or other secretion, semen, or other forensic sample, biopsy specimen, tissue explant, organ culture or any other tissue, cell preparation or non-cell preparation from a subject or a biological source as provided herein. Thus, for example, in certain specific embodiments, biological samples of the invention may include mtDNA isolated at a crime scene or from another source of forensic evidence. In certain other embodiments, biological samples may include mtDNA isolated from archaeological sites or from human or animal remains.

[0040] Any mtDNA sequence or portion of a mutated mtDNA (e.g., mtDNA that contains at least one single nucleotide polymorphism as provided herein, including mtDNA that contains a plurality of such single nucleotide polymorphisms) sequence that corresponds to the human mtDNA sequence disclosed by Anderson et al. (SEQ ID NO:1, 1981 Nature 290:457; see also Marzuki et al., 1991 Human Genet. 88:139) and revised according to Andrews et al. (1999 Nature Genetics 23:147), or a portion thereof or several portions thereof, may be useful in these embodiments of the invention. Examples of human mtDNA point mutations derived from specific mtDNA sequence regions that are useful in certain embodiments of the invention are disclosed, according to the nucleotide positions at which wildtype and mutant mtDNA differ, in Tables 1 and 2. Those familiar with the art will recognize the established convention for naming regions of the circular mtDNA genome according to the D-loop and the several mtDNA gene loci, including the mitochondrial rRNA genes, the mitochondrial tRNA genes, the mitochondrial NADH dehydrogenase genes, the mitochondrial cytochrome c oxidase genes, the mitochondrial ATP synthase genes and the mitochondrial cytochrome b gene, and the corresponding nucleotide position numbers of SEQ ID NO:1 that are spanned by each of these regions (see, e.g., Scheffler, Mitochondria, 1999 John Wiley & Sons, pages 48-140, and references cited therein; see also “Mitomap” at http://www.gen.emory.edu/mitomap.html). Thus, for example, Table 1 shows mitochondrial single nucleotide polymorphisms that include polymorphisms which have been correlated with Alzheimer's disease, as disclosed in co-pending U.S. patent application Ser. No. 09/551,941 which is hereby incorporated by reference, and Table 2 shows mitochondrial single nucleotide polymorphisms that include polymorphisms which have been correlated with type 2 diabetes in certain mitochondrial haplogroups, as disclosed in the co-pending U.S. Patent application No. 60/333,448, hereby incorporated by reference. Full-length mtDNA sequences from 560 human subjects are disclosed herein in the Sequence Listing and are set forth at SEQ ID NOS:2-561.

TABLE 1
MTDNA SINGLE NUCLEOTIDE POLYMORPHISMS
ASSOCIATED WITH AD

| | | | Nucl. | | |
|---|---|---|---|---|---|
| | Nucleotide | Nucleotide | Substi- | # | Haplo- |
| Gene | Position | (CRS) | tution | Samples | group |
| D-LOOP | 72 | T | C | 1 | H |
| D-LOOP | 114 | C | T | 1 | K |
| D-LOOP | 146 | T | C | 2 | U, H |
| D-LOOP | 185 | G | A | 1 | J |
| D-LOOP | 189 | A | G | 1 | K, W |
| D-LOOP | 199 | T | C | 1 | I |
| D-LOOP | 204 | T | C | 1 | W |
| D-LOOP | 207 | G | A | 2 | W, I |
| D-LOOP | 228 | G | A | 1 | J |
| D-LOOP | 236 | T | C | 1 | H |
| D-LOOP | 239 | T | C | 2 | H |
| D-LOOP | 456 | C | T | 1 | H |
| D-LOOP | 462 | C | T | 2 | J |
| D-LOOP | 482 | T | C | 1 | J |
| D-LOOP | 489 | T | C | 2 | J |
| D-LOOP | 497 | C | T | 1 | K, K |
| D-LOOP | 500 | C | G | 5 | H, W, J |
| D-LOOP | 516 | C | T | 1 | U |
| D-LOOP | 522 | C | DEL | 1 | H |
| D-LOOP | 523 | A | DEL | 1 | H |
| D-LOOP | 547 | A | T | 1 | I |
| 12S RRNA | 593 | T | C | 1 | K |
| 12S RRNA | 669 | T | C | 1 | I |
| 12S RRNA | 960 | C | DEL | 1 | U |
| 12S RRNA | 1007 | G | A | 1 | J |
| 12S RRNA | 1243 | T | C | 1 | W |
| 12S RRNA | 1393 | G | A | 1 | H |
| 16S RRNA | 1719 | G | A | 1 | H, I |
| 16S RRNA | 1809 | T | C | 1 | U |
| 16S RRNA | 2352 | T | C | 1 | H |
| 16S RRNA | 2483 | T | C | 1 | K |
| 16S RRNA | 2702 | G | A | 1 | I |
| 16S RRNA | 2851 | A | G | 1 | H |
| 16S RRNA | 3197 | T | C | 1 | U |
| ND1 | 3333 | C | T | 1 | H |
| ND1 | 3336 | T | C | 1 | I |
| ND1 | 3348 | A | G | 1 | U |
| ND1 | 3394 | T | C | 1 | J |
| ND1 | 3398 | T | C | 1 | I |
| ND1 | 3423 | G | T | 1 | J |
| ND1 | 3505 | A | G | 1 | W |
| ND1 | 3559 | C | T | 1 | H |
| ND1 | 3915 | G | A | 2 | H |
| ND1 | 3992 | C | T | 1 | H |
| ND1 | 4024 | A | G | 1 | H |
| ND1 | 4095 | C | T | 1 | H |
| ND1 | 4216 | T | C | 3 | T, J |
| TRNA-Q | 4336 | T | C | 1 | H |
| ND2 | 4529 | A | T | 1 | I |
| ND2 | 4727 | A | G | 2 | H |
| ND2 | 4793 | A | G | 1 | H |
| ND2 | 4917 | A | G | 1 | T |
| ND2 | 4991 | G | A | 1 | H |
| ND2 | 5004 | T | C | 2 | H, W |
| ND2 | 5046 | G | A | 1 | W |
| ND2 | 5228 | C | G | 1 | H |
| ND2 | 5315 | A | G | 1 | I |
| ND2 | 5418 | T | G | 1 | J |
| ND2 | 5426 | T | C | 1 | T |
| ND2 | 5460 | G | A | 3 | H, W |
| ND2 | 5461 | C | G | 1 | J |
| TRNA-W | 5516 | A | G | 1 | H |
| TRNA-W | 5554 | C | A | 1 | U |
| TRNA-A | 5634 | A | G | 1 | H |
| TRNA-A/ | 5656 | A | G | 1 | U |
| TRNA-N | | | | | |
| TRNA-C | 5773 | G | A | 1 | J |
| CO1 | 6182 | G | A | 1 | U |
| CO1 | 6221 | T | C | 1 | H |
| CO1 | 6341 | C | T | 1 | U |
| CO1 | 6367 | T | C | 1 | K |
| CO1 | 6371 | C | T | 1 | H |
| CO1 | 6489 | C | A | 1 | T |
| CO1 | 7184 | A | G | 1 | J |
| CO1 | 7325 | A | G | 1 | H |
| CO2 | 7621 | T | C | 1 | K |
| CO2 | 7768 | A | G | 1 | U |
| CO2 | 7787 | C | T | 1 | H |
| CO2 | 7789 | G | A | 1 | J |
| CO2 | 7864 | C | T | 1 | W |
| CO2 | 7895 | G | A | 1 | U |
| CO2 | 7963 | A | G | 1 | J |
| CO2 | 8149 | A | G | 1 | H |
| CO2 | 8251 | G | A | 2 | W, I |
| CO2 | 8269 | G | A | 1 | H |
| CO2/ | 8276-8284 | | DEL | 1 | T |
| TRNA-K | | | | | |
| ATPAse 8 | 8470 | A | G | 1 | H |
| ATPASE 8 | 8485 | G | A | 1 | I |
| ATPASE 8 | 8508 | A | G | 1 | I |
| ATPASE 6 | 8602 | T | C | 1 | H |
| ATPASE6 | 8697 | G | A | 1 | T |
| ATPASE 6 | 8752 | A | G | 1 | H |
| ATPASE 6 | 8901 | A | G | 1 | I |
| ATPASE 6 | 8994 | G | A | 1 | W |
| ATPASE 6 | 9123 | G | A | 1 | H |
| CO3 | 9254 | A | G | 1 | H |
| CO3 | 9362 | A | G | 1 | H |
| CO3 | 9380 | G | A | 2 | H |
| CO3 | 9477 | G | A | 1 | U |
| CO3 | 9554 | G | A | 1 | H |
| CO3 | 9708 | T | C | 1 | H |
| CO3 | 9804 | G | A | 1 | H |
| CO3 | 9861 | T | C | 1 | H |
| TRNA-G | 10034 | T | C | 1 | I |
| TRNA-G | 10044 | A | G | 1 | H |
| ND3 | 10238 | T | C | 2 | I |
| TRNA-R | 10463 | T | C | 2 | T, J |
| ND4L | 10589 | G | A | 1 | H |
| ND4 | 10978 | A | G | 1 | K |
| ND4 | 11065 | A | G | 1 | I |
| ND4 | 11251 | A | G | 1 | J |
| ND4 | 11253 | T | C | 1 | H |
| ND4 | 11272 | A | G | 1 | U |
| ND4 | 11470 | A | G | 2 | K |
| ND4 | 11527 | C | T | 1 | J |
| ND4 | 11611 | G | A | 1 | H |
| ND4 | 11674 | C | T | 1 | W |
| ND4 | 11812 | A | G | 1 | T |
| ND4 | 11914 | G | A | 2 | K |
| ND4 | 11947 | A | G | 1 | W |
| ND5 | 12414 | T | C | 1 | W |
| ND5 | 12501 | G | A | 2 | I |
| ND5 | 12609 | T | C | 1 | U |
| ND5 | 12705 | C | T | 4 | H, W, I |
| ND5 | 12954 | T | C | 1 | K |
| ND5 | 13111 | T | C | 1 | H |
| ND5 | 13194 | G | A | 2 | H, U |
| ND5 | 13212 | C | T | 1 | H |
| ND5 | 13368 | G | A | 1 | T |
| ND5 | 13617 | T | C | 1 | U |
| ND5 | 13780 | A | G | 2 | I |
| ND5 | 13966 | A | G | 1 | H |
| ND5 | 14020 | T | C | 1 | T |
| ND5 | 14148 | A | G | 1 | W |
| ND6 | 14178 | T | C | 1 | I |
| ND6 | 14179 | A | G | 1 | U |
| ND6 | 14182 | T | C | 1 | U |
| ND6 | 14212 | T | C | 1 | H |
| ND6 | 14233 | A | G | 1 | T |
| ND6 | 14470 | T | C | 1 | H |
| ND6 | 14582 | A | G | 1 | H |
| CYT.B | 14905 | G | A | 1 | T |
| CYT.B | 15028 | C | A | 1 | T |
| CYT.B | 15043 | G | A | 3 | T, I |
| CYT.B | 15191 | T | C | 1 | U |
| CYT.B | 15299 | T | C | 1 | I |
| CYT.B | 15380 | A | G | 1 | U |
| CYT.B | 15553 | G | A | 1 | H |
| CYT.B | 15607 | A | G | 1 | T |
| CYT.B | 15758 | A | G | 1 | I |
| CYT.B | 15790 | C | T | 1 | U |
| CYT.B | 15808 | A | G | 1 | H |
| CYT.B | 15833 | C | T | 1 | H |
| CYT.B | 15884 | G | C | 1 | W |
| TRNA-T | 15924 | A | G | 3 | K, I |
| TRNA-T | 15928 | G | A | 1 | T |
| D-LOOP | 16069 | C | T | 2 | J |
| D-LOOP | 16086 | T | C | 1 | I |
| D-LOOP | 16093 | T | C | 1 | K |
| D-LOOP | 16126 | T | C | 3 | T, J |
| D-LOOP | 16129 | G | A | 2 | H, I |
| D-LOOP | 16145 | G | A | 1 | I |
| D-LOOP | 16147 | C | A | 1 | I |
| D-LOOP | 16172 | T | C | 1 | U |
| D-LOOP | 16174 | C | T | 1 | U |
| D-LOOP | 16182 | A | C | 1 | T |
| D-LOOP | 16183 | A | C | 4 | T, U, H |
| D-LOOP | 16189 | T | C | 5 | T, U, H |
| D-LOOP | 16192 | C | T | 1 | U |
| D-LOOP | 16193 | C | T | 1 | J |
| D-LOOP | 16223 | C | T | 4 | H, W, I |
| D-LOOP | 16224 | T | C | 3 | K |
| D-LOOP | 16234 | C | T | 1 | K |
| D-LOOP | 16235 | A | G | 1 | J |
| D-LOOP | 16239 | C | T | 1 | H |
| D-LOOP | 16248 | C | T | 1 | I |
| D-LOOP | 16256 | C | T | 1 | J |
| D-LOOP | 16261 | C | T | 1 | H |
| D-LOOP | 16270 | C | T | 1 | U |
| D-LOOP | 16278 | C | T | 2 | U, H |
| D-LOOP | 16290 | C | T | 1 | H |
| D-LOOP | 16292 | C | T | 1 | W |
| D-LOOP | 16293 | A | G | 1 | H |
| D-LOOP | 16294 | C | T | 1 | T |
| D-LOOP | 16298 | T | C | 2 | T, H |
| D-LOOP | 16300 | A | G | 1 | J |
| D-LOOP | 16304 | T | C | 1 | H |
| D-LOOP | 16309 | A | G | 1 | J |
| D-LOOP | 16311 | T | C | 5 | H, K, U |
| D-LOOP | 16320 | C | T | 1 | I |
| D-LOOP | 16355 | C | T | 1 | I |
| D-LOOP | 16362 | T | C | 2 | H |
| D-LOOP | 16391 | G | A | 1 | I |
| D-LOOP | 16482 | A | G | 2 | H |
| D-LOOP | 16524 | A | G | 1 | K |
| D-LOOP | 45 | C | INS | 1 | U |
| D-LOOP | 140 | C | T | 1 | H |
| D-LOOP | 188 | A | G | 2 | J |
| D-LOOP | 291 | A | INS | 1 | U |
| D-LOOP | 455 | T | DEL | 1 | U |
| D-LOOP | 500 | C | G | 2 | H |
| D-LOOP | 513 | G | DEL | 1 | H |
| D-LOOP | 514 | C | DEL | 1 | H |
| D-LOOP | 516 | C | T | 1 | U |
| D-LOOP | 527 | C | G | 2 | K, T |
| D-LOOP | 533 | A | G | 1 | I |
| D-LOOP | 568 | CCC | INS | 1 | I |
| D-LOOP | 710 | G | A | 1 | H |
| 12S RRNA | 749 | A | G | 1 | K |
| 12S RRNA | 960 | C | DEL | 1 | U |
| 12S RRNA | 1508 | C | T | 1 | H |
| 16S RRNA | 1809 | T | C | 1 | U |
| 16S RRNA | 2352 | T | C | 1 | H |
| 16S RRNA | 2833 | A | G | 1 | U |
| ND1 | 3559 | C | T | 1 | X |
| ND1 | 3745 | G | A | 1 | U |
| ND2 | 5237 | G | A | 1 | K |
| ND2 | 5348 | C | T | 1 | H |
| TRNA-W | 5516 | A | G | 1 | H |
| TRNA-W | 5554 | C | A | 1 | U |
| TRNA-C | 5773 | G | A | 1 | H |
| CO1 | 5979 | G | A | 1 | H |
| CO1 | 6182 | G | A | 1 | U |
| CO1 | 6272 | A | G | 1 | H |
| CO1 | 6320 | T | C | 1 | T |
| CO1 | 6341 | C | T | 1 | U |
| CO1 | 6480 | G | A | 2 | H, T |
| CO1 | 6498 | C | G | 1 | U |
| CO1 | 6722 | G | A | 1 | B |
| CO1 | 6845 | C | T | 1 | K |
| CO1 | 6911 | T | C | 1 | U |
| CO2 | 7787 | C | T | 1 | X |
| CO2 | 7830 | G | A | 1 | H |
| CO2 | 7853 | G | A | 1 | T |
| CO2 | 7927 | C | G | 1 | H |
| CO2 | 7978 | C | G | 1 | H |
| CO2 | 7985 | C | G | 2 | H, U |
| CO2 | 8149 | A | G | 1 | H |
| ATPASE 6 | 8865 | G | A | 1 | U |
| ATPASE 6 | 9098 | T | C | 1 | B |
| CO3 | 9129 | C | T | 1 | H |
| CO3 | 9708 | T | C | 1 | H |
| CO3 | 9861 | T | C | 1 | H |
| ND3 | 10154 | A | G | 1 | K |
| ND3 | 10394 | C | T | 1 | H |
| TRNA-R | 10448 | T | C | 1 | H |
| ND4L | 10724 | T | C | 1 | U |
| ND4 | 11272 | A | G | 1 | U |
| ND4 | 11590 | A | G | 1 | H |
| ND4 | 11824 | A | G | 1 | H |
| ND4 | 11893 | A | G | 1 | H |
| TRNA-S | 12217 | A | G | 1 | H |
| ND5 | 12471 | T | C | 1 | H |
| ND5 | 12609 | T | C | 1 | U |
| ND5 | 12738 | T | G | 1 | K |
| ND5 | 13194 | G | A | 1 | U |
| ND5 | 13212 | C | T | 1 | X |
| ND5 | 13351 | C | T | 1 | U |
| ND5 | 13746 | C | T | 1 | H |
| ND5 | 13889 | G | A | 1 | H |
| ND5 | 13943 | C | T | 1 | K |
| ND5 | 14133 | A | G | 1 | H |
| ND6 | 14323 | G | A | 1 | H |
| ND6 | 14512 | T | C | 1 | U |
| TRNA-E | 14684 | C | T | 1 | U |
| CYB | 14869 | G | A | 1 | H |
| CYB | 14978 | A | G | 1 | H |
| CYB | 15295 | C | T | 1 | T |
| CYB | 15380 | A | G | 1 | U |
| CYB | 15734 | G | A | 1 | U |
| CYB | 15790 | C | T | 1 | U |
| TRNA-T | 15947 | A | G | 1 | J |
| D-LOOP | 16136 | T | C | 1 | H |
| D-LOOP | 16168 | C | T | 1 | U |
| D-LOOP | 16174 | C | T | 1 | U |
| D-LOOP | 16209 | T | C | 1 | T |
| D-LOOP | 16219 | A | G | 1 | U |
| D-LOOP | 16239 | C | T | 1 | U |
| D-LOOP | 16260 | C | T | 1 | J |
| D-LOOP | 16263 | T | C | 1 | H |
| D-LOOP | 16295 | C | T | 1 | H |
| D-LOOP | 16343 | A | G | 1 | U |
| D-LOOP | 16524 | A | G | 1 | H |
| D-LOOP | 16526 | G | A | 1 | U |

[0041] TABLE 2
MITOCHONDRIAL SNPS AND HAPLOGROUPS IN NIDDM

| | | | NUCL. | | |
|---|---|---|---|---|---|
| | NUCLEOTIDE | NUCLEOTIDE | SUBSTI- | | HAPLO- |
| GENE | POSITION | (CRS) | TUTION | # SAMPLES | GROUP |
| D-LOOP | 62 | G | C | 1 | B |
| D-LOOP | 62 | G | C | 1 | B |
| D-LOOP | 94 | G | A | 1 | A |
| D-LOOP | 94 | G | A | 1 | A |
| D-LOOP | 95 | A | C | 1 | L1 |
| D-LOOP | 114 | C | G | 1 | B |
| D-LOOP | 151 | C | T | 1 | L1 |
| D-LOOP | 159 | T | C | 1 | H |
| D-LOOP | 188 | A | G | 1 | J |
| D-LOOP | 198 | C | T | 1 | L2 |
| D-LOOP | 215 | A | G | 1 | C |
| D-LOOP | 215 | A | G | 1 | C |
| D-LOOP | 257 | A | G | 1 | H |
| D-LOOP | 267 | T | C | 1 | D |
| D-LOOP | 271 | C | T | 1 | B |
| D-LOOP | 288 | A | G | 1 | A |
| D-LOOP | 317 | G | A | 1 | L1 |
| D-LOOP | 317 | G | A | 1 | L1 |
| D-LOOP | 320 | C | T | 1 | B |
| D-LOOP | 343 | C | T | 1 | B |
| D-LOOP | 362 | A | INS | 1 | A |
| D-LOOP | 418 | C | T | 1 | L2 |
| D-LOOP | 453 | T | DEL | 1 | B |
| D-LOOP | 454 | T | DEL | 1 | B |
| D-LOOP | 466 | T | C | 1 | U |
| D-LOOP | 480 | T | C | 1 | H |
| D-LOOP | 481 | C | T | 1 | B |
| D-LOOP | 481 | C | T | 1 | B |
| D-LOOP | 493 | A | G | 1 | C |
| D-LOOP | 568 | C | INS | 1 | D |
| D-LOOP | 568 | C | INS | 1 | H |
| D-LOOP | 568 | C | INS | 1 | T |
| D-LOOP | 568 | CC | INS | 1 | K |
| D-LOOP | 568 | C | INS | 1 | C |
| TRNA-F | 629 | T | C | 1 | A |
| 12S RRNA | 735 | A | G | 1 | H |
| 12S RRNA | 921 | T | C | 1 | L3 |
| 12S RRNA | 956 | C | INS | 1 | B |
| 12S RRNA | 956 | C | INS | 1 | A |
| 12S RRNA | 956 | C | INS | 1 | B |
| 12S RRNA | 960 | C | DEL | 1 | U |
| 12S RRNA | 961 | T | C | 1 | A |
| 12S RRNA | 961 | T | C | 1 | A |
| 12S RRNA | 966 | CC | INS | 1 | A |
| 12S RRNA | 966 | C | INS | 1 | A |
| 12S RRNA | 1002 | C | T | 1 | B |
| 12S RRNA | 1002 | C | T | 1 | B |
| 12S RRNA | 1007 | G | C | 1 | L2 |
| 12S RRNA | 1420 | T | C | 1 | L1 |
| 12S RRNA | 1462 | G | A | 1 | H |
| 16S RRNA | 1766 | T | C | 1 | L1 |
| 16S RRNA | 2145 | G | A | 1 | H |
| 16S RRNA | 2157 | A | INS | 1 | L1 |
| 16S RRNA | 2735 | G | A | 1 | C |
| 16S RRNA | 2755 | A | G | 1 | L1 |
| 16S RRNA | 2863 | T | C | 1 | L1 |
| 16S RRNA | 2903 | T | C | 1 | L3 |
| 16S RRNA | 3203 | A | G | 1 | L3 |
| ND1 | 3308 | T | A | 1 | A |
| ND1 | 3309 | C | INS | 1 | A |
| ND1 | 3311 | C | T | 1 | A |
| ND1 | 3338 | T | C | 1 | L2 |
| ND1 | 3338 | T | C | 1 | B |
| ND1 | 3513 | C | T | 1 | L1 |
| ND1 | 3766 | T | C | 1 | B |
| ND1 | 3766 | T | C | 1 | B |
| ND1 | 3777 | T | C | 1 | L2 |
| ND1 | 3927 | A | G | 1 | L1 |
| ND1 | 3936 | C | A | 1 | L2 |
| ND1 | 4012 | A | G | 1 | B |
| ND1 | 4129 | A | G | 1 | T |
| ND1 | 4167 | C | T | 1 | B |
| ND1 | 4167 | C | T | 1 | B |
| ND1 | 4232 | T | C | 1 | B |
| ND1 | 4242 | C | T | 1 | C |
| TRNA-Q | 4386 | T | C | 1 | H |
| TRNA-Q | 4392 | C | T | 1 | L3 |
| TRNA-M | 4435 | A | G | 1 | D |
| ND2 | 4506 | A | G | 1 | L1 |
| ND2 | 4655 | G | A | 1 | L2 |
| ND2 | 4733 | T | C | 1 | L3 |
| ND2 | 4908 | C | T | 1 | U |
| ND2 | 5156 | A | T | 1 | H |
| ND2 | 5165 | C | T | 1 | A |
| ND2 | 5183 | A | G | 1 | A |
| ND2 | 5237 | G | A | 1 | L1 |
| ND2 | 5372 | A | G | 1 | L3 |
| TRNA-W | 5463 | G | A | 1 | H |
| TRNA-C | 5824 | G | A | 1 | D |
| TRNA-Y/CO1 | 5899 | C | DEL | 1 | B |
| TRNA-Y/CO1 | 5900 | CC | INS | 1 | L1 |
| CO1 | 6026 | G | A | 1 | L2 |
| CO1 | 6164 | C | T | 1 | B |
| CO1 | 6164 | C | T | 1 | L2 |
| CO1 | 6164 | C | T | 1 | B |
| CO1 | 6308 | C | T | 1 | A |
| CO1 | 6308 | C | T | 1 | A |
| CO1 | 6311 | C | T | 1 | L2 |
| CO1 | 6340 | C | T | 1 | H |
| CO1 | 6378 | T | C | 1 | L1 |
| CO1 | 6392 | T | C | 1 | T |
| CO1 | 6620 | T | C | 1 | A |
| CO1 | 6663 | A | G | 1 | L2 |
| CO1 | 6710 | A | G | 1 | K |
| CO1 | 6722 | G | A | 1 | B |
| CO1 | 6932 | A | G | 1 | L3 |
| CO1 | 6951 | G | A | 1 | D |
| CO1 | 6951 | G | A | 1 | K |
| CO1 | 7158 | A | G | 1 | B |
| BO1 | 7158 | A | G | 1 | B |
| CO1 | 7202 | A | G | 1 | L1 |
| CO2 | 7621 | T | C | 1 | H |
| CO2 | 7692 | T | C | 1 | L1 |
| CO2 | 7697 | G | A | 1 | C |
| CO2 | 7702 | G | A | 1 | L2 |
| CO2 | 7853 | G | A | 1 | D |
| CO2 | 7978 | C | G | 1 | L3 |
| CO2 | 7978 | C | G | 1 | L2 |
| CO2 | 7985 | C | G | 1 | L3 |
| CO2 | 7985 | C | G | 1 | L2 |
| CO2 | 8032 | C | T | 1 | A |
| CO2 | 8087 | T | C | 1 | L1 |
| CO2 | 8098 | A | G | 1 | K |
| CO2 | 8119 | T | C | 1 | L2 |
| ATPASE 8 | 8419 | T | C | 1 | L1 |
| ATPASE 8 | 8460 | A | G | 1 | B |
| ATPASE 8 | 8460 | A | G | 1 | B |
| ATPASE 8 | 8478 | C | T | 1 | H |
| ATPASE 8 | 8530 | A | G | 1 | L3 |
| ATPASE 8 | 8557 | G | A | 1 | A |
| ATPASE 6 | 8574 | C | T | 1 | H |
| ATPASE 6 | 8604 | T | C | 1 | L2 |
| ATPASE 6 | 8679 | A | G | 1 | H |
| ATPASE 6 | 8680 | C | T | 1 | D |
| ATPASE 6 | 8746 | T | G | 1 | A |
| ATPASE 6 | 8856 | G | C | 1 | K |
| ATPASE 6 | 8987 | T | C | 1 | L2 |
| ATPASE 6 | 9017 | T | C | 1 | A |
| ATPASE 6 | 9052 | A | G | 1 | L1 |
| ATPASE 6 | 9097 | A | G | 1 | B |
| ATPASE 6 | 9098 | T | C | 1 | B |
| ATPASE 6 | 9111 | T | C | 1 | L3 |
| ATPASE 6 | 9145 | G | A | 1 | W |
| ATPASE 6 | 9192 | G | A | 1 | E |
| ATPASE 6 | 9198 | C | T | 1 | W |
| CO3 | 9254 | A | G | 1 | L3 |
| CO3 | 9336 | A | G | 1 | L1 |
| CO3 | 9557 | C | T | 1 | C |
| CO3 | 9647 | T | C | 1 | L1 |
| CO3 | 9813 | T | A | 1 | K |
| CO3 | 9836 | T | C | 1 | A |
| CO3 | 9903 | T | C | 1 | L2 |
| CO3 | 9932 | G | A | 1 | L3 |
| CO3 | 9932 | G | A | 1 | B |
| TRNA-G | 9950 | T | C | 1 | B |
| TRNA-G | 10031 | T | C | 1 | A |
| ND3 | 10335 | C | T | 1 | B |
| ND4L | 10654 | C | T | 1 | H |
| ND4 | 10834 | C | T | 1 | E |
| ND4 | 10853 | C | T | 1 | C |
| ND4 | 10920 | C | T | 1 | L2 |
| ND4 | 11239 | A | G | 1 | L3 |
| ND4 | 11854 | T | C | 1 | K |
| ND4 | 11884 | A | G | 1 | B |
| ND4 | 11935 | T | C | 1 | W |
| ND4 | 12063 | C | T | 1 | U |
| ND4 | 12064 | C | T | 1 | U |
| ND4 | 12092 | C | T | 1 | C |
| TRNA-H | 12172 | A | G | 1 | L1 |
| TRNA-H | 12172 | A | G | 1 | H |
| ND5 | 12453 | T | C | 1 | H |
| ND5 | 12454 | G | A | 1 | C |
| ND5 | 12477 | T | C | 1 | L1 |
| ND5 | 12582 | A | G | 1 | U |
| ND5 | 12723 | A | G | 1 | K |
| ND5 | 12768 | A | G | 1 | L1 |
| ND5 | 12870 | C | T | 1 | L3 |
| ND5 | 13254 | T | C | 1 | E |
| ND5 | 13263 | A | G | 1 | W |
| ND5 | 13269 | A | G | 1 | L3 |
| ND5 | 13473 | A | C | 1 | U |
| ND5 | 13494 | C | T | 1 | E |
| ND5 | 13542 | A | G | 1 | L3 |
| ND5 | 13617 | T | C | 1 | U |
| ND5 | 13629 | A | G | 1 | L2 |
| ND5 | 13707 | G | A | 1 | A |
| ND5 | 13711 | G | A | 1 | H |
| ND5 | 13749 | C | T | 1 | W |
| ND5 | 13781 | T | C | 1 | H |
| ND5 | 13924 | C | T | 1 | L2 |
| ND5 | 14053 | A | G | 1 | L1 |
| ND5 | 14088 | T | C | 1 | L1 |
| ND6 | 14173 | T | C | 1 | L2 |
| ND6 | 14251 | A | G | 1 | H |
| ND6 | 14280 | A | G | 1 | A |
| ND6 | 14388 | A | G | 1 | HAPLO- |
| | | | | | GROUP |
| ND6 | 14460 | C | G | 1 | A |
| ND6 | 14548 | A | G | 1 | H |
| TRNA-E | 14693 | A | G | 1 | D |
| CYT B | 14769 | A | G | 1 | L1 |
| CYT B | 14974 | C | G | 1 | B |
| CYT B | 15016 | C | T | 1 | L1 |
| CYT B | 15043 | G | A | 1 | C |
| CYT B | 15107 | C | T | 1 | A |
| CYT B | 15266 | A | G | 1 | D |
| CYT B | 15317 | G | A | 1 | E |
| CYT B | 15386 | C | T | 1 | A |
| CYT B | 15451 | C | T | 1 | L2 |
| CYT B | 15496 | A | G | 1 | L3 |
| CYT B | 15508 | C | T | 1 | K |
| CYT B | 15511 | T | C | 1 | U |
| CYT B | 15589 | C | A | 1 | H |
| CYT B | 15616 | C | T | 1 | B |
| CYT B | 15616 | C | T | 1 | B |
| CYT B | 15766 | A | G | 1 | HAPLO- |
| | | | | | GROUP |
| CYT B | 15784 | T | C | 1 | W |
| TRNA-T | 15946 | C | T | 1 | K |
| D-LOOP | 16086 | T | C | 1 | L2 |
| D-LOOP | 16086 | T | C | 1 | L2 |
| D-LOOP | 16093 | T | C | 1 | L3 |
| D-LOOP | 16109 | A | C | 1 | C |
| D-LOOP | 16114 | C | T | 1 | H |
| D-LOOP | 16136 | T | C | 1 | B |
| D-LOOP | 16145 | G | A | 1 | L1 |
| D-LOOP | 16147 | C | T | 1 | H |
| D-LOOP | 16153 | G | A | 1 | H |
| D-LOOP | 16163 | A | G | 1 | T |
| D-LOOP | 16166 | A | G | 1 | L3 |
| D-LOOP | 16185 | C | T | 1 | L3 |
| D-LOOP | 16185 | C | T | 1 | L3 |
| D-LOOP | 16188 | C | T | 1 | C |
| D-LOOP | 16213 | G | A | 1 | L1 |
| D-LOOP | 16235 | A | G | 1 | H |
| D-LOOP | 16242 | C | T | 1 | H |
| D-LOOP | 16245 | C | T | 1 | W |
| D-LOOP | 16249 | T | C | 1 | B |
| D-LOOP | 16259 | C | T | 1 | T |
| D-LOOP | 16274 | G | A | 1 | D |
| D-LOOP | 16274 | G | A | 1 | L1 |
| D-LOOP | 16274 | G | A | 1 | T |
| D-LOOP | 16274 | G | A | 1 | H |
| D-LOOP | 16286 | C | G | 1 | L1 |
| D-LOOP | 16295 | C | T | 1 | L2 |
| D-LOOP | 16311 | T | C | 1 | C |
| D-LOOP | 16312 | A | G | 1 | B |
| D-LOOP | 16336 | G | A | 1 | A |
| D-LOOP | 16344 | C | T | 1 | B |
| D-LOOP | 16354 | C | T | 1 | D |
| D-LOOP | 16354 | C | T | 1 | H |
| D-LOOP | 16355 | C | T | 1 | L2 |
| D-LOOP | 16357 | T | C | 1 | B |
| D-LOOP | 16357 | T | C | 1 | H |
| D-LOOP | 16468 | T | C | 1 | D |
| D-LOOP | 16468 | T | C | 1 | A |
| D-LOOP | 16483 | G | A | 1 | B |
| D-LOOP | 16512 | T | C | 1 | A |
| D-LOOP | 16554 | A | G | 1 | A |

[0042] Portions of the mtDNA sequence of SEQ ID NO:1, and portions of a sample mtDNA sequence derived from a biological source or subject as provided herein, are regarded as “corresponding” nucleic acid sequences, regions, fragments or the like, based on the convention for numbering mtDNA nucleic acid positions according to SEQ ID NO:1 (Anderson et al., Nature 290:457, 1981), wherein a sample mtDNA sequence is aligned with the mtDNA sequence of SEQ ID NO:1 such that at least 70%, preferably at least 80% and more preferably at least 90% of the nucleotides in a given sequence of at least 20 consecutive nucleotides of a sequence are identical. For example, a portion of the mtDNA sequence in a biological sample containing mtDNA from a subject suspected of having or being at risk for having AD, or, as another example, a portion of the mtDNA sequence in mtDNA containing at least one mitochondrial single nucleotide polymorphism that is associated with Alzheimer's disease as provided herein (e.g., mutated mtDNA), may be aligned with a corresponding portion of the mtDNA sequence of SEQ ID NO:1 using any of a number of alignment procedures and/or tools with which those having ordinary skill in the art will be familiar (e.g., CLUSTAL W, Thompson et al., 1994 Nucl. Ac. Res. 22:4673; CAP, www.no.embnet.org/clustalw.html: FASTA/FASTP, Pearson, 1990 Proc. Nat. Acad. Sci. USA 85:2444, available from D. Hudson, Univ. of Virginia, Charlottesville, Va.). In certain preferred embodiments, a sample mtDNA sequence is greater than 95% identical to a corresponding mtDNA sequence of SEQ ID NO:1. In certain other preferred embodiments, a sample mtDNA sequence is identical to a corresponding mtDNA sequence of SEQ ID NO:1. Those oligonucleotide probes having sequences that are identical in corresponding regions of the mtDNA sequence of SEQ ID NO:1 and sample mtDNA may be identified and selected following hybridization target DNA sequence analysis, to verify the absence of mutations.

[0043] According to the present invention and as known in the art, the term “haplotype” refers to a particular combination of genetic markers in a defined region of the mitochondrial genome. Such genetic markers include, for example, RFLPs and SNPs. RFLPs (restriction fragment polymorphisms) result from an alteration in a recognition site, often a palindrome, that is specifically cleaved in a site-specific manner by a DNAse known as a restriction enzyme. A SNP (single nucleotide polymorphism) is a change (e.g., a deletion, insertion or substitution) in any single nucleotide base in a region of a genome of interest. In particularly preferred embodiments provided by the instant disclosure, the genome of interest is the mitochondrial genome. Because SNPs vary from individual to individual, they are useful markers for studying the association of a genome. Moreover, because they occur more frequently than other markers such as RFLPs, analysis of SNPs should produce a “higher resolution” picture of disease, haplogroup and individual-associated genetic marker segregation (Weiss, (1998) Genome Res. 8:691-697; Gelbert and Gregg, (1997) Curr. Opin. Biotechnol. 8:669-674).

[0044] The term “haplogroup” refers to a group of haplotypes found in association with one another. Several mitochondrial DNA haplotypes and haplogroups are known in the art, including nine European mtDNA haplogroups as well as discrete Asian, Native American and African mtDNA haplogroups, each identified on the basis of the presence or absence of one or more specific restriction endonuclease recognition sites (see, e.g., Wallace et al., 1999 Gene 238:211; Torroni et al., 1996 Genetics 144:1835). In addition to haplogroups that may be regarded as clusters of haplotypes, designation of individuals as belonging to various nodes or branches within such a cluster, for example, subgroupings, subclusters, subcategories or the like, may be referred to as assignment to a “haplogroup subgroup”, as described, for example, by Macaulay et al. (1999 Am J. Hum. Genet. 64:232-249). As shown in FIGS. 1 and 2, for example, and as provided by the unexpected discovery of the present invention, particular mitochondrial haplogroups (e.g., U, K, J, T, etc.) may be divided and further subdivided into haplogroup subgroups on the basis of polymorphisms detected at nucleotide positions having the indicated numbers corresponding to nucleotide positions in SEQ ID NO:1.

[0045] Nucleic acid sequences within the scope of the invention include isolated DNA and RNA sequences that specifically hybridize under conditions of moderate or high stringency to mtDNA nucleotide sequences, including mtDNA sequences disclosed herein or fragments thereof, and their complements. As used herein, conditions of moderate stringency, as known to those having ordinary skill in the art, and as defined by Sambrook et al., Molecular Cloning: A Laboratory Manual, 2nd Ed. Vol. 1, pp. 1.101-104, Cold Spring Harbor Laboratory Press (1989), include, for example, the use as a prewashing solution for nitrocellulose filters on which proband nucleic acids have been immobilized of 5× SSC, 0.5% SDS, 1.0 mM EDTA (pH 8.0), hybridization conditions of 50% formamide, 6× SSC at 42° C. (or other similar hybridization solution), and washing conditions of about 50-60° C., 0.5× SSC, 0.1% SDS. Conditions of high stringency are defined as hybridization conditions as above, and with washing at 60-68° C., 0.2×SSC, 0.1% SDS. In other embodiments, hybridization to an mtDNA nucleotide sequence may be at normal stringency, which is approximately 25-30° C. below Tm of the native duplex (e.g., 5× SSPE, 0.5% SDS, 5× Denhardt's solution, 50% formamide, at 42° C. or equivalent conditions), at low stringency hybridizations, which utilize conditions approximately 40° C. below Tm, or at high stringency hybridizations, which utilize conditions approximately 110° C. below Tm. The skilled artisan will recognize that the temperature, salt concentration, and/or chaotrope composition of hybridization and wash solutions may be adjusted as necessary according to factors such as the length and nucleotide base composition of the probe. (See also, e.g., Ausubel et al., (1987) Current Protocols in Molecular Biology, Greene Publishing) Thus, desired variations in stringency of hybridization conditions may be achieved by altering the time, temperature and/or concentration of the solutions used for pre-hybridization, hybridization and wash steps. Accordingly, it will be appreciated that suitably stringent conditions can be readily selected without undue experimentation where a desired selectivity of the probe is identified, based on its ability to hybridize to one or more certain proband sequences while not hybridizing to certain other proband sequences.

[0046] An “isolated nucleic acid molecule” refers to a polynucleotide molecule in the form of a separate fragment or as a component of a larger nucleic acid construct, that has been separated from its source cell (including the chromosome it normally resides in) at least once, preferably in a substantially pure form. Isolated nucleic acids may be nucleic acids having particular disclosed nucleotide sequences or may be regions, portions or fragments thereof. Those having ordinary skill in the art are able to prepare isolated nucleic acids having the complete nucleotide sequence, or the sequence of any portion of a particular isolated nucleic acid molecule, when provided with the appropriate nucleic acid sequence information as disclosed herein. Nucleic acid molecules may be comprised of a wide variety of nucleotides, including DNA, RNA, nucleotide analogues such as phosphorothioates or peptide nucleic acids, or other analogues with which those skilled in the art will be familiar, or some combination of these.

[0047] The present invention, as described herein, provides mtDNA sequences and isolated mtDNA nucleic acid molecules. mtDNA may be isolated from cellular DNA according to well known methodologies, for example those described in U.S. Pat. No. 5,840,493, which is hereby incorporated by reference in its entirety. The Sequence Listing includes full-length mtDNA sequences from 560 different human subjects, as set forth at SEQ ID NOS:2-561.

[0048] Where it is advantageous to use oligonucleotide primers according to the present invention, such primers may be 10-60 nucleotides in length, preferably 15-35 nucleotides and still more preferably 18-30 nucleotides in length. Primers may be useful in the present invention for quantifying mtDNA mutations, including single nucleotide polymorphisms or homoplasmic mtDNA mutations provided herein, by any of a variety of techniques well known in the art for determining the amount of specific nucleic acid target sequences present in a sample based on specific hybridization of a primer to the target sequence. Optionally, in certain of these techniques, hybridization precedes nucleotide polymerase catalyzed extension of the primer using the strand containing the target sequence as a template, and/or ligation of oligonucleotides hybridized to adjacent target sequences, and embodiments of the invention using primer extension are particularly preferred.

[0049] For examples of references on such quantitative detection techniques, including those that may be used to detect nucleotide insertions, substitutions or deletions in a portion of an mtDNA sequence site near an oligonucleotide primer target hybridization site that corresponds to a portion of the wildtype mtDNA sequence as disclosed in Anderson et al. (1981 Nature 290:457, SEQ ID NO:1) or a mutated site such as may be created by any of the mtDNA point mutations disclosed herein, and further including those that involve primer extension, see U.S. Pat. No. 5,760,205 and the references cited therein, all of which are hereby incorporated by reference, and see also, for example, Botstein et al. (Am. J. Hum. Gen. 32:314, 1980), Gibbs et al. (Nucl. Ac. Res. 17:2437, 1989), Newton et al. (Nucl. Ac. Res. 17:2503, 1989), Grossman et al. (Nucl. Ac. Res. 22:4527, 1994), and Saiki et al. (Proc. Nat. Acad. Sci. 86:6230, 1989), all of which are hereby incorporated by reference. A particularly useful method for this purpose is the primer extension assay disclosed by Fahy et al. (Nucl. Acids Res. 25:3102, 1997) and by Ghosh et al. (Am. J. Hum. Genet. 58:325, 1996), both of which references are hereby incorporated in their entireties, as is Krook et al. (Hum. Molec. Genet. 1:391, 1995) which teaches modification of primer extension reactions to detect multiple nucleotide substitutions, insertions, deletions or other mutations. Other examples of useful techniques for quantifying the presence of specific nucleic acid target sequences in a sample include but need not be limited to labeled probe hybridization to the target nucleic acid sequences with or without first partially separating target nucleic acids from other nucleic acids present in the sample.

[0050] Examples of other useful techniques for determining the amount of specific nucleic acid target sequences present in a sample based on specific hybridization of a primer to the target sequence include specific amplification of target nucleic acid sequences and quantification of amplification products, including but not limited to polymerase chain reaction (PCR; Gibbs et al., (1989) Nucl. Ac. Res. 17:2437), transcriptional amplification systems, strand displacement amplification and self-sustained sequence replication (3SR; Ghosh et al, (1995) in Molecular Methods for Virus Detection, Academic Press, NY, pp. 287-314), the cited references for which are hereby incorporated in their entireties. Examples of other useful techniques include ligase chain reaction, single stranded conformational polymorphism analysis, Q-beta replicase assay, restriction fragment length polymorphism (RFLP; Botstein et al., (1980) Am. J. Hum. Gen. 32:314) analysis and cycled probe technology, as well as other suitable methods that will be known to those familiar with the art.

[0051] In a particularly preferred embodiment of the invention, primer extension is used to quantify mtDNA mutations present in a biological sample. (Ghosh et al., (1996) Am. J. Hum. Genet. 58:325) This embodiment may offer certain advantages by permitting both wildtype and mutant mtDNA to be simultaneously quantified using a single oligonucleotide primer capable of hybridizing to a complementary nucleic acid target sequence that is present in a defined region of wildtype mtDNA and in a corresponding region of a mutated mtDNA sequence. Without wishing to be bound by theory, the use of a single primer for quantification of wildtype and mutated mtDNA is believed to avoid uncertainties associated with potential disparities in the relative hybridization properties of multiple primers and may offer other advantages. Where such a target sequence is situated adjacent to a mutated mtDNA nucleotide sequence position that is a nucleotide substitution, insertion or deletion relative to the corresponding wildtype mtDNA sequence position, primer extension assays may be designed such that oligonucleotide extension products of primers hybridizing to mutated mtDNA are of different lengths than oligonucleotide extension products of primers hybridizing to wildtype mtDNA. Accordingly, the amount of mutant mtDNA in a sample and the amount of wildtype mtDNA in the sample may be determined by quantification of distinct extension products that are separable on the basis of sequence length or molecular mass.

[0052] Sequence length or molecular mass of primer extension assay products may be determined using any known method for characterizing the size of nucleic acid sequences with which those skilled in the art are familiar. In a preferred embodiment, primer extension products are characterized by gel electrophoresis. In another preferred embodiment, primer extension products are characterized by mass spectrometry (MS), which may further include matrix assisted laser desorption ionization/time of flight (MALDI-TOF) analysis or other MS techniques known to those having skill in the art. See, for example, U.S. Pat. No. 5,622,824, U.S. Pat. No. 5,605,798 and U.S. Pat. No. 5,547,835, all of which are hereby incorporated by reference in their entireties. In another preferred embodiment, primer extension products are characterized by liquid or gas chromatography, which may further include high performance liquid chromatography (HPLC), gas chromatography-mass spectrometry (GC-MS) or other well known chromatographic methodologies.

[0053] In another particularly preferred embodiment of the invention, DNA in a biological sample containing mtDNA is first amplified by methodologies well known in the art, such that the amplification products may be used as templates in a method for detecting single nucleotide polymorphisms or homoplasmic mtDNA mutations present in the sample. Accordingly, it may be desirable to employ oligonucleotide primers that are complementary to target sequences that are identical in, and common to, wildtype and mutant mtDNA, for example PCR amplification templates and primers prepared according to Fahy et al. (Nucl. Acids Res., 25:3102, 1997) and Davis et al. (Proc. Nat. Acad. Sci. USA 94:4526, 1997; see also Hirano et al., Proc. Nat. Acad. Sci. USA 94:14894, 1997, and Wallace et al., Proc. Nat. Acad. Sci. USA 94:14900,1997.)

[0054] In certain other preferred embodiments, mtDNA mutations may be efficiently detected, screened and/or quantified by high throughput hybridization methodologies directed to independently probing a plurality of distinct mtDNAs, or a plurality of distinct oligonucleotide primers as provided herein, that have been immobilized as nucleic acid arrays on a solid phase support. Typically, the solid support may be silica, quartz or glass, or any other material on which nucleic acid may be immobilized in a manner that permits appropriate hybridization, washing and detection steps as known in the art and as provided herein. In preferred embodiments, solid-phase nucleic acid arrays are precisely spatially addressed, as described, for example, U.S. Pat. No. 5,800,992 (see also, e.g., WO 95/21944; Schena et al., 1995 Science 270:467-470, 1995; Pease et al., 1994 Proc. Nat. Acad. Sci. USA 91:5022; Lipshutz et al., 1995 Biotechniques 19: 442-447).

[0055] Detection of hybridized (e.g., duplexed) nucleic acids on the nucleic acid array may be achieved according to any known procedure, for example, by spectrometry or potentiometry (e.g., MALDI-MS). Within certain preferred embodiments the array contains oligonucleotides that are less than 50 bp in length. For high throughput screening of nucleic acid arrays, the format is preferably amenable to automation. It is preferred, for example, that an automated apparatus for use according to high throughput screening embodiments of the present invention is under the control of a computer or other programmable controller. The controller can continuously monitor the results of each step of the nucleic acid deposition, washing, hybridization, detection and related processes, and can automatically alter the testing paradigm in response to those results.

[0056] The present invention also provides compositions and methods that are useful in pharmacogenomics, for the classification and/or stratification of a subject or a patient population. Such stratification may involve, for example, correlation of single nucleotide polymorphisms or homoplasmic mtDNA mutations as provided herein with, for instance, one or more particular traits in a subject, such as, for example, indicators of the responsiveness to, or efficacy of, a particular therapeutic treatment or characteristic genomic DNA alterations, mutations, deletions, insertions or polymorphisms.

[0057] As described herein, determination of specific single nucleotide polymorphisms or homoplasmic mtDNA mutations may be used to stratify a patient population. Accordingly, in another preferred embodiment of the invention, determination of such mutations in a biological sample from a subject diagnosed with a disease may provide a useful correlative indicator for that subject. A disease subject so classified on the basis of one or more specific mutations may then be monitored using clinical parameters referred to above and known on the art, such that correlation between particular mtDNA mutations and any particular clinical score used to evaluate a disease may be monitored. For example, stratification of an AD patient population according to at least one of the single nucleotide polymorphisms or homoplasmic mtDNA mutations provided herein may provide a useful marker with which to correlate the efficacy of any candidate therapeutic agent being used in AD subjects. In a further preferred embodiment of this aspect of the invention, determination of one or more specific mtDNA mutations in concert with determination of an AD subject's APOE genotype may also be useful. These and related advantages will be appreciated by those familiar with the art.

[0058] In particularly preferred embodiments, oligonucleotide primers will be employed that permit specific detection of the single nucleotide polymorphisms or homoplasmic mtDNA point mutations disclosed in Table 3, wherein specific substitution and deletion mutations in mitochondrial genes including, for example, those encoding 12S rRNA, 16S rRNA, several tRNAs, COX1, COX2, COX3, cytochrome b, ATPase 8, ATPase 6, ND1, ND2, ND4 and ND5 are disclosed, as are numerous mutations in the mtDNA D-loop region. Each mutation listed in Table 3 is designated with (i) the identity of the particular nucleotide position of the mutation according to the wildtype human mtDNA sequence (Anderson et al., 1981 Nature 290:457; see also Andrews et al., 1999 Nature Genetics 23:147 and references cited therein), (ii) the mitochondrial gene region according to the convention of Anderson et al. (1981) and (iii) if the mutation is not a transition (purine-to-purine or pyrimidine-to-pyrimidine), the identity of the mutated nucleotide at that position in the case of a transversion (purine-to-pyrimidine or pyrimidine-to-purine), identified as disclosed herein, or of a deletion or insertion mutation. Thus, for example, the purine nucleotide G (guanine) situated at position 3010 of the wildtype mtDNA 16S rRNA gene is mutated to the purine nucleotide A (adenosine) in mtDNA analyzed from a substantial number of haplogroup H samples (see Table 3).

TABLE 3
HAPLOGROUP-SPECIFIC AND HAPLOGROUP-ASSOCIATED
MITOCHONDRIAL SINGLE NUCLEOTIDE POLYMORPHISMS
IN MTDNA OF 560 UNRELATED INDIVIDUALS

| | | | |
|---|---|---|---|
| NP | GENE | TV/DEL/INS | HAPLOGROUP |

A. Haplogroup-specific polymorphism

| | | | |
|---|---|---|---|
| 64 | D-LOOP | | A |
| 235 | D-LOOP | | A |
| 663 | 12S rRNA | | A |
| 1598 | 12S rRNA | | A |
| 1736 | 16S rRNA | | A |
| 3316 | ND1 | | A |
| 4248 | ND1 | | A |
| 4824 | ND2 | | A |
| 4970 | ND2 | | A |
| 6308 | COI | | A |
| 7112 | COI | | A |
| 7724 | COII | A> T | A |
| 8794 | ATPase6 | | A |
| 11314 | ND4 | | A |
| 12468 | ND5 | | A |
| 12811 | ND5 | | A |
| 13855 | ND5 | | A |
| 14364 | ND6 | | A |
| 16111 | D-LOOP | | A |
| 16290 | D-LOOP | | A |
| 16319 | D-LOOP | | A |
| 827 | 12S rRNA | | B |
| 3547 | ND1 | | B |
| 4820 | ND2 | | B |
| 4977 | ND2 | | B |
| 6023 | COI | | B |
| 6216 | COI | | B |
| 6413 | COI | | B |
| 6473 | COI | | B |
| 6755 | COI | | B |
| 7241 | COI | | B |
| 9950 | COIII | | B |
| 11177 | ND4 | | B |
| 15535 | CYT B | | B |
| 16217 | D-LOOP | | B |
| 249 | D-LOOP | DEL | C |
| 289 | D-LOOP | DEL | C |
| 290 | D-LOOP | DEL | C |
| 3552 | ND1 | | C |
| 4715 | ND2 | | C |
| 7196 | COI | C> A | C |
| 7694 | COIII | | C |
| 8584 | ATPase6 | | C |
| 9545 | COIII | | C |
| 10454 | tRNA-R | | C |
| 12642 | ND5 | | C |
| 12978 | ND5 | | C |
| 14318 | ND6 | | C |
| 15487 | CYT B | A> T | C |
| 15930 | tRNA-T | | C |
| 2092 | 16S rRNA | | D |
| 4883 | ND2 | | D |
| 5178 | ND2 | C> A | D |
| 8414 | ATPase8 | | D |
| 11593 | ND4 | A> T | D |
| 14668 | ND6 | | D |
| 3027 | 16S rRNA | | E |
| 3705 | ND1 | | E |
| 4491 | ND2 | | E |
| 7598 | COII | | E |
| 239 | D-LOOP | | H |
| 456 | D-LOOP | | H |
| 477 | D-LOOP | | H |
| 951 | 12S rRNA | | H |
| 961 | 12S rRNA | | H |
| 3277 | tRNA-L | | H |
| 3333 | ND1 | | H |
| 3591 | ND1 | | H |
| 3796 | ND1 | | H |
| 3915 | ND1 | | H |
| 3992 | ND1 | | H |
| 4024 | ND1 | | H |
| 4310 | tRNA-I | | H |
| 4336 | tRNA-Q | | H |
| 4531 | ND2 | | H |
| 4727 | ND2 | | H |
| 4745 | ND2 | | H |
| 4772 | ND2 | | H |
| 4793 | ND2 | | H |
| 5004 | ND2 | | H |
| 6365 | COI | | H |
| 6776 | COI | | H |
| 6869 | COI | | H |
| 7013 | COI | | H |
| 8269 | COII | | H |
| 8448 | ATPase8 | | H |
| 8602 | ATPase6 | | H |
| 8803 | ATPase6 | | H |
| 8839 | ATPase6 | | H |
| 8843 | ATPase6 | | H |
| 8898 | ATPase6 | | H |
| 9123 | ATPase6 | | H |
| 9150 | ATPase6 | | H |
| 9380 | COIII | | H |
| 9804 | COIII | | H |
| 10044 | tRNA-G | | H |
| 11353 | ND4 | | H |
| 11560 | ND4 | | H |
| 12579 | ND5 | | H |
| 13404 | ND5 | | H |
| 13680 | ND5 | | H |
| 13759 | ND5 | | H |
| 14125 | ND5 | | H |
| 14350 | ND6 | | H |
| 14365 | ND6 | | H |
| 14470 | ND6 | T> A | H |
| 14582 | ND6 | | H |
| 14872 | CYT B | | H |
| 15466 | CYT B | | H |
| 15789 | CYT B | | H |
| 15808 | CYT B | | H |
| 15833 | CYT B | | H |
| 16162 | D-LOOP | | H |
| 16293 | D-LOOP | | H |
| 199 | D-LOOP | | I |
| 250 | D-LOOP | | I |
| 3447 | ND1 | | I |
| 3990 | ND1 | | I |
| 4529 | ND2 | A> T | I |
| 6734 | COI | | I |
| 8616 | ATPase6 | G> T | I |
| 9947 | COIII | | I |
| 10034 | tRNA-G | | I |
| 10238 | ND3 | | I |
| 11065 | ND4 | | I |
| 12501 | ND5 | | I |
| 13780 | ND5 | | I |
| 15758 | CYT B | | I |
| 16391 | D-LOOP | | I |
| 228 | D-LOOP | | J |
| 295 | D-LOOP | | J |
| 462 | D-LOOP | | J |
| 2158 | 16S rRNA | | J |
| 2387 | 16S rRNA | | J |
| 3394 | ND1 | | J |
| 5198 | ND2 | | J |
| 5633 | tRNA-A | | J |
| 6464 | COI | C> A | J |
| 6554 | COI | | J |
| 6671 | COI | | J |
| 7476 | tRNA-S | | J |
| 7711 | COII | | J |
| 10084 | ND3 | | J |
| 10172 | ND3 | | J |
| 10192 | ND3 | | J |
| 10499 | ND4L | | J |
| 10598 | ND4L | | J |
| 10685 | ND4L | | J |
| 11377 | ND4 | | J |
| 12127 | ND4 | | J |
| 12570 | ND5 | | J |
| 12612 | ND5 | | J |
| 13281 | ND5 | | J |
| 13681 | ND5 | | J |
| 13879 | ND5 | | J |
| 13933 | ND5 | | J |
| 14569 | ND6 | | J |
| 15679 | CYT B | | J |
| 15812 | CYT B | | J |
| 16069 | D-LOOP | | J |
| 16092 | D-LOOP | | J |
| 16261 | D-LOOP | | J |
| 114 | D-LOOP | | K |
| 497 | D-LOOP | | K |
| 593 | tRNA-F | | K |
| 1189 | 12S rRNA | | K |
| 2217 | 16S rRNA | | K |
| 2483 | 16S rRNA | | K |
| 3480 | ND1 | | K |
| 4295 | tRNA-I | | K |
| 4561 | ND2 | | K |
| 5814 | tRNA-C | | K |
| 6260 | COI | | K |
| 9006 | ATPase6 | | K |
| 9055 | ATPase6 | | K |
| 9698 | COIII | | K |
| 9716 | COIII | | K |
| 9962 | COIII | | K |
| 10289 | ND3 | | K |
| 10550 | ND4L | | K |
| 10978 | ND4 | | K |
| 11299 | ND4 | | K |
| 11470 | ND4 | | K |
| 11485 | ND4 | | K |
| 11840 | ND4 | | K |
| 11869 | ND4 | C> A | K |
| 11923 | ND4 | | K |
| 12954 | ND5 | | K |
| 13135 | ND5 | | K |
| 13740 | ND5 | | K |
| 13967 | ND5 | | K |
| 14002 | ND5 | | K |
| 14037 | ND5 | | K |
| 14040 | ND5 | | K |
| 14167 | ND6 | | K |
| 15884 | CYT B | | K |
| 15946 | tRNA-T | | K |
| 16224 | D-LOOP | | K |
| 16234 | D-LOOP | | K |
| 16463 | D-LOOP | | K |
| 185 | D-LOOP | G> T | L1 |
| 186 | D-LOOP | | L1 |
| 189 | D-LOOP | | L1 |
| 236 | D-LOOP | | L1 |
| 247 | D-LOOP | | L1 |
| 297 | D-LOOP | | L1 |
| 357 | D-LOOP | | L1 |
| 710 | 12S rRNA | | L1 |
| 825 | 12S rRNA | | L1 |
| 1048 | 12S rRNA | | L1 |
| 1738 | 16S rRNA | | L1 |
| 2245 | 16S rRNA | | L1 |
| 2395 | 16S rRNA | DEL | L1 |
| 2758 | 16S rRNA | | L1 |
| 2768 | 16S rRNA | | L1 |
| 2885 | 16S rRNA | | L1 |
| 3308 | ND1 | | L1 |
| 3516 | ND1 | C> A | L1 |
| 3666 | ND1 | | L1 |
| 3693 | ND1 | | L1 |
| 3777 | ND1 | | L1 |
| 3796 | ND1 | A> T | L1 |
| 3843 | ND1 | | L1 |
| 4312 | tRNA-I | | L1 |
| 4586 | ND2 | | L1 |
| 5036 | ND2 | | L1 |
| 5393 | ND2 | | L1 |
| 5442 | ND2 | | L1 |
| 5603 | tRNA-A | | L1 |
| 5655 | tRNA-A | | L1 |
| 5913 | COI | | L1 |
| 5951 | COI | | L1 |
| 6071 | COI | | L1 |
| 6150 | COI | | L1 |
| 6185 | COI | | L1 |
| 6253 | COI | | L1 |
| 6548 | COI | | L1 |
| 6827 | COI | | L1 |
| 6989 | COI | | L1 |
| 7055 | COI | | L1 |
| 7076 | COI | | L1 |
| 7146 | COI | | L1 |
| 7337 | COI | | L1 |
| 7389 | COI | | L1 |
| 7867 | COII | | L1 |
| 8248 | COII | | L1 |
| 8428 | ATPase8 | | L1 |
| 8655 | ATPase6 | | L1 |
| 8784 | ATPase6 | | L1 |
| 8877 | ATPase6 | | L1 |
| 9042 | ATPase6 | | L1 |
| 9072 | ATPase6 | | L1 |
| 9347 | COIII | | L1 |
| 9755 | COIII | | L1 |
| 9818 | COIII | | L1 |
| 10321 | ND3 | | L1 |
| 10586 | ND4L | | L1 |
| 10589 | ND4L | | L1 |
| 10664 | ND4L | | L1 |
| 10688 | ND4L | | L1 |
| 10792 | ND4 | | L1 |
| 10793 | ND4 | | L1 |
| 10810 | ND4 | | L1 |
| 11176 | ND4 | | L1 |
| 11641 | ND4 | | L1 |
| 11654 | ND4 | | L1 |
| 11899 | ND4 | | L1 |
| 12007 | ND4 | | L1 |
| 12049 | ND4 | | L1 |
| 12519 | ND5 | | L1 |
| 12720 | ND5 | | L1 |
| 12810 | ND5 | | L1 |
| 13149 | ND5 | | L1 |
| 13276 | ND5 | | L1 |
| 13485 | ND5 | | L1 |
| 13506 | ND5 | | L1 |
| 13789 | ND5 | | L1 |
| 13880 | ND5 | C> A | L1 |
| 13980 | ND5 | | L1 |
| 14000 | ND5 | T> A | L1 |
| 14148 | ND5 | | L1 |
| 14178 | ND6 | | L1 |
| 14203 | ND6 | | L1 |
| 14308 | ND6 | | L1 |
| 14560 | ND6 | | L1 |
| 14769 | CYT B | | L1 |
| 14911 | CYT B | | L1 |
| 15115 | CYT B | | L1 |
| 15136 | CYT B | | L1 |
| 16148 | D-LOOP | | L1 |
| 16187 | D-LOOP | | L1 |
| 16188 | D-LOOP | C> G | L1 |
| 16230 | D-LOOP | | L1 |
| 16264 | D-LOOP | | L1 |
| 16265 | D-LOOP | | L1 |
| 16360 | D-LOOP | | L1 |
| 16527 | D-LOOP | | L1 |
| 143 | D-LOOP | | L2 |
| 1442 | 12S rRNA | | L2 |
| 1706 | 16S rRNA | | L2 |
| 2332 | 16S rRNA | | L2 |
| 2358 | 16S rRNA | | L2 |
| 2416 | 16S rRNA | | L2 |
| 2789 | 16S rRNA | | L2 |
| 3495 | ND1 | C> A | L2 |
| 3918 | ND1 | | L2 |
| 4158 | ND1 | | L2 |
| 4185 | ND1 | | L2 |
| 4370 | tRNA-Q | | L2 |
| 4767 | ND2 | | L2 |
| 5027 | ND2 | | L2 |
| 5285 | ND2 | | L2 |
| 5331 | ND2 | C> A | L2 |
| 5581 | tRNA-W | | L2 |
| 5744 | NON-CODING | | L2 |
| 6713 | COI | | L2 |
| 7175 | COI | | L2 |
| 7274 | COI | | L2 |
| 7624 | COII | T> A | L2 |
| 7771 | COII | | L2 |
| 8080 | COII | | L2 |
| 8206 | COII | | L2 |
| 8387 | ATPase8 | | L2 |
| 8541 | ATPase8 | | L2 |
| 8790 | ATPase6 | | L2 |
| 8925 | ATPase6 | | L2 |
| 9221 | COIII | | L2 |
| 10115 | ND3 | | L2 |
| 11944 | ND4 | | L2 |
| 12236 | tRNA-S | | L2 |
| 12630 | ND5 | | L2 |
| 12693 | ND5 | | L2 |
| 12948 | ND5 | | L2 |
| 13803 | ND5 | | L2 |
| 14059 | ND5 | | L2 |
| 14544 | ND6 | | L2 |
| 14566 | ND6 | | L2 |
| 14599 | ND6 | | L2 |
| 15110 | CYT B | | L2 |
| 15217 | CYT B | | L2 |
| 15229 | CYT B | | L2 |
| 15236 | CYT B | | L2 |
| 15244 | CYT B | | L2 |
| 15391 | CYT B | | L2 |
| 15629 | CYT B | | L2 |
| 15945 | tRNA-T | T-INS | L2 |
| 16114 | D-LOOP | C> A | L2 |
| 16213 | D-LOOP | | L2 |
| 16309 | D-LOOP | | L2 |
| 16390 | D-LOOP | | L2 |
| 200 | D-LOOP | | L3 |
| 2000 | 16S rRNA | | L3 |
| 3438 | ND1 | | L3 |
| 3450 | ND1 | | L3 |
| 5773 | tRNA-C | | L3 |
| 6524 | COI | | L3 |
| 6587 | COI | | L3 |
| 6680 | COI | | L3 |
| 7424 | COI | | L3 |
| 7618 | COII | | L3 |
| 8616 | ATPase6 | | L3 |
| 8618 | ATPase6 | | L3 |
| 8650 | ATPase6 | | L3 |
| 9554 | COIII | | L3 |
| 10086 | ND3 | | L3 |
| 10373 | ND3 | | L3 |
| 10667 | ND4L | | L3 |
| 10819 | ND4 | | L3 |
| 11800 | ND4 | | L3 |
| 13101 | ND5 | A> C | L3 |
| 13886 | ND5 | | L3 |
| 13914 | ND5 | C> A | L3 |
| 14152 | ND6 | | L3 |
| 14212 | ND6 | | L3 |
| 14284 | ND6 | | L3 |
| 15099 | CYT B | | L3 |
| 15311 | CYT B | | L3 |
| 15670 | CYT B | | L3 |
| 15824 | CYT B | | L3 |
| 15942 | tRNA-T | | L3 |
| 15944 | tRNA-T | DEL | L3 |
| 16124 | D-LOOP | | L3 |
| 16327 | D-LOOP | | L3 |
| 930 | 12S rRNA | | T |
| 2141 | 16S rRNA | | T |
| 2850 | 16S rRNA | | T |
| 4688 | ND2 | | T |
| 4917 | ND2 | | T |
| 5277 | ND2 | | T |
| 6489 | COI | C> A | T |
| 7022 | COI | | T |
| 8572 | ATPase6 | | T |
| 8697 | ATPase6 | | T |
| 9117 | ATPase6 | | T |
| 9899 | COIII | | T |
| 10463 | tRNA-R | | T |
| 11242 | ND4 | | T |
| 11812 | ND4 | | T |
| 12633 | ND5 | C> A | T |
| 13368 | ND5 | | T |
| 13758 | ND5 | C> A | T |
| 13965 | ND5 | | T |
| 14233 | ND6 | | T |
| 14687 | tRNA-E | | T |
| 14905 | CYT B | | T |
| 15028 | CYT B | | T |
| 15274 | CYT B | | T |
| 15607 | CYT B | | T |
| 15928 | tRNA-T | | T |
| 16163 | D-LOOP | | T |
| 16182 | D-LOOP | A> C | T |
| 16186 | D-LOOP | | T |
| 16294 | D-LOOP | | T |
| 16296 | D-LOOP | | T |
| 16324 | D-LOOP | | T |
| 988 | 12S rRNA | | U |
| 1700 | 16S rRNA | | U |
| 1721 | 16S rRNA | | U |
| 2294 | 16S rRNA | | U |
| 3116 | 16S rRNA | | U |
| 3197 | 16S rRNA | | U |
| 3348 | ND1 | | U |
| 3720 | ND1 | | U |
| 3849 | ND1 | | U |
| 4553 | ND2 | | U |
| 4646 | ND2 | | U |
| 4703 | ND2 | | U |
| 4732 | ND2 | | U |
| 4811 | ND2 | | U |
| 5319 | ND2 | | U |
| 5390 | ND2 | | U |
| 5495 | ND2 | | U |
| 5656 | NON-CODING | | U |
| 5999 | COI | | U |
| 6045 | COI | | U |
| 6047 | COI | | U |
| 6146 | COI | | U |
| 6518 | COI | | U |
| 6629 | COI | | U |
| 6719 | COI | | U |
| 7109 | COI | | U |
| 7385 | COI | | U |
| 7768 | COII | | U |
| 7805 | COII | | U |
| 8473 | ATPase8 | | U |
| 9070 | ATPase6 | T> G | U |
| 9266 | COIII | | U |
| 9477 | COIII | | U |
| 9667 | COIII | | U |
| 10506 | ND4L | | U |
| 10876 | ND4 | | U |
| 10907 | ND4 | | U |
| 10927 | ND4 | | U |
| 11197 | ND4 | | U |
| 11332 | ND4 | | U |
| 11732 | ND4 | | U |
| 12346 | ND5 | | U |
| 12557 | ND5 | | U |
| 12618 | ND5 | | U |
| 13020 | ND5 | | U |
| 13617 | ND5 | | U |
| 13637 | ND5 | | U |
| 14139 | ND5 | | U |
| 14179 | ND6 | | U |
| 14182 | ND6 | | U |
| 14620 | ND6 | | U |
| 14793 | CYT B | | U |
| 14866 | CYT B | | U |
| 15191 | CYT B | | U |
| 15218 | CYT B | | U |
| 15454 | CYT B | | U |
| 15693 | CYT B | | U |
| 15907 | tRNA-T | | U |
| 16051 | D-LOOP | | U |
| 16256 | D-LOOP | | U |
| 16270 | D-LOOP | | U |
| 16399 | D-LOOP | | U |
| 4580 | ND2 | | V |
| 15904 | tRNA-T | | V |
| 194 | D-LOOP | | W |
| 1243 | 12S rRNA | | W |
| 1406 | 12S rRNA | | W |
| 3505 | ND1 | | W |
| 6528 | COI | | W |
| 8994 | ATPase6 | | W |
| 10097 | ND3 | | W |
| 11674 | ND4 | | W |
| 11947 | ND4 | | W |
| 12414 | ND5 | | W |
| 13263 | ND5 | | W |
| 15775 | CYT B | | W |
| 15884 | CYT B | G> C | W |
| 16292 | D-LOOP | | W |
| 225 | D-LOOP | | X |
| 226 | D-LOOP | | X |
| 6371 | COI | | X |
| 8393 | ATPase8 | | X |
| 8705 | ATPase6 | | X |
| 14470 | ND6 | | X |
| 15927 | tRNA-T | | X |
| −73 | D-LOOP | | not present |
| | | | in [H] |
| −7028 | COI | | not present |
| | | | in [H] |
| ##### | ND4 | | not present |
| | | | in [H] |
| 14766 | CYT B | | not present |
| | | | in [H] |

B. Haplogroup-associated polymorphisms

| | | | |
|---|---|---|---|
| 16362 | D-LOOP | | A, C, D, E, |
| | | | H, L3 |
| 12705 | ND5 | | A, C, D, E, |
| | | | I, L1, L2, |
| | | | L3, W, X |
| 1888 | 16S rRNA | | A, C, T |
| 13708 | ND5 | | A, J, X |
| 8027 | COII | | A, L1 |
| 153 | D-LOOP | | A, X |
| 207 | D-LOOP | | B, I, L2, W |
| 13590 | ND5 | | B, L2 |
| 9449 | COIII | | B, L3 |
| 499 | D-LOOP | | B, U |
| 16325 | D-LOOP | | C, D |
| 10400 | ND3 | | C, D, E |
| 14783 | CYT B | | C, D, E |
| 10398 | ND3 | | C, D, E, I, |
| | | | J, K, L1, |
| | | | L2, L3 |
| 15043 | CYT B | | C, D, E, |
| | | | I, T |
| 489 | D-LOOP | | C, D, E, J |
| 8701 | ATPase6 | | C, D, E, |
| | | | L1, L2, L3 |
| 9540 | COIII | | C, D, E, |
| | | | L1, L2, L3 |
| 10873 | ND4 | | C, D, E, |
| | | | L1, L2, L3 |
| 15301 | CYT B | | C, D, E, |
| | | | L2, L3 |
| 11914 | ND4 | | C, K, L1, L2 |
| 16298 | D-LOOP | | C, V |
| 3010 | 16S rRNA | | D, H, J, U |
| 16311 | D-LOOP | | H, K, L1, L3 |
| 93 | D-LOOP | | H, L1 |
| 16304 | D-LOOP | | H, T |
| 16291 | D-LOOP | | H, U |
| 16356 | D-LOOP | | H, U |
| 16482 | D-LOOP | | H, U |
| 15924 | tRNA-T | | I, K, U |
| 10915 | ND4 | | I, L1 |
| 204 | D-LOOP | | I, L2, W |
| 8251 | COII | | I, W |
| 1719 | 16S rRNA | | I, X |
| 14798 | CYT B | | J, K |
| 15257 | CYT B | | J, K |
| 5460 | ND2 | | J, L1, W |
| 185 | D-LOOP | | J, L3 |
| 11002 | ND4 | | J, L3 |
| 4216 | ND1 | | J, T |
| 11251 | ND4 | | J, T |
| 15452 | CYT B | C> A | J, T |
| 16126 | D-LOOP | | J, T |
| 9548 | COIII | | J, U |
| 13934 | ND5 | | J, U |
| 5231 | ND2 | | K, L1 |
| 709 | 12S rRNA | | K, L1, T, W |
| 1811 | 16S rRNA | | K, U |
| 11467 | ND4 | | K, U |
| 12308 | tRNA-L | | K, U |
| 12372 | ND5 | | K, U |
| 182 | D-LOOP | | L1, L2 |
| 198 | D-LOOP | | L1, L2 |
| 769 | 12S rRNA | | L1, L2 |
| 1018 | 12S rRNA | | L1, L2 |
| 3594 | ND1 | | L1, L2 |
| 4104 | ND1 | | L1, L2 |
| 7256 | COI | | L1, L2 |
| 7521 | tRNA-D | | L1, L2 |
| 13650 | ND5 | | L1, L2 |
| 16278 | D-LOOP | | L1, L2, |
| | | | L3, X |
| 189 | D-LOOP | A> C | L1, L3 |
| 2352 | 16S rRNA | | L1, L3 |
| 13105 | ND5 | | L1, L3 |
| 5046 | ND2 | | L1, W |
| 6152 | COI | | L2, U |
| 15784 | CYT B | | L2, U, W |
| 5147 | ND2 | | L3, T |
| 6221 | COI | | L3, X |
| 5426 | ND2 | | T, U |
| 13734 | ND5 | | T, U |
| 13966 | ND5 | | T, X |

[0059] TV/DEL/INS column: all nucleotide substitutions are transitions unless indicated otherwise NP: nucleotide position; TV: transversion; DEL: deletion; INS: insertion

[0060] The data of Table 3 are also depicted in Table 4, wherein the frequencies of occurrence of particular “haplogroup-specific” (e.g., characteristic of only a single haplogroup) or “haplogroup-associated” (e.g., detected in two or more identified haplogroups) mitochondrial single nucleotide polymorphism among the 560 unrelated individuals analyzed are presented; full length mtDNA sequences of these 560 individuals are set forth at SEQ ID NOS:2-561 in the Sequence Listing.

TABLE 4
HAPLOGROUP-SPECIFIC AND HAPLOGROUP-ASSOCIATED POLYMORPHISMS
IN MTDNA OF 560 UNRELATED INDIVIDUALS

| | | | HAPLOGROUP | | | | | | | | | | | | | | | | | | |
|---|---|---|---|---|---|---|---|---|---|---|---|---|---|---|---|---|---|---|---|---|---|
| | | | A | B | C | D | E | H | I | J | K | L1 | L2 | L3 | M | T | U | V | W | X | |
| | | TV/ | N | N | N | N | N | N | N | N | N | N | N | N | N | N | N | N | N | N | |
| | | DEL/ | = | = | = | = | = | = | = | = | = | = | = | = | = | = | = | = | = | = | |
| NP | GENE | INS | 25 | 18 | 13 | 9 | 3 | 226 | 14 | 33 | 47 | 13 | 23 | 20 | 1 | 46 | 42 | 8 | 8 | 11 | REF |
| 64 | D-LOOP | | 20 | 1 | | 1 | | 4 | | | | | | | | | | | | | |
| −73 | D-LOOP | | 25 | 18 | 13 | 9 | 3 | 19 | 12 | 23 | 44 | 10 | 23 | 20 | 1 | 38 | 35 | | 7 | 10 | |
| 93 | D-LOOP | | | | | | | 15 | | | | 3 | | | | | | | | | |
| 114 | D-LOOP | | | | | | | | | | 8 | | | | | | | | | | |
| 143 | D-LOOP | | | | | | | | | | | | 4 | | | | | | | | |
| 153 | D-LOOP | | 19 | | | | 1 | 1 | | | | | | | | | | | | 7 | |
| 182 | D-LOOP | | | | | | | | | | | 9 | 4 | | | | | | | | |
| 185 | D-LOOP | | | | | | 1 | | | 12 | | 2 | 1 | 5 | | | | | | | |
| 185 | D-LOOP | G > T | | | | | | | | 1 | | 6 | | | | | | | | | |
| 186 | D-LOOP | | | | | | | | | | | 4 | | | | | | | | | |
| 189 | D-LOOP | | | | | | | | | | | 4 | | | | | | | | | |
| 189 | D-LOOP | A > C | 1 | | | | 1 | | | | 1 | 4 | | 7 | | | | | 7 | | |
| 194 | D-LOOP | | | | | | | | | | | | | | | | | | 5 | 1 | |
| 198 | D-LOOP | | | | | | | | | | | 3 | 3 | | | | | | | | |
| 199 | D-LOOP | | | | | | | 2 | 11 | | 2 | | | | 1 | | | | | | |
| 200 | D-LOOP | | | | | | | 1 | | | | | | 7 | | | | | | 1 | |
| 204 | D-LOOP | | | | | | | 3 | 9 | | | 2 | 3 | | | | | | 7 | | |
| 207 | D-LOOP | | | 3 | | | | 1 | 7 | | | 1 | 2 | | | | | | 6 | | |
| 225 | D-LOOP | | | | | | | | | | | | | | | | | | | 7 | |
| 226 | D-LOOP | | | | | | | 1 | | | | | | | | | | | | 5 | |
| 228 | D-LOOP | | | 1 | | | | | | 13 | | | | | | | | | | | |
| 235 | D-LOOP | | 24 | | | | | | | 1 | | | | | | | | | | | |
| 236 | D-LOOP | | | | | | | 1 | | | | 3 | | | | | | | | | |
| 239 | D-LOOP | | | | | | | 10 | | | | | | | | | | | | | |
| 247 | D-LOOP | | | | | | | | | | | 12 | | | | | | | | | |
| 249 | D-LOOP | DEL | | | 12 | | | | | | | | | | | | | | | | |
| 250 | D-LOOP | | | | | | | | 10 | | | | | | | | | | | | |
| 289 | D-LOOP | DEL | | | 10 | | | | | | | | | | | | | | | | |
| 290 | D-LOOP | DEL | | | 10 | | | | | | | | | | | | | | | | |
| 295 | D-LOOP | | | | | | | 1 | | 23 | | | | | | | | | | | |
| 297 | D-LOOP | | | | | | | | | | | 4 | | | | | | | | | |
| 357 | D-LOOP | | | | | | | | | | | 6 | | | | | | | | | |
| 456 | D-LOOP | | | | | | | 16 | | | | | 1 | | | | | | | | |
| 462 | D-LOOP | | | | | | | | | 18 | | | | | | | | | | | |
| 477 | D-LOOP | | | | | | | 13 | | | 1 | | | | | | | | | | |
| 489 | D-LOOP | | | | 13 | 9 | 3 | | | 23 | | | | | 1 | | | | | | |
| 497 | D-LOOP | | | | | | | | | | 25 | | | | | | | | | | |
| 499 | D-LOOP | | | 17 | | | | | | | | | | | | 1 | 3 | | | | |
| 593 | tRNA-F | | | | | 1 | | | | | | | | | | | | | | | |
| 663 | 12S | | 25 | | | | | | | | | | | | | | | | | | 3-6, |
| | rRNA | | | | | | | | | | | | | | | | | | | | 14-17 |
| 709 | 12S | | | 2 | | | | 3 | | | 9 | 7 | | 1 | | 46 | 1 | | 8 | | 1 |
| | rRNA | | | | | | | | | | | | | | | | | | | | |
| 710 | 12S | | | | | | | | | | | 7 | | | | | | | | | |
| | rRNA | | | | | | | | | | | | | | | | | | | | |
| 750 | 12S | | 25 | 18 | 13 | 9 | 3 | 218 | 14 | 33 | 47 | 13 | 23 | 17 | 1 | 46 | 42 | 8 | 8 | 11 | |
| | rRNA | | | | | | | | | | | | | | | | | | | | |
| 769 | 12S | | | | | | | | | | | 13 | 23 | | | | | | | | |
| | rRNA | | | | | | | | | | | | | | | | | | | | |
| 825 | 12S | | | | | | | | | | | 13 | | | | | | | | | |
| | rRNA | | | | | | | | | | | | | | | | | | | | |
| 827 | 12S | | | 17 | | | | | | | | | | | | | | | | | |
| | rRNA | | | | | | | | | | | | | | | | | | | | |
| 930 | 12S | | 1 | | | | | | | | | | 1 | | | 16 | | | | | 1 |
| | rRNA | | | | | | | | | | | | | | | | | | | | |
| 951 | 12S | | | | | | | 3 | | | | | | | | | | | | | 1 |
| | rRNA | | | | | | | | | | | | | | | | | | | | |
| 961 | 12S | | | | | | | 4 | | | | | | | | | | | | | |
| | rRNA | | | | | | | | | | | | | | | | | | | | |
| 988 | 12S | | | | | | | | | | | | | | | | 3 | | | | |
| | rRNA | | | | | | | | | | | | | | | | | | | | |
| 1018 | 12S | | | | | | | | | | | 13 | 23 | | | | | | | | |
| | rRNA | | | | | | | | | | | | | | | | | | | | |
| 1048 | 12S | | | | | | | | | | | 2:L1a | | | | | | | | | |
| | rRNA | | | | | | | | | | | | | | | | | | | | |
| 1189 | 12S | | | | | | | | | | 34 | | | | | | | | | | 1 |
| | rRNA | | | | | | | | | | | | | | | | | | | | |
| 1243 | 12S | | | | | | | | | | | | | | | | | | 8 | | 1 |
| | rRNA | | | | | | | | | | | | | | | | | | | | |
| 1406 | 12S | | | | | | | | | | | | | | | | | | 5 | | |
| | rRNA | | | | | | | | | | | | | | | | | | | | |
| 1438 | 12S | | 25 | 18 | 13 | 9 | 3 | 208 | 12 | 33 | 47 | 6 | 23 | 20 | 1 | 46 | 42 | 8 | 8 | 11 | |
| | rRNA | | | | | | | | | | | | | | | | | | | | |
| 1442 | 12S | | | | | | | | | | | | 3 | | | | | | | | |
| | rRNA | | | | | | | | | | | | | | | | | | | | |
| 1598 | 12S | | 2 | | | | | | 1 | | | | | | | 1 | | | | | |
| | rRNA | | | | | | | | | | | | | | | | | | | | |
| 1700 | 16S | | | | | | | | | | | | | | | | 4 | | | | |
| | rRNA | | | | | | | | | | | | | | | | | | | | |
| 1706 | 16S | | | | | | | | | | | | 3 | | | | | | | | |
| | rRNA | | | | | | | | | | | | | | | | | | | | |
| 1719 | 16S | | | | | | | 2 | 14 | 1 | | | | | | 1 | | | | 11 | 1, 3, |
| | rRNA | | | | | | | | | | | | | | | | | | | | 5, 6, |
| | | | | | | | | | | | | | | | | | | | | | 9, 12, |
| | | | | | | | | | | | | | | | | | | | | | 14 |
| 1721 | 16S | | | | | | | | | | | | | | | | 4 | | | | 1 |
| | rRNA | | | | | | | | | | | | | | | | | | | | |
| 1736 | 16S | | 25 | | | | | | | | | | | | | | | | | | |
| | rRNA | | | | | | | | | | | | | | | | | | | | |
| 1738 | 16S | | | | | | | | | | | 7 | | | | | | | | | |
| | rRNA | | | | | | | | | | | | | | | | | | | | |
| 1811 | 16S | | | | | | | 1 | | | 46 | | | | | | 15 | | | | 1 |
| | rRNA | | | | | | | | | | | | | | | | | | | | |
| 1888 | 16S | | 2 | | 6 | | | | | 1 | | | | | | 46 | | | | | 1 |
| | rRNA | | | | | | | | | | | | | | | | | | | | |
| 2000 | 16S | | | | | | | | | | | | | 2 | | | | | | | 10 |
| | rRNA | | | | | | | | | | | | | | | | | | | | |
| 2092 | 16S | | | | | 9 | | | | | | | | | | | | | | | 14 |
| | rRNA | | | | | | | | | | | | | | | | | | | | |
| 2141 | 16S | | | | | | | | | | | | | | | 3 | | | | | |
| | rRNA | | | | | | | | | | | | | | | | | | | | |
| 2158 | 16S | | | | | | | | | 2 | | | | | | | 1 | | | | 1 |
| | rRNA | | | | | | | | | | | | | | | | | | | | |
| 2217 | 16S | | | | | | | 1 | | | 5 | | | | | | | | | | |
| | rRNA | | | | | | | | | | | | | | | | | | | | |
| 2245 | 16S | | | | | | | | | | | 2:L1a | | | | | | | | | |
| | rRNA | | | | | | | | | | | | | | | | | | | | |
| 2294 | 16S | | | | | | | | | | | | | | | | 3 | | | | |
| | rRNA | | | | | | | | | | | | | | | | | | | | |
| 2332 | 16S | | | | | | | | | | | | 4 | 2 | | | | | | | |
| | rRNA | | | | | | | | | | | | | | | | | | | | |
| 2352 | 16S | | | | | | | | | | | 7 | | 11 | | | | | | | 2, 3, |
| | rRNA | | | | | | | | | | | | | | | | | | | | 6, 8, |
| | | | | | | | | | | | | | | | | | | | | | 10 |
| 2358 | 16S | | | | | | | | | | | | 3 | | | | | | | | |
| | rRNA | | | | | | | | | | | | | | | | | | | | |
| 2387 | 16S | | | | | | | | | 2 | | | | | | | | | | | |
| | rRNA | | | | | | | | | | | | | | | | | | | | |
| 2395 | 16S | DEL | | | | | | | | | | 4 | | | | | | | | | |
| | rRNA | | | | | | | | | | | | | | | | | | | | |
| 2416 | 16S | | | | | | | | | | | | 23 | | | | | | | | |
| | rRNA | | | | | | | | | | | | | | | | | | | | |
| 2483 | 16S | | | | | | | | | | 2 | | | | | | | | | | 1 |
| | rRNA | | | | | | | | | | | | | | | | | | | | |
| 2706 | 16S | | 25 | 18 | 13 | 9 | 3 | 13 | 14 | 31 | 47 | 13 | 23 | 20 | 1 | 46 | 42 | 8 | 8 | 11 | |
| | rRNA | | | | | | | | | | | | | | | | | | | | |
| 2758 | 16S | | | | | | | | | | | 13 | | | | | | | | | 2, 10 |
| | rRNA | | | | | | | | | | | | | | | | | | | | |
| 2768 | 16S | | | | | | | | | | | 7 | | | | | | | | | |
| | rRNA | | | | | | | | | | | | | | | | | | | | |
| 2789 | 16S | | | | | | | | | | | | 18 | | | | | | | | |
| | rRNA | | | | | | | | | | | | | | | | | | | | |
| 2850 | 16S | | | | | | | | | | | | | | | 3 | | | | | |
| | rRNA | | | | | | | | | | | | | | | | | | | | |
| 2885 | 16S | | | | | | | | | | | 13 | | | | | | | | | |
| | rRNA | | | | | | | | | | | | | | | | | | | | |
| 3010 | 16S | | | | | 9 | | 73 | | 27 | | | 1 | 1 | | | 3 | | | | 1 |
| | rRNA | | | | | | | | | | | | | | | | | | | | |
| 3027 | 16S | | | | | | 1 | 1 | | | | | | | | | | | | | |
| | rRNA | | | | | | | | | | | | | | | | | | | | |
| 3116 | 16S | | | | | | | | | | | | | | | | 2 | | | | 1 |
| | rRNA | | | | | | | | | | | | | | | | | | | | |
| 3197 | 16S | | | | | 1 | | | | | | | | | | | 24 | | | | 1, 4 |
| | rRNA | | | | | | | | | | | | | | | | | | | | |
| 3277 | tRNA-L | | | | | | | 2 | | | | | | | | | | | | | |
| 3308 | ND1 | | | | | | | | | | | 7 | 1 | | | | | | | | |
| 3316 | ND1 | | 2 | | | | | 1 | | | | | 1 | | | 1 | | | 1 | | |
| 3333 | ND1 | | | | | | | 2 | | | | | | | | | | | | | |
| 3348 | ND1 | | | | | | | | | | | | | | | | 2 | | | | |
| 3394 | ND1 | | | | | | 1 | 1 | | 2 | | | | | | | | | | | 1 |
| 3438 | ND1 | | | | | | | 1 | | | | | 1 | 3 | | | | | | | |
| 3447 | ND1 | | | | | | | | 4 | | | | | | | | | | | | 1 |
| 3450 | ND1 | | | | | | | | | | | | | 6 | | | | | | | |
| 3480 | ND1 | | | | | | | | | | 47 | | | | | | | | | | 1 |
| 3495 | ND1 | C > A | | | | | | | | | | | 3 | | | | | | | | |
| 3505 | ND1 | | | | | | | | | | | | | | | | | | 8 | | 1 |
| 3516 | ND1 | C > A | | | | | | | | | | 2:L1a | | | | | | | | | |
| 3547 | ND1 | | | 14 | | | | 2 | | | | | | | | | | | | | |
| 3552 | ND1 | | | | 12 | | | | | | 1 | | | | | | | | | | |
| 3591 | ND1 | | 1 | | | | | 2 | | | | | | | | | | | | | |
| 3594 | ND1 | | | | | | | | | | | 13 | 23 | | | | | | | | 2, 3, |
| | | | | | | | | | | | | | | | | | | | | | 5, 6, |
| | | | | | | | | | | | | | | | | | | | | | 8, 10 |
| 3666 | ND1 | | | | | 1 | | 2 | | | | 11 | | | | | | | | | |
| 3693 | ND1 | | | | | | | | | | | 7 | 1 | | | | | | | | |
| 3705 | ND1 | | | | | | 2 | | | | | | 1 | | | | 1 | | | 1 | |
| 3720 | ND1 | | | | | | | | | | | | | | | | 7 | | | | 1 |
| 3777 | ND1 | | | | | | | | | | | 2 | | | | | | | | | |
| 3796 | ND1 | | | 1 | | | | 3 | | | | | | | | | | | | | |
| 3796 | ND1 | A > T | | | | | | 1 | | | | 2 | | | | | | | | | |
| 3843 | ND1 | | | | | | | | | | | 2 | | | | | | | | | |
| 3849 | ND1 | | | | | | | | | | | | | | | | 2 | | | | |
| 3915 | ND1 | | | 1 | | | | 9 | | | | | | 1 | | | | | | | |
| 3918 | ND1 | | | 1 | | | | | | | | | 7 | | | 1 | 1 | | | | |
| 3990 | ND1 | | | | | | | | 3 | | | | | | | | | | | | 1 |
| 3992 | ND1 | | | | | | | 9 | | | | | | | | | | | | | |
| 4024 | ND1 | | | | | | | 10 | | | | | | | | | | | | | |
| 4104 | ND1 | | | | | | | | | | | 13 | 23 | | | 1 | | | | | |
| 4158 | ND1 | | | | | | | | | | | | 3 | | | | | | | | 2 |
| 4185 | ND1 | | | | | | | 1 | | | | | 2 | | | | | | | | |
| 4216 | ND1 | | | | | | | 2 | | 33 | | | 1 | | | 46 | | | | | 1, 4 |
| 4248 | ND1 | | 25 | | | | | | | | | | | | | | | | | | |
| 4295 | tRNA-I | | | | | | | | | | 3 | | | | | | | | | | |
| 4310 | tRNA-I | | | | | | | 2 | | | | | | | | | | | | | |
| 4312 | tRNA-I | | | | | | | | | | | 2:L1a | | | | | | | | | 4, 10 |
| 4336 | tRNA-Q | | | | | | | 10 | | | | | | | | | | | | | 1, 12, |
| | | | | | | | | | | | | | | | | | | | | | 14 |
| 4370 | tRNA-Q | | | | | | | | | | | | 3 | | | | | | | | |
| 4491 | ND2 | | | | | | 2 | | | | | | | | | | | | | | |
| 4529 | ND2 | A > T | | | | | | | 12 | | | | | | | | | | | | 1, 3, |
| | | | | | | | | | | | | | | | | | | | | | 4, 9, |
| | | | | | | | | | | | | | | | | | | | | | 12, 14 |
| 4531 | ND2 | | | | | | | 2 | | | | | | | | | | | | | |
| 4553 | ND2 | | | | | | | | | | | | | | | | 4 | | | | |
| 4561 | ND2 | | | | | | | 1 | | | 8 | | | | | | 1 | | | | |
| 4580 | ND2 | | | | | | | | | | | | | | | | | 8 | | | 1, |
| | | | | | | | | | | | | | | | | | | | | | 3-5, |
| | | | | | | | | | | | | | | | | | | | | | 9 |
| 4586 | ND2 | | | | | | | | | | | 2:L1a | | | | | | | | | |
| 4646 | ND2 | | | | | | | 1 | | | | | | | | | 5:U4 | | | | 1, 4 |
| 4688 | ND2 | | | | | | | | | | | | | 1 | | 2 | | | | | |
| 4703 | ND2 | | | | | | | | | | | | | | | | 3 | | | | |
| 4715 | ND2 | | | | 13 | | | | | | | | | | | | | | | | |
| 4727 | ND2 | | | | | | | 5 | | | | | | | | | | | | | |
| 4732 | ND2 | | | | | | | | | | | | | | | | 2 | | | | 1 |
| 4745 | ND2 | | | | | | | 2 | | | | | | | | | | | | | 1 |
| 4767 | ND2 | | | | | | | 1 | | | | | 3 | | | | | | | | |
| 4769 | ND2 | | 25 | 18 | 13 | 9 | 3 | 209 | 14 | 33 | 47 | 13 | 23 | 20 | 1 | 46 | 42 | 8 | 8 | 11 | |
| 4772 | ND2 | | | | | | | 2 | | | | | | | | | | | | | |
| 4793 | ND2 | | | | | | | 5 | | | | | | | | 1 | | | | | |
| 4811 | ND2 | | | | | | | | | | | | | | | | 2 | | | | |
| 4820 | ND2 | | | 17 | | | | | | | | | | | | | 1 | | | | |
| 4824 | ND2 | | 25 | | | | | | | | | 1 | | | | | | | | | |
| 4883 | ND2 | | | | | 9 | | | | | | | | | | | | | | | |
| 4917 | ND2 | | | | | | | | 1 | | | | | | | 46 | | | | | 1, 4 |
| 4970 | ND2 | | 2 | | | | | | | | | | | | | | | | | | |
| 4977 | ND2 | | | 14 | | | | | | | | | | | | | | | | | |
| 5004 | ND2 | | | | | | | 11 | | | | | | | | | | | 1 | | |
| 5027 | ND2 | | | | | | | | | | | | 3 | | | | | | | | |
| 5036 | ND2 | | | | | | | | | | | 7 | | | | | | | | | |
| 5046 | ND2 | | | | | | | | | | | 7 | | 1 | | | | | 8 | | 1 |
| 5147 | ND2 | | | | | | | 1 | | | | 1 | | 3 | | 16 | | | | | 1 |
| 5178 | ND2 | C > A | | | | 9 | | | | | | | | | | | | | | | 2-6, |
| | | | | | | | | | | | | | | | | | | | | | 11, |
| | | | | | | | | | | | | | | | | | | | | | 13-17 |
| 5198 | ND2 | | | | | | | | | 3 | | | | | | | | | | | |
| 5231 | ND2 | | | | | | | | | | 5 | 2:L1a | | | | | | | | | |
| 5277 | ND2 | | | | | | | | | | | | | | | 5 | | | | | 1 |
| 5285 | ND2 | | | | | | | | | | | | 7 | | | | | | | | |
| 5319 | ND2 | | | | | | | 1 | | | | | | | | | 2 | | | | |
| 5331 | ND2 | C > A | | | | | | | | | | | 3 | | | | | | | | |
| 5390 | ND2 | | | | | | | | | | | | | | | | 7 | | | | 1 |
| 5393 | ND2 | | | | | | | | | | | 7 | | | | | | | | | |
| 5426 | ND2 | | | | | | | | | | | | | | | 7 | 7 | | | | 1 |
| 5442 | ND2 | | | | | | | 1 | | | | 2:L1a | | | 1 | | | | | | |
| 5460 | ND2 | | | | | 1 | | 1 | | 2 | | 2:L1a | 1 | | | | | 1 | 8 | | 1 |
| 5495 | ND2 | | | | | | | | | | | | | | | | 2 | | | | 1 |
| 5581 | tRNA-W | | | | | | | | | | | | 3 | | | | 1 | | | | |
| 5603 | tRNA-A | | | | | | | | | | | 2:L1a | | | | | | | | | |
| 5633 | tRNA-A | | | | | | | | | 3 | | | | | | | | | | | 1 |
| 5655 | tRNA-A | | | | | | | | | | | 7 | | | | | | | | | |
| 5656 | | | | | | | | | 1 | | | | | | | | 4 | | | | 1 |
| 5744 | | | | | | | | | | | | | 2 | | | | | | | | |
| 5773 | tRNA-C | | | | | | | | | | | | | 6 | | | | | | | |
| 5814 | tRNA-C | | | | | | | | | | | | 3 | | | | | | | | |
| 5913 | COI | | 1 | | | | | | | | 4 | | | | | | | | | | 1 |
| 5951 | COI | | | | | | | | | | | 4 | | | | | | | | | |
| 5999 | COI | | | | | | | | | | | | | | | 1 | 5:U4 | | | | 1 |
| 6023 | COI | | | 3 | | | | 2 | | | | | | | | 1 | 1 | | | | |
| 6045 | COI | | | | | | | | | | | | | | | | 7 | | | | 1 |
| 6047 | COI | | | | | | | | | | | | | | | | 5:U4 | | | | 1 |
| 6071 | COI | | | | | | | | | | | 4 | | | | | | | | | |
| 6146 | COI | | | | | | | | | | | | | | | | 2 | | | | |
| 6150 | COI | | | | | | | | | | | 2 | | 1 | | | | | | | |
| 6152 | COI | | | | | | | | | | | | 2 | | | 1 | 7 | | | | 1 |
| 6185 | COI | | | | | | | | | | | 2:L1a | | | | | | | | | |
| 6216 | COI | | | 3 | | | | | | | | | | | | | | | | | |
| 6221 | COI | | | | | | | | | | | | 1 | 11 | | 1 | | | | 11 | 1 |
| 6253 | COI | | | | | | | 1 | | | | 2 | | | | | | | | | |
| 6260 | COI | | 1 | | | 2 | | 1 | | | 6 | | | | | | 1 | | | | |
| 6308 | COI | | 4 | | | | | | | | | | | | | | | | | | |
| 6365 | COI | | | | | | | 7 | | | | | | | | | | | | | |
| 6371 | COI | | | | | | | | | | | | | | | | | | | 11 | 1 |
| 6413 | COI | | | 3 | | | | | | 1 | | | | | | | | | | | |
| 6464 | COI | C > A | | | | | | | | 2 | | | | | | | | | | | |
| 6473 | COI | | | 14 | | | | | | | | | | | | | | | | | |
| 6489 | COI | C > A | | | | | | | | | | | | | | 5 | | | | | |
| 6518 | COI | | | | | | | | | | | | | | | | 2 | | | | |
| 6524 | COI | | | | | | | | | | | | | 2 | | | | | | | |
| 6528 | COI | | | | | | | | | | | | | | | | | | 2 | | |
| 6548 | COI | | | | | | | | | | | 7 | | | | | | | | | |
| 6554 | COI | | | | | | | | | 2 | | | | | | | | | | | |
| 6587 | COI | | | | | | | | | | | | | 5 | | | | | | | |
| 6629 | COI | | | | | | | | | | | | | | | | 2 | | | | |
| 6671 | COI | | | | | | 1 | 1 | | 2 | | | | | | | | | | | |
| 6680 | COI | | | | | | 1 | | | | | | | 2 | | | | | | | |
| 6713 | COI | | | | | | | | | | | | 2 | | | | | | | | |
| 6719 | COI | | | | | | | 1 | | | | | | | | | 2 | | | | |
| 6734 | COI | | | | | | | | 4 | | | | | | | | | | | | 1 |
| 6755 | COI | | | 2 | | | | 1 | | | | | | | | | | | | | |
| 6776 | COI | | | | | | | 23 | | | | | | | | | | | | | 1 |
| 6827 | COI | | | | | | | 1 | | | 1 | 7 | | | | | | | | | |
| 6869 | COI | | | | | | | 4 | | | | | | | | | | | | | |
| 6989 | COI | | | | | | | | | | | 7 | | | | | | | | | |
| 7013 | COI | | | | | | | 3 | | | | | | | | | | | | | |
| 7022 | COI | | | | | | | | | | | | | | | 3 | | | | | |
| −7028 | COI | | 25 | 18 | 13 | 9 | 3 | 12 | 14 | 33 | 47 | 13 | 23 | 20 | 1 | 46 | 42 | 8 | 8 | 11 | 3, 9 |
| 7055 | COI | | | 1 | | | | | | | | 11 | | | | | | | | | 10 |
| 7076 | COI | | | | | | | | | | | 2 | | | | | | | | | |
| 7109 | COI | | | | | | | | | | | | | | | | 3 | | | | |
| 7112 | COI | | 3 | | | | | | | | | | | | | | | | | | |
| 7146 | COI | | | | | | | | | | | 13 | | | | | | | | | |
| 7175 | COI | | | | | | | | | | | | 18 | | | | | | | | |
| 7196 | COI | C > A | | | 13 | | | | | | | | | | | | | | | | |
| 7241 | COI | | | 2 | | | | | | | | | | | | | | | | | |
| 7256 | COI | | | | | | | | | | | 12 | 23 | | | | | | | | |
| 7274 | COI | | | | | | | | | | | | 18 | | | | | | | | |
| 7337 | COI | | | | | | | | | | | 2 | | | | | | | | | |
| 7385 | COI | | | | | | | | | | | | | | | | 2 | | | | 1 |
| 7389 | COI | | | | | | | | | | | 11 | | | | | | | | | |
| 7424 | COI | | | | | | | 1 | | | | | | 3 | | | | | | | |
| 7476 | tRNA-S | | | | | | | | | 6 | | | | | | | | | | | 1 |
| 7521 | tRNA-D | | | | | | | | | | | 13 | 23 | | | | | | | | |
| 7598 | COII | | | | | | 1 | | | | | | | | | | | | | | 13 |
| 7618 | COII | | | | | | | | | | | | | 2 | | | | | | | |
| 7624 | COII | T > A | | | | | | | | | | | 3 | | | | | | | | |
| 7694 | COII | | | | 2 | | | | | | | | | | | | | | | | |
| 7711 | COII | | | | | | | | | 2 | | | | | | | | | | | |
| 7724 | COII | A > T | 2 | | | | | | | | | | | | | | | | | | |
| 7768 | COII | | | | | | | | | | | | | | | | 8 | | | | 1 |
| 7771 | COII | | | | | | | | | | | | 18 | | | | | | | | |
| 7805 | COII | | | | | | | | | | | | | | | | 2 | | | | |
| 7867 | COII | | | | | | | | | | | 7 | | | | | | | | | |
| 8027 | COII | | 25 | | | | | | | | | 4 | | | | | | | | | |
| 8080 | COII | | | | | | | | | | | | 2 | | | | | | | | |
| 8206 | COII | | | | | | | | | | | | 23 | | | | | | | | |
| 8248 | COII | | | | | | | | | | | 7 | | | | | | | | | |
| 8251 | COII | | | | | | | | 13 | | | | | | | 1 | | | 8 | | 1, 3, |
| | | | | | | | | | | | | | | | | | | | | | 5, 9, |
| | | | | | | | | | | | | | | | | | | | | | 12, 14 |
| 8269 | COII | | | | | | | 8 | | 1 | | | | | | | | | | | |
| 8387 | ATPase | | | | | | | | | | | | 3 | | | | | | | | |
| | 8 | | | | | | | | | | | | | | | | | | | | |
| 8393 | ATPase | | | | | | | | | | | | | | | | | | | 5 | |
| | 8 | | | | | | | | | | | | | | | | | | | | |
| 8414 | ATPase | | | | | 9 | | | | | | | | | | | | | | | 14 |
| | 8 | | | | | | | | | | | | | | | | | | | | |
| 8428 | ATPase | | | | | | | | | | | 2:L1a | | | | | | | | | |
| | 8 | | | | | | | | | | | | | | | | | | | | |
| 8448 | ATPase | | | | | | | 3 | | | | | | | | | | | | | |
| | 8 | | | | | | | | | | | | | | | | | | | | |
| 8473 | ATPase | | | | | | | 4 | | | | | | | | | 2 | | | | |
| | 8 | | | | | | | | | | | | | | | | | | | | |
| 8541 | ATPase | | | | | | | | | | | | 2 | | | | | | | | |
| | 8 | | | | | | | | | | | | | | | | | | | | |
| 8572 | ATPase | | | | | | | 1 | | | | | | | | 2 | | | | | |
| | 6 | | | | | | | | | | | | | | | | | | | | |
| 8584 | ATPase | | | | 13 | | | | | | | | | | | | | | | | |
| | 6 | | | | | | | | | | | | | | | | | | | | |
| 8602 | ATPase | | | | | | | 3 | | | | | | | | | | | | | |
| | 6 | | | | | | | | | | | | | | | | | | | | |
| 8616 | ATPase | G > T | | | | | | | 4 | | | | | | | | | | | | 1 |
| | 6 | | | | | | | | | | | | | | | | | | | | |
| 8616 | ATPase | | | | | | | | | | | | | 2 | | | | | | 1 | 1, 2, |
| | 6 | | | | | | | | | | | | | | | | | | | | 10 |
| 8618 | ATPase | | | | | | | 2 | | | | | | 3 | | | | | | | 1, 3, |
| | 6 | | | | | | | | | | | | | | | | | | | | 6, 8, |
| | | | | | | | | | | | | | | | | | | | | | 10 |
| 8650 | ATPase | | | | | | | | | | | | | 4 | | | | | | | |
| | 6 | | | | | | | | | | | | | | | | | | | | |
| 8655 | ATPase | | | | | | | | | | | 13 | | | | | | | | | |
| | 6 | | | | | | | | | | | | | | | | | | | | |
| 8697 | ATPase | | | | | | | | 1 | | 1 | | | | | 46 | | | | | 1 |
| | 6 | | | | | | | | | | | | | | | | | | | | |
| 8701 | ATPase | | | | 13 | 9 | 3 | | | | | 13 | 23 | 20 | 1 | 1 | | | | | |
| | 6 | | | | | | | | | | | | | | | | | | | | |
| 8705 | ATPase | | | | | | | | | | | | | | | | | | | 3 | 1 |
| | 6 | | | | | | | | | | | | | | | | | | | | |
| 8784 | ATPase | | | | | | | | | | | 2 | | | | | | | | | |
| | 6 | | | | | | | | | | | | | | | | | | | | |
| 8790 | ATPase | | | | | | | | | | | | 3 | | | | | | | | |
| | 6 | | | | | | | | | | | | | | | | | | | | |
| 8794 | ATPase | | 25 | | | | | | | | | | | | | | | | | | |
| | 6 | | | | | | | | | | | | | | | | | | | | |
| 8803 | ATPase | | | | | | | 2 | | | | | | | | | | | | | |
| | 6 | | | | | | | | | | | | | | | | | | | | |
| 8839 | ATPase | | | | | | | 2 | | | | | | | | | | | | | |
| | 6 | | | | | | | | | | | | | | | | | | | | |
| 8843 | ATPase | | | | | | | 3 | | | | | | | | | | | | | 1 |
| | 6 | | | | | | | | | | | | | | | | | | | | |
| 8860 | ATPase | | 25 | 18 | 13 | 9 | 3 | 220 | 14 | 33 | 47 | 13 | 23 | 20 | 1 | 46 | 42 | 8 | 8 | 11 | |
| | 6 | | | | | | | | | | | | | | | | | | | | |
| 8877 | ATPase | | | | | | | | | | | 2 | | | | | | | | | |
| | 6 | | | | | | | | | | | | | | | | | | | | |
| 8898 | ATPase | | | | | | | 2 | | | | | | | | | | | | | |
| | 6 | | | | | | | | | | | | | | | | | | | | |
| 8925 | ATPase | | | | | | | | | | | | 2 | | | | | | | | |
| | 6 | | | | | | | | | | | | | | | | | | | | |
| 8994 | ATPase | | | | | | | | | | | | | | | | | | 8 | | 1, 3, |
| | 6 | | | | | | | | | | | | | | | | | | | | 4, 9 |
| 9006 | ATPase | | | | | | | | | | 2 | | | | | | | | | | |
| | 6 | | | | | | | | | | | | | | | | | | | | |
| 9042 | ATPase | | | | | | | | | | | 2:L1a | | | | | | | | | |
| | 6 | | | | | | | | | | | | | | | | | | | | |
| 9055 | ATPase | | | | | | | 1 | | | 47 | | | | | | | | | | 1, |
| | 6 | | | | | | | | | | | | | | | | | | | | 3-5, |
| | | | | | | | | | | | | | | | | | | | | | 9, 14 |
| 9070 | ATPase | T > G | | | | | | | | | | | | | | | 2 | | | | |
| | 6 | | | | | | | | | | | | | | | | | | | | |
| 9072 | ATPase | | | | | | | | | | | 4 | | | | | | | | | 2, 3, |
| | 6 | | | | | | | | | | | | | | | | | | | | 8, 10 |
| 9117 | ATPase | | | | | | | 1 | | | | | | | | 3 | | | | | |
| | 6 | | | | | | | | | | | | | | | | | | | | |
| 9123 | ATPase | | | | | | | 11 | | | | | | | | | | | | | |
| | 6 | | | | | | | | | | | | | | | | | | | | |
| 9150 | ATPase | | | | | | | 3 | | | | | | | | | | | | | |
| | 6 | | | | | | | | | | | | | | | | | | | | |
| 9221 | COIII | | | | | | | | | | | | 23 | | | | | | | | |
| 9266 | COIII | | | | | | | 1 | | | | | | | | 1 | 3 | | | | |
| 9347 | COIII | | | | | | | | | | | 2:L1a | | | | | | | | | |
| 9380 | COIII | | | | | | | 6 | | | | | | | | | | | | | |
| 9449 | COIII | | 1 | 2 | | | | | | | | | | 6 | | | | | | | |
| 9477 | COIII | | | | | | | | | | | | | | | | 23 | | | | 1 |
| 9540 | COIII | | | | 13 | 9 | 3 | | | | | 13 | 23 | 20 | 1 | | | | | | |
| 9545 | COIII | | 1 | | 12 | | 1 | | | | | 1 | | | | | | | | | |
| 9548 | COIII | | | | | | | | | 2 | | | | | | | 2 | | | | |
| 9554 | COIII | | | | | | | 1 | | | | 1 | 1 | 2 | | | | | | | |
| 9667 | COIII | | | | | | | | | | 1 | | | | | | 8 | | | | 1 |
| 9698 | COIII | | | | | | | | | | 47 | | | | | | | | | | 1 |
| 9716 | COIII | | | | | | | | | | 13 | | | | | | | | | | |
| 9755 | COIII | | | | | | | 1 | | | | 2:L1a | | | | | | | | | |
| 9804 | COIII | | | | | | | 5 | | | | | | | | | | | | | |
| 9818 | COIII | | | | | | | | | | | 2:L1a | | | | | | | | | |
| 9899 | COIII | | | | | | | | | | | | | | | 6 | | | | | |
| 9947 | COIII | | | | | | | | 3 | | | | | | | 1 | | | | | 1 |
| 9950 | COIII | | | 12 | | | | | | 1 | | | | | | | | | | | |
| 9962 | COIII | | | | | | | | | | 3 | | | | | | | | | | |
| 10034 | tRNA-G | | | | | | | | 12 | | | | | | | | | | | | 1, 4, |
| | | | | | | | | | | | | | | | | | | | | | 5, 9, |
| | | | | | | | | | | | | | | | | | | | | | 12, 14 |
| 10044 | tRNA-G | | | | | | | 5 | | | | | | | | | | | | | 7 |
| 10084 | ND3 | | | | | | | | | 4 | 1 | 1 | | | | | | | | | 1 |
| 10086 | ND3 | | | | | | | | | | | | | 6 | | | | | | | 1-3, |
| | | | | | | | | | | | | | | | | | | | | | 6, 8, |
| | | | | | | | | | | | | | | | | | | | | | 10 |
| 10097 | ND3 | | | | | | | | | | | | | | | | | | 2 | | |
| 10115 | ND3 | | | | | | | | | | | | 23 | | | | | | | | 1 |
| 10172 | ND3 | | | | | | | | | 3 | | | | | | | | | | | |
| 10192 | ND3 | | | | | | | | | 2 | | | | | | | | | | | |
| 10238 | ND3 | | | | | | | | 14 | | | | | | | | | | | | 1, 4 |
| 10289 | ND3 | | | | | | | | | | 3 | | | | | | | | | | |
| 10321 | ND3 | | | | | | | | | | | 4 | | | | | | | | | 10 |
| 10373 | ND3 | | | | | | | 1 | | | | | | 6 | | | | | 1 | | |
| 10398 | ND3 | | | | 13 | 9 | 3 | | 13 | 29 | 33 | 13 | 23 | 20 | 1 | | | | | | 1, 2, |
| | | | | | | | | | | | | | | | | | | | | | 5, 6, |
| | | | | | | | | | | | | | | | | | | | | | 8, 9, |
| | | | | | | | | | | | | | | | | | | | | | 11-17 |
| 10400 | ND3 | | | | 13 | 9 | 3 | | | | | | | | 1 | | | | | | 4-6, |
| | | | | | | | | | | | | | | | | | | | | | 11, |
| | | | | | | | | | | | | | | | | | | | | | 13-17 |
| 10454 | tRNA-R | | | | 2 | | | | | | | | 1 | | | | | | | | |
| 10463 | tRNA-R | | | | | | | | | | | | | | | 46 | | | | | 1, 4 |
| 10499 | ND4L | | | | | | | | | 3 | | | | | | | | | | | 1 |
| 10506 | ND4L | | | | | | | | | | | | | | | | 3 | | | | |
| 10550 | ND4L | | | | | | | | | | 47 | | | | | | | | | | |
| 10586 | ND4L | | | | | | | 1 | | | | 4 | | | | | | | | | |
| 10589 | ND4L | | | | | | | 2 | | | | 2:L1a | | | | 1 | | | | | |
| 10598 | ND4L | | | 1 | | 1 | | | | 2 | | | | | | | | | | | |
| 10664 | ND4L | | | | | | | | | | | 2:L1a | | | | | | | | | |
| 10667 | ND4L | | | | | | | | | | | | | 2 | | | | | | | |
| 10685 | ND4L | | | 1 | | | | 1 | | 3 | | | | | | | 1 | | | | |
| 10688 | ND4L | | | | | | | | | | | 13 | | | | | | | | | |
| 10792 | ND4 | | | | | | | | | | | 2 | | | | | | | | | |
| 10793 | ND4 | | | | | | | | | | | 2 | | | | | | | | | |
| 10810 | ND4 | | | | | | | 2 | | | | 13 | | | | | | | | | 1, 2, |
| | | | | | | | | | | | | | | | | | | | | | 5, 6, |
| | | | | | | | | | | | | | | | | | | | | | 8, 10 |
| 10819 | ND4 | | | | | | | | 1 | | | | | 11 | | | | | | | |
| 10873 | ND4 | | | | 13 | 9 | 3 | | | | | 13 | 23 | 20 | 1 | | | | | | 6 |
| 10876 | ND4 | | | | | | | | | | | | | | | | 7 | | | | 1 |
| 10907 | ND4 | | | | | | | 1 | | | | | | | | | 2:U4 | | | | |
| 10915 | ND4 | | | | | | | 1 | 3 | | | 2:L1a | | | | | | | | | 1 |
| 10927 | ND4 | | | | | | | | | | | | | | | | 2 | | | | 1 |
| 10978 | ND4 | | | | | | | | | | 7 | | | | | | | | | | |
| 11002 | ND4 | | | | | | | | | 2 | | | | 3 | | | | | | | 6, 10 |
| 11065 | ND4 | | | | | | | | 2 | | | | | | | | | | | | 1 |
| 11176 | ND4 | | | | | | | | | | | 2:L1a | | 1 | | | 1 | | | | |
| 11177 | ND4 | | | 14 | | | | | | | | | | | | | | | | | |
| 11197 | ND4 | | | | | | | | | | | | | | | | 2 | | | | 1 |
| 11242 | ND4 | | | | | | | | | | | | | | | 2 | | | | | |
| 11251 | ND4 | | | | | | | | | 33 | | | | | | 46 | | | | | 1 |
| 11299 | ND4 | | | | | | | | | | 47 | | | | | | | | | | 1 |
| 11314 | ND4 | | 2 | | | | | | | | | | | | | | | | | | |
| 11332 | ND4 | | | | | | | | | | | | | | | | 5:U4 | | | | 1, 4 |
| 11353 | ND4 | | | | | | | 2 | | | | | 1 | | | | | | | | |
| 11377 | ND4 | | | | | | | | | 3 | 1 | | | | | | | | | | 1 |
| 11467 | ND4 | | | | | | | | | | 46 | | | | | | 42 | | | | 1 |
| 11470 | ND4 | | | | | | | | | | 11 | | | | | | | | | | 1 |
| 11485 | ND4 | | | | | | | | | | 7 | | | | | | | | | | |
| 11560 | ND4 | | | | | | | 2 | | | | | | | | | | | | | |
| 11593 | ND4 | A > T | | | | 2 | | | | | | | | | | | | | | | |
| 11641 | ND4 | | | | | | | | | | | 2:L1a | | | | | | | 1 | | 3 |
| 11654 | ND4 | | | | | | | | | | | 2 | | | | | | | | | |
| 11674 | ND4 | | | | | | | | | | | | | | | | | | 8 | | 1 |
| ##### | ND4 | | 25 | 18 | 13 | 9 | 3 | 6 | 14 | 33 | 47 | 13 | 23 | 20 | 1 | 46 | 42 | | 8 | 11 | |
| 11732 | ND4 | | | | | | | | | | | | | | | | 2 | | | | 1 |
| 11800 | ND4 | | | | | | | 2 | | | | | | 3 | | | | | | | |
| 11812 | ND4 | | | | | | | | | | | 1:a | | | | 35 | | | | | 1 |
| 11840 | ND4 | | | | | | | | | | 7 | | | | | | | | | | |
| 11869 | ND4 | C > A | | | | | | | | | 5 | | | | | | | | | | |
| 11899 | ND4 | | | | | | | | | | | 2 | | | | | | | | | |
| 11914 | ND4 | | | | 12 | | | 3 | | | 13 | 3 | 18 | 1 | | 2 | | | | | |
| 11923 | ND4 | | | | | | | | | | 3 | | | | | | | | | | |
| 11944 | ND4 | | | | | | | | | | | | 22 | | | | | | | | |
| 11947 | ND4 | | | | | | | | | | | | | | | | | | 8 | | 1 |
| 12007 | ND4 | | 22 | | 1 | | | | | 2 | | 2:L1a | | | | 1 | | | | | |
| 12049 | ND4 | | | | | | | | | | | 2 | | | | | | | | | |
| 12127 | ND4 | | | | | | | | | 2 | | | | | | | | | | | |
| 12236 | tRNA-S | | | | | | | | | | | | 3 | | | | | | | | |
| 12308 | tRNA-L | | | | | | | | | | 47 | | | | | | 42 | | | | 1, |
| | | | | | | | | | | | | | | | | | | | | | 3-5, |
| | | | | | | | | | | | | | | | | | | | | | 9 |
| 12346 | ND5 | | | | | | 1 | 1 | | 1 | | | | | | | 2 | | | | |
| 12372 | ND5 | | | | 1 | | | | | | 47 | | | | | | 42 | | | | 1, 4 |
| 12414 | ND5 | | | | 1 | | | | | | | | | 1 | | | | | 8 | | |
| 12468 | ND5 | | 4 | | | | | | | | | | | | | | | | | | |
| 12501 | ND5 | | | | | | | | 14 | | | | | | | | | | | | 1 |
| 12519 | ND5 | | | | | | | | | | | 7 | | | | | | | | | |
| 12557 | ND5 | | | | | | | | | | | | | | | | 2 | | | | |
| 12570 | ND5 | | | | | | | | | 2 | | | | | | | | | | | |
| 12579 | ND5 | | | | | | | 2 | | | | | | | | | | | | | |
| 12612 | ND5 | | | | | | | | | 33 | | | | | | | | | | | 1, 4 |
| 12618 | ND5 | | | | | | | | | | | | | | | | 2 | | | | 1 |
| 12630 | ND5 | | | | | | | 2 | | | | | 3 | | | | | | | | |
| 12633 | ND5 | C > A | | | | | | | | | | | | | | 11 | | | | | 1 |
| 12642 | ND5 | | | | 2 | | | 2 | | | | | | | | | | | | | |
| 12693 | ND5 | | | | | | | | | | | | 18 | | | | | | | | |
| 12705 | ND5 | | 25 | | 13 | 9 | 3 | | 14 | | | 13 | 23 | 19 | 1 | | | | 8 | 11 | 1, 4 |
| 12720 | ND5 | | | | | | | | | | | 2:L1a | | | | | | | | | |
| 12810 | ND5 | | | | | | | | | | | 4 | | | | | | | | | 3, 8, |
| | | | | | | | | | | | | | | | | | | | | | 10 |
| 12811 | ND5 | | 2 | | | | | | | | 1 | | | | | | | | | | |
| 12948 | ND5 | | | | | | | | | | | | 3 | | | | | | | | |
| 12954 | ND5 | | | | | | | | | | 7 | | | | | | | | | | |
| 12978 | ND5 | | | | 3 | | | | | | | | | | | | | | | | |
| 13020 | ND5 | | | | | | | 2 | | | | | | | | | 7 | | | 1 | 1 |
| 13101 | ND5 | A > C | | | | | | | | | | | | 2 | | | | | | | |
| 13105 | ND5 | | | | | | | 2 | | | | 13 | | 10 | | | | 1 | | | |
| 13135 | ND5 | | | | | | | | | | 5 | | | | | | | | | | |
| 13149 | ND5 | | | | | | | | | | | 2 | | | | | | | | | |
| 13263 | ND5 | | | | 12 | | | | | | | | | | | | | | 4 | | 3, 4, |
| | | | | | | | | | | | | | | | | | | | | | 5, 11, |
| | | | | | | | | | | | | | | | | | | | | | 13-17 |
| 13276 | ND5 | | | | | | | | | | | 2:L1a | | | | | | | | | |
| 13281 | ND5 | | | | | | | | | 3 | | | | | | | | | | | |
| 13368 | ND5 | | | | | | | | | | | | | | | 46 | | | | | 1, |
| | | | | | | | | | | | | | | | | | | | | | 3-5, |
| | | | | | | | | | | | | | | | | | | | | | 9 |
| 13404 | ND5 | | | | | | | 4 | | | | | | | | | | | | | |
| 13485 | ND5 | | | | | | | | | | | 4 | | | | | | | | | |
| 13506 | ND5 | | | | | | | | | | | 13 | | | | | | | | | |
| 13590 | ND5 | | | 17 | | | | | | | | | 23 | | | | | | | | |
| 13617 | ND5 | | | | | | | | | | | | | | | | 23 | | | | 1 |
| 13637 | ND5 | | | | | | | | | | | | | | | | 4 | | | | 1 |
| 13650 | ND5 | | | | | | | | | | | 13 | 23 | | | | | | | | |
| 13680 | ND5 | | | | | | | 2 | | | | | | | | | | | | | |
| 13681 | ND5 | | | | | | | | | 2 | | | | | | | | | | | |
| 13708 | ND5 | | 3 | 1 | | | | 4 | | 33 | | | 3 | | | | 1 | | | 5 | 1, |
| | | | | | | | | | | | | | | | | | | | | | 3-5, |
| | | | | | | | | | | | | | | | | | | | | | 9, 12, |
| | | | | | | | | | | | | | | | | | | | | | 14 |
| 13734 | ND5 | | | | | | | | | | | | | | | 2 | 7 | | | | 1 |
| 13740 | ND5 | | | | | | | | | | 7 | | | | | | | | | | |
| 13758 | ND5 | C > A | | | | | | | | | | | | | | 2 | | | | | |
| 13759 | ND5 | | | | | | | 3 | | | | | | | | | | | | | |
| 13780 | ND5 | | | | | | | | 13 | | | | | | | | | | | | 1 |
| 13789 | ND5 | | | | | | | | | | | 11 | | | | | | | | | |
| 13803 | ND5 | | | | | | | | | | | | 18 | | | | | | | | 2, 10 |
| 13855 | ND5 | | 2 | | | | | | | | | | | | | | | | | | |
| 13879 | ND5 | | | | | | | | | 2 | | | | | | | | | | | 1 |
| 13880 | ND5 | C > A | | | | | | | | | | 7 | | | | | | | | | |
| 13886 | ND5 | | | | | | | | | | 1 | | | 3 | | | | | | | |
| 13914 | ND5 | C > A | | | | | | | | | | | | 6 | | | | | | | |
| 13933 | ND5 | | | | | | | | | 3 | | | | | | | | | | | |
| 13934 | ND5 | | | | | | | | | 5 | | | | | | | 3 | | | | |
| 13965 | ND5 | | | | | | | | | | | | | | | 8 | | | | | |
| 13966 | ND5 | | | | | | | | | | | | | | | 3 | | | | 11 | 1 |
| 13967 | ND5 | | | | | | | | | | 3 | | | | | | | | | | |
| 13980 | ND5 | | | | | | 1 | | | | | 2 | | | | | | | | | |
| 14000 | ND5 | T > A | | | | | | | | | | 4 | | | | | | | | | |
| 14002 | ND5 | | | | | | | | | | 2 | | | | | | | | | | |
| 14037 | ND5 | | | | | | | | | | 5 | | | | | | | | | | |
| 14040 | ND5 | | | | | | | | | | 2 | | | | | | | | | | |
| 14059 | ND5 | | | | | | | | | | | | 3 | | | | | | | | |
| 14125 | ND5 | | | | | | | 2 | | | | | | | | | | | | | |
| 14139 | ND5 | | | | | | | | | | | | | | | | 3 | | | | |
| 14148 | ND5 | | | | | | | | | | | 2 | | | | | | | | | |
| 14152 | ND6 | | | | | | | | | | | | | 3 | | | | | | | |
| 14167 | ND6 | | | | | | | | | | 47 | | | | | | | | | | 1 |
| 14178 | ND6 | | | | | | | | | | | 11 | | | | | | | | | |
| 14179 | ND6 | | | | | | | | | | | | | | | | 2 | | | | |
| 14182 | ND6 | | | | | | 1 | | 1 | | | | | | | | 8 | | | | 1 |
| 14203 | ND6 | | | | | | | | | | | 6 | | | | | | | | | |
| 14212 | ND6 | | | | | | | 2 | | | | | | 11 | | | | | | | |
| 14233 | ND6 | | | | | | | | 1 | | | | | | | 35 | | | | | 1 |
| 14284 | ND6 | | | | | | | | | | | | | 3 | | | | | | | |
| 14308 | ND6 | | | | | | 1 | | | | 1 | 2:L1a | | | | | | | | | |
| 14318 | ND6 | | | | 12 | | | | | | | | | | | | | | | | |
| 14350 | ND6 | | | | | | | 2 | | | | | | | | | | | | | |
| 14364 | ND6 | | 4 | | | | | 1 | | | | | | | | | 1 | | | | |
| 14365 | ND6 | | | | | | | 9 | | | | | | | | | | | | | |
| 14470 | ND6 | | 1 | | 1 | | | 1 | | | | | | | | | 1 | | | 11 | 1, 4 |
| 14470 | ND6 | T > A | | | | | | 3 | | | | | | | | | | | | | |
| 14544 | ND6 | | | | | | | | | | | | 2 | | | | | | | | 1 |
| 14560 | ND6 | | | | | | | | 1 | | | 11 | | | | | | | | | |
| 14566 | ND6 | | | | | | | | | | | | 17 | | | | | | | | |
| 14569 | ND6 | | | | | | | 3 | | 2 | 1 | | | | | | | | | | |
| 14582 | ND6 | | | | | | | 10 | | | | | | | | | | | | | |
| 14599 | ND6 | | | | | | | | | | | | 2 | | | | | | | | |
| 14620 | ND6 | | | | | | | | | | | | | | | | 5:U4 | | | | 1 |
| 14668 | ND6 | | | | | 9 | | | | | | | | | | | | | | | |
| 14687 | tRNA-E | | | | | | | | | | | | | | | 8 | | | | | |
| 14766 | CYT B | | 25 | 17 | 13 | 9 | 3 | 2 | 11 | 33 | 46 | 13 | 23 | 20 | 1 | 46 | 42 | | 8 | 11 | 3 |
| 14769 | CYT B | | | | 1 | | | | | | | 6 | | | | | 1 | | | | |
| 14783 | CYT B | | | | 13 | 9 | 3 | | | | | | | | 1 | | | | | | |
| 14793 | CYT B | | | | | | | | | | | | | | | | 16 | | | | 1 |
| 14798 | CYT B | | | | | | | | | 24 | 47 | | | | | | | | | | 1 |
| 14866 | CYT B | | | | | | | | | | | | | | | | 2:U4 | | | | |
| 14872 | CYT B | | | | | | | 2 | | | | | | | | | | | | | |
| 14905 | CYT B | | | | | | | | | | | | | 3 | | 46 | | | | | 1, 4 |
| 14911 | CYT B | | | | | | | | | | | 4 | | | | | | | | | |
| 15028 | CYT B | | | | | | | | | | | | | | | 5 | | | | | 1 |
| 15043 | CYT B | | | | 13 | 9 | 3 | | 13 | | | | | | 1 | 5 | | | | | 1, 4 |
| 15099 | CYT B | | | | | | | | | | | 1 | | 2 | | | | | | | |
| 15110 | CYT B | | | | | | | 1 | | | | | 3 | 1 | | | | | | | |
| 15115 | CYT B | | | | | | | 1 | | | | 7 | | | | | | | | | |
| 15136 | CYT B | | | | | | | | | | | 2:L1a | | | | | | | | | |
| 15191 | CYT B | | | | | | | | | | | | | | | | 2 | | | | |
| 15217 | CYT B | | | | | | | | | | | | 3 | | | | | | | | |
| 15218 | CYT B | | | | | | | 2 | | | | | | | | | 13 | | | | 1 |
| 15229 | CYT B | | | | | | | | | | | | 2 | | | | | | | | |
| 15236 | CYT B | | | | | | | | | | | | 2 | | 1 | | | | | | |
| 15244 | CYT B | | | 1 | | | | | | | | | 7 | | | | | | | | |
| 15257 | CYT B | | | | | | | | | 6 | 3 | | | | | | | | | | 1, 14 |
| 15274 | CYT B | | | | | | | | | | | | | | | 2 | | | | | |
| 15301 | CYT B | | | 1 | 13 | 9 | 3 | | | | 1 | 1 | 23 | 20 | 1 | | 1 | | | | |
| 15311 | CYT B | | | | | | | | | | | | | 6 | | | | | | | |
| 15326 | CYT B | | 25 | 18 | 13 | 9 | 3 | 220 | 14 | 33 | 47 | 13 | 21 | 20 | 1 | 46 | 42 | 8 | 8 | 11 | |
| 15391 | CYT B | | | | | | | | | | | | 2 | | | | | | | | |
| 15452 | CYT B | C > A | | | | | | | | 33 | | | | | | 46 | | | | | 1 |
| 15454 | CYT B | | | | | | | | | | | | | | | | 3 | | | | |
| 15466 | CYT B | | | | | | | 2 | | | | | | | | | | | | | |
| 15487 | CYT B | A > T | | | 12 | | | | | | | | | | | | | | | | |
| 15535 | CYT B | | | 17 | | | | | | | | | | | | | | | | | |
| 15607 | CYT B | | | | | | | | | | | | | | | 46 | | | | | 1, 4, |
| | | | | | | | | | | | | | | | | | | | | | 5, 9 |
| 15629 | CYT B | | | | | | | | | | | | 7 | | | | | | | | |
| 15670 | CYT B | | 1 | | 2 | | | | | | | | | 5 | | | | | | | |
| 15679 | CYT B | | | | | | | | | 2 | | | | | | | | | | | |
| 15693 | CYT B | | | | | | | | | | | | | | | | 5:U4 | | | | 1 |
| 15758 | CYT B | | | | | | | | 6 | | | 1 | | | | 1 | | | | | 1 |
| 15775 | CYT B | | | | | | | | | | | | | | | | | 1 | 2 | | |
| 15784 | CYT B | | | 1 | | | | 1 | | | 1 | 1 | 17 | | | | 3 | | 4 | | |
| 15789 | CYT B | | | | | | | 2 | | | | | | | | | | | | | |
| 15808 | CYT B | | | | | | | 2 | | | | | | | | | | | | | |
| 15812 | CYT B | | | | | | | | | 3 | | | | 1 | | | | | | | 1 |
| 15824 | CYT B | | | | | | | | | | | | | 6 | | | | | | | |
| 15833 | CYT B | | | | | | | 9 | | | | | | | | | | | | | 1 |
| 15884 | CYT B | | | 1 | | | | 3 | | | 4 | | | | | | | | | | |
| 15884 | CYT B | G > C | | | | | | | | | | | | | | | | | 8 | | 1 |
| 15904 | tRNA-T | | | | | | | | | | | | | | | | | 8 | | | 1, 4 |
| 15907 | tRNA-T | | | | | | | | | | | | | | | | 7 | | | | 1, 4 |
| 15924 | tRNA-T | | | | | | | 3 | 11 | 1 | 12 | | | | | | 2 | | 1 | | 1, 4 |
| 15927 | tRNA-T | | | | | | | | | | | | | | | | | | | 5 | 1 |
| 15928 | tRNA-T | | | | | | | | | | | | | | | 46 | | | | | 1, 4, |
| | | | | | | | | | | | | | | | | | | | | | 9 |
| 15930 | tRNA-T | | | | 6 | | | 2 | | | | | | | | | 1 | | | | |
| 15942 | tRNA-T | | | | | | | | | | | | | 4 | | | | | | | |
| 15944 | tRNA-T | DEL | | | | | | | | | | | | 6 | | | | | | | |
| 15945 | tRNA-T | T-INS | | | | | | | | | | | 2 | | | | | | | | |
| 15946 | tRNA-T | | | | | | | | | | 2 | | | | | | | | | | |
| 16051 | D-LOOP | | | | 1 | | | 5 | | | | | | 1 | | 1 | 6 | | | | |
| 16069 | D-LOOP | | | | | | | | | 23 | | | | | | | | | | | |
| 16092 | D-LOOP | | 3 | 2 | | | | | | 2 | 1 | | | | | | | | | | |
| 16111 | D-LOOP | | 23 | 3 | | | | | | | | | 1 | | | | | | | | |
| 16114 | D-LOOP | C > A | | | | | | | | | | | 3 | | | | 1 | | | | |
| 16124 | D-LOOP | | | | | | | | | | | | | 7 | | | | | | | |
| 16126 | D-LOOP | | | | | | | 2 | | 23 | | 6 | | | | 38 | | | | | |
| 16148 | D-LOOP | | | | | | | | | | | 2:L1a | | | | | | | | | |
| 16162 | D-LOOP | | | | | | | 14 | | | | | | | | 1 | | | | | |
| 16163 | D-LOOP | | | | | | | | | | | | | | | 7 | | | | | |
| 16172 | D-LOOP | | | | | | | 2 | 2 | 1 | | 3 | | 2 | | | 2 | | | | |
| 16182 | D-LOOP | A > C | | 8 | | | | 1 | | | | | | 1 | | 5 | | | | | |
| 16186 | D-LOOP | | | | | | | | | | | | | | | 8 | | | | | |
| 16187 | D-LOOP | | | | | | | | | | | 11 | | | | | | | | | |
| 16188 | D-LOOP | C > G | | | | | | 1 | | | | 2:L1a | | | | | | | | | |
| 16213 | D-LOOP | | | | | | | | | | | | 3 | | | | | | | | |
| 16217 | D-LOOP | | | 14 | | | | | | | | | | | | | | | | | |
| 16224 | D-LOOP | | | | | 1 | | | | | 41 | | | | | | | | | | |
| 16230 | D-LOOP | | | | | | | | | | | 2:L1a | | | | | | | | | |
| 16234 | D-LOOP | | 1 | | 2 | | 1 | 2 | | 1 | 6 | | | 2 | | | | | 1 | | |
| 16256 | D-LOOP | | | | | | | | | | | | | | | | 17 | 1 | | | |
| 16261 | D-LOOP | | | 1 | | | 1 | 2 | | 4 | | | | | | | | | | | |
| 16264 | D-LOOP | | | | | | | 2 | | | | 6 | | 1 | | | | | | | |
| 16265 | D-LOOP | | | | | | | | | | | 2 | | | | | | | | | |
| 16270 | D-LOOP | | 1 | | | | | | | | 2 | 4 | | | | | 18 | | | | |
| 16278 | D-LOOP | | 1 | 1 | | | | 4 | | 1 | | 11 | 23 | 6 | | | 2 | | | 10 | |
| 16290 | D-LOOP | | 23 | | | | | | | | 1 | | | | | | | | | | |
| 16291 | D-LOOP | | 1 | | | | | 8 | | | | 1 | | 1 | | | 4 | | | | |
| 16292 | D-LOOP | | | | | | | | | | | 1 | 1 | | | 1 | | | 7 | | |
| 16293 | D-LOOP | | | | | | | 8 | | | | 5 | | | | | | | | | |
| 16294 | D-LOOP | | | | | | | 2 | | | | 4 | 17 | 1 | | 38 | 2 | | | | |
| 16296 | D-LOOP | | | | | | | 1 | | | | | | | | 27 | | | | | |
| 16298 | D-LOOP | | | 1 | 12 | | | 3 | | | | | | | | 5 | | 3 | | | |
| 16304 | D-LOOP | | | | | | | 16 | 1 | | 1 | | | | | 9 | | | | | |
| 16309 | D-LOOP | | | | | | | 1 | | | 1 | | 13 | | | | | | | | |
| 16311 | D-LOOP | | | | 1 | | 1 | 14 | 2 | 1 | 43 | 12 | 1 | 7 | | 1 | 3 | 1 | 1 | | |
| 16319 | D-LOOP | | 25 | 1 | 1 | | | | | 2 | 3 | | | | | | | | | | |
| 16320 | D-LOOP | | | | | | | 2 | 1 | | 2 | 2:L1a | | 3 | | | | | | | |
| 16324 | D-LOOP | | | | | | | 1 | | | | | | | | 5 | | | | | |
| 16325 | D-LOOP | | 1 | 1 | 10 | 9 | | 1 | | | | | | | | | | | | | |
| 16327 | D-LOOP | | | | 12 | | | | | | | | | 5 | | | | | | | |
| 16356 | D-LOOP | | | | | | | 9 | | | | | | | | | 4 | | | | |
| 16360 | D-LOOP | | | | | | | | | | | 4 | | | | | | | | | |
| 16362 | D-LOOP | | 24 | | 2 | 9 | 2 | 14 | | 1 | 1 | | 3 | 6 | 1 | | 3 | | 1 | | |
| 16390 | D-LOOP | | 1 | | 1 | 1 | 1 | | 2 | 1 | | | 22 | | | | 3 | 1 | | | |
| 16391 | D-LOOP | | 1 | | | | | | 10 | | | | | | | | | | | | |
| 16399 | D-LOOP | | | | | | | | | | | 1 | 2 | 1 | | 2 | 10 | | | | |
| 16463 | D-LOOP | | | | | | | | | | 2 | | | | | | | | | | |
| 16482 | D-LOOP | | | | | | | 9 | | | | | | | | | | | | | |
| 16527 | D-LOOP | | | | 1 | | | | | | | 2 | | | | 1 | | | | | |

TV/DEL/INS column: all nucleotide substitutions are transitions unless indicated otherwise
NP: nucleotide position;
TV: transversion;
DEL: deletion;
INS: insertion
References
1: Finnilä et al. 2001 Am J Hum Genet 68:1475-1474
2: Chen et al. 2000 Am. J. Hum. Genet. 66:1362-1383
3: Alves-Silva et al. 2000 Am. J. Hum. Genet. 67:444-461
4: Macaulay et al. 1999 Am J Hum Genet 64:232-249
5: Wallace et al. 1999 Gene 238:211-230
6: Quintana-Murci et al. 1999Nat Genet 23:437-41
7: Lehtonen et al. 1999s in mtDNA
8: Rando et al. 1998Am J Hum Genet 62:531-550
9: Torroni et al. 1996. Genetics 144:1835-1850
10: Chen et al. 1995 Am J Hum Genet 57:133-149
11: Torroni et al. 1994 Am J Phys Anthropol 93:189-99
12: Torroni et al. 1994 Am J Hum Genet 55:760-776
13: Torroni et al. 1994 Am. J. Phys. Anthr. 93:189-199
14: Torroni et al. 1994 J Bioener Biomembr 26:261-71
15: Torroni et al. 1993 Am J Hum Genet 53:563-590
16: Torroni et al. 1992 Genetics 130:153-162
17: Wallace et al. 1992 Hum Biol 64:403-416

[0061] A mitochondrial single nucleotide polymorphism or homoplasmic mtDNA point mutation, which includes a deviation in the identity of the nucleotide base situated at a specific position in a mtDNA sequence relative to the “wildtype” human mtDNA sequence (CRS) disclosed by Anderson et al. (1981), may fall into at least one of the following categories: An “error” refers to sequencing mistakes in the human mtDNA sequence reported by Anderson et al. (1981), as corrected by Andrews et al. (1999 Nature Genetics 23:147). A “polymorphism” refers to a known polymorphism in a human mtDNA sequence that is not associated with a particular human disease, but that has been detected and described as a result of naturally occurring variability in the identity of the nucleotide base situated at a given position in a human mtDNA sequence (see, e.g., “Mitomap”, Emory University School of Medicine, available at http://www.gen.emory. edu/mitomap.html). A “rare polymorphism” refers to a mtDNA nucleotide that differs from the base situated at the corresponding position in the Cambridge Reference Sequence (CRS) of Anderson et al. (1981) but which, upon subsequent accumulation of human mtDNA sequence data from a plurality of subjects (and in contrast to the reliance of Anderson et al. upon the mtDNA sequence of a single donor to generate the CRS), suggests the presence of a low frequency allele in the CRS donor, relative to the larger sample population (see Andrews et al., 1999 Nature Genetics 23:147 and references cited therein). Particularly useful mutations that segregate with AD according to the present invention include homoplasmic mtDNA point mutations (e.g., single nucleotide polymorphisms) that are not errors, polymorphisms or rare polymorphisms as just described, and additionally, the homoplasmic mtDNA point mutations (e.g., single nucleotide polymorphisms). A number of polymorphisms are identified in Tables 3 and 4, and in FIGS. 1-6; full length mtDNA sequences of 560 unrelated human subjects are set forth at SEQ ID NOS:2-561 in the Sequence Listing.

[0062] In certain embodiments of the invention, the presence or absence of a specific genetic mutation or variation, such as, for example, a single nucleotide polymorphism or a deletion, that correlates with a specific haplogroup, disease or individual may be sufficient to determine the haplogroup, presence or risk of disease or identity of the individual from whom the biological sample being tested was obtained. In these situations, the association or correlation of a particular genetic mutation or variation with a haplogroup, disease or individual may be determined by means generally acceptable to those with skill in the relevant or a related art. For example, an association or correlation may be established by the presence of a statistically significant increase or decrease in the presence or absence of a single nucleotide polymorphism or other genetic alteration or marker in samples from subjects with a disease or haplogroup. An association or correlation with a specific indivudal may also be determined by a statistically significant presence or absence of a specific genetic mutation or alteration within mtDNA derived from the individual compared to the general population or a sample of other individuals.

[0063] In other embodiments of the invention, the determination of the presence or risk of a disease, the haplogroup or identity of an individual, or the genetic relationship between individuals may be determined by analyzing one or more genetic markers, including one or more mtDNA single nucleotide polymorphisms or deletions. In these situations, the correlation or association of one specific mtDNA mutation or alteration with a certain phenotype or individual need not be statistically significant in isolation. Rather, the overall analysis of multiple markers may be used to establish the association or correlation. The presence or absence of one or more markers together may be statistically associated or correlated with a disease, haplogroup or individual.

[0064] As presented below, the accompanying examples reveal that among individuals of the general population in the United States there are large differences in the frequencies of single nucleotide polymophisms (typically nucleotide substitutions) that are carried in the mtDNA genome (see also Table 3). While distinct sets of SNPs are associated with particular mtDNA haplogroups, individuals in the examples described below were found to carry up to 8 additional non-synonymous and 22 additional synonymous nucleotide substitutions in protein-coding genes, up to 8 nucleotide changes each in the ribosomal RNA and tRNA genes, and up to 13 changes in the D-loop region. Most of these nucleotide substitutions are likely to be of systemic nature as suggested by their detection following analyses of paired blood and skeletal muscle samples. Additionally, while the samples collected in the attached examples were non-neoplastic tissues, they exhibited some of the same nucleotide changes that were reported as acquired mutations in cancer tissue (Fliss, M. S. et al. (1999) Science 287:2017-2019). Thus, as also noted above and as shown in Table 3, the present invention provides non-haplogroup associated mitochondrial single nucleotide polymorphisms that may be used to determine the unique identity of an individual and/or to determine the presence of or risk for having a disease,(e.g., Alzheimer's disease, diabetes), in addition to providing improved profiles of mitochondrial single nucleotide polymorphisms for identifying a mitochondrial haplogroup and/or a mitochondrial haplogroup subgroup.

[0065] The present invention also contemplates compositions and methods for the detection of potentially pathogenic mtDNA mutations involved in human disease, either in the background of, or independent of, polymorphisms associated with mtDNA haplogroups. As noted above, the invention also provides materials and methods for haplogroup identification and genealogical and forensic analyses.

[0066] The following examples are offered by way of illustration, and not by way of limitation.

### EXAMPLES

### Example 1

### DNA Isolation From Blood, Muscle and Brain Samples

[0067] Blood samples, muscle biopsies, and frozen brain samples were collected from 560 maternally unrelated individuals (as determined from family-history information) of European, African and Asian descent after institutional review board (IRB) approval and informed consent. The sampled population consisted of 38% females and 62% males ranging in age from 33-93 years and 24-103 years with mean ages of 72 and 61, respectively. Total cellular DNA was prepared from white blood cells and frozen brain tissue by homogenization and cell lysis in TE buffer (10 mM Tris-HCl, pH 7.5, 1 mM EDTA) containing proteinase K (400μ/ml) and 1% SDS at 37° C. for 12 hr, followed by phenol:chlorofom:isoamyl alcohol (50:48:2) and chloroform:isoamyl alcohol (24:1) extractions. Alternatively, mitochondria were isolated from frozen brain tissue and mtDNA was extracted. DNA was precipitated with ethanol and resuspended in TE buffer. DNA concentrations were determined by UV absorption at 260 nm.

### Example 2

[0068] PCR Amplification, Sequencing and Sequence Analysis

[0069] MtDNA was amplified in 68 fragments of approximately 500 bp each in length with 50% overlap between neighboring fragments. PCR primers were 16-26 nucleotides in length and designed to be complementary to the mitochondrial light and heavy strands.

[0070] PCR amplification was performed as described below using the oligonucleotide primer set presented in Table 5 was used to generate 68 PCR product fragments spanning the complete mtDNA molecule, each fragment having approximately 50% sequence overlap with each neighboring product fragment. This strategy permitted direct mtDNA sequencing in both forward and reverse directions with four-fold redundancy in the identification of each nucleotide base, resulting in error-free sequencing. Thus, for each patient sample approximately 68,000 nucleotides were sequenced and analysis of homoplasmic mutations was verified.

TABLE 5

OLIGONUCLEOTIDE PRIMERS SPECIFIC FOR INDICATED REGIONS OF MITOCHONDRIAL GENOME

| | | | | | | | |
|---|---|---|---|---|---|---|---|
| | | | | PRIM. | | SEQ | FRAG. |
| FRAGMENT | PRIMER | GENE | NUCLEOTIDE | LENGTH | PRIMER SEQUENCE 5′ −> 3′ | ID NO. | LENGTH |

| | | | | | | | |
|---|---|---|---|---|---|---|---|
| 201 | 201F | D-Loop | 16225L | 24 | CAACTATCACACATCAACTGCA | | 512 |
| | | | | | AC | | |
| | 201R | | 168H | 21 | TCGCCTGTAATATTGAACGTA | | |
| 202 | 202F | D-Loop | 16477L | 23 | GCTAAAGTGAACTGTATCCGA | | 379 |
| | | | | | CA | | |
| | 202R | | 287H | 21 | GACTGTTAAAAGTGCATACCG | | |
| 203 | 203F | D-Loop | 155L | 21 | TATTTATCGCACCTACGTTCA | | 407 |
| | 203R | | 562H | 18 | AACTGTGGGGGGTGTCTT | | |
| 204 | 204F | D-Loop/tRNA | 275L | 23 | GACATGATAACAAAAAATTTC | | 510 |
| | | Phe/12S | | | CA | | |
| | 204R | | 785H | 18 | GTGTGGCTAGGCTAAGCG | | |
| 205 | 205F | D-Loop/tRNA | 498L | 16 | CGCCCATCCTACCCAG | | 541 |
| | | Phe/12S | | | | | |
| | 205R | | 1039H | 25 | TCTTAGCTATTGTGTGTTCAGA | | |
| | | | | | TAT | | |
| 206 | 206F | 12S | 773L | 19 | TGCAGCTCAAAACGCTTAG | | 525 |
| | 206R | | 1298H | 18 | CGTGGGTACTTGCGCTTA | | |
| 207 | 207F | 12S | 1031L | 24 | GCTTTAACATATCTGAACACAC | | 505 |
| | | | | | AA | | |
| | 207R | | 1536H | 24 | CTTGTCTCCTCTATATAAATGC | | |
| | | | | | GT | | |
| 208 | 208F | 12S/tRNA | 1285L | 20 | GAAGGCTACAAAGTAAGCGC | | 500 |
| | | Val/16S | | | | | |
| | 208R | | 1785H | 17 | TCATCTTTCCCTTGCGG | | |
| 209 | 209F | 12S/tRNA | 1535L | 24 | TACGCATTTATATAGAGGAGA | | 461 |
| | | Val/16S | | | CAA | | |
| | 209R | | 1996H | 18 | ATCACCAGGCTCGGTAGG | | |
| 210 | 210F | 16S | 1780L | 19 | TAGTACCGCAAGGGAAAGA | | 417 |
| | 210R | | 2197H | 19 | GTTGAGCTTGAACGCTTTC | | |
| 211 | 211F | 16S | 1986L | 17 | AGGCGACAAACCTACCG | | 411 |
| | 211R | | 2397H | 23 | GTGAGGGTAATAATGACTTGTT | | |
| | | | | | G | | |
| 212 | 212F | 16S | 2165L | 21 | CCATAGTAGGCCTAAAAGCAG | | 420 |
| | 212R | | 2585H | 22 | AGTGATTATGCTACCTTTGCAC | | |
| 213 | 213F | 16S | 2380L | 24 | CAATATCTACAARCAACCAAC | | 413 |
| | | | | | AAG | | |
| | 213R | | 2793H | 20 | ACCGAAATTTTTAATGCAGG | | |
| 214 | 214F | 16S | 2580L | 19 | TAACCGTGCAAAGGTAGCA | | 405 |
| | 214R | | 2985H | 18 | CCTGATCCAACATCGAGG | | |
| 215 | 215F | 16S | 2779L | 21 | CCTAAACTACCAAACCTGCAT | | 442 |
| | 215R | | 3221H | 20 | GCCATCTTAACAAACCTGT | | |
| 216 | 216F | 165/tRNA | 2974L | 19 | AGGGTTTACGACCTCGATG | | 517 |
| | | Leu/ND1 | | | | | |
| | 216R | | 3491H | 17 | GGTAGATGTGGCGGGTT | | |
| 217 | 217F | 16S/tRNA | 3228L | 19 | TTGTTAAGATGGCAGAGCC | | 506 |
| | | Leu/ND1 | | | | | |
| | 217R | | 3734H | 20 | AATGATGGCTAGGGTGACTT | | |
| 218 | 218F | ND1 | 3482L | 16 | AGCCCCTAAAACCCGC | | 498 |
| | 218R | | 3980H | 22 | ATAATGTTTGTGTATTCGGCTA | | |
| 219 | 219F | ND1 | 3718L | 23 | CAAACAATCTCATATGAAGTC | | 520 |
| | | | | | AC | | |
| | 219R | | 4238H | 17 | AGGGGGAATGCTGGAGA | | |
| 220 | 220F | ND1/tRNAs | 3967L | 19 | GCCCTATTCTTCATAGCCG | | 514 |
| | | Ile/Gln/Met/N | | | | | |
| | | D2 | | | | | |
| | 220R | | 4481H | 15 | ATGACGGGTTGGGCC | | |
| 221 | 221F | ND1/tRNAs | 4224L | 21 | CATACCCATTACAATCTCCAG | | 511 |
| | | Ile/Gln/Met/N | | | | | |
| | | D2 | | | | | |
| | 221R | | 4735H | 26 | TATTAATGATGAGTATTGATTG | | |
| | | | | | GTAG | | |
| 222 | 222F | ND2 | 4481L | 15 | GGCCCAACCCGTCAT | | 508 |
| | 222R | | 4989H | 20 | GCTAAGATTTTGCGTAGCTG | | |
| 223 | 223F | ND2 | 4691L | 23 | CCTCTTCAACAATATACTCTCC | | 548 |
| | | | | | G | | |
| | 223R | | 5239H | 16 | GGCAAAAAGCCGGTTA | | |
| 224 | 224F | ND2 | 4979L | 18 | AAACCAGACCCAGCTACG | | 506 |
| | 224R | | 5485H | 25 | AAGATTATTAGTATAAAAGGG | | |
| | | | | | GAGA | | |
| 225 | 225F | ND2/tRNAs | 5234L | 15 | CCCGCTAACCGGCTT | | 480 |
| | | Trp/Ala/Asn | | | | | |
| | 225R | | 5714H | 22 | GAGAAGTAGATTGAAGCCAGT | | |
| | | | | | T | | |
| 226 | 226F | ND2/tRNAs | 5455L | 17 | TCATCGCCCTTACCACG | | 537 |
| | | Trp/Ala/Asn/Cys/Tyr+ | | | | | |
| | | O-L | | | | | |
| | 226R | | 5992H | 19 | AGGAGGCTTAGAGCTGTGC | | |
| 227 | 227F | tRNAs | 5700L | 20 | TAAGCACCCTAATCAACTGG | | 542 |
| | | Ala/Asn/Cys/Tyr+ | | | | | |
| | | O-L/CO1 | | | | | |
| | 227R | | 6242H | 20 | CCTCCACTATAGCAGATGCG | | |
| 228 | 228F | COI | 5995L | 21 | CAGCTCTAAGCCTCCTTATTC | | 498 |
| | 228R | | 6493H | 21 | CAGCTAGGACTGGGAGAGATA | | |
| 229 | 229F | COI | 6230L | 19 | CCTACTCCTGCTCGCATCT | | 527 |
| | 229R | | 6757H | 21 | TATGGTGTGCTCACACGATAA | | |
| 230 | 230F | COI | 6476L | 24 | AGCAGTCCTACTTCTCCTATCT | | 510 |
| | | | | | CT | | |
| | 230R | | 6986H | 25 | GTCGTGTAGTACGATGTCTAGT | | |
| | | | | | GAT | | |
| 231 | 231F | COI | 6713L | 23 | CATAGGTATGGTCTGAGCTATG | | 517 |
| | | | | | A | | |
| | 231R | | 7230H | 18 | GGTGTATGCATCGGGGTA | | |
| 232 | 232F | CO1/tRNA | 6979L | 24 | CAAACTCATCACTAGACATCGT | | 501 |
| | | Ser | | | AC | | |
| | 232R | | 7480H | 17 | ATGGGGTTGGCTTGAAA | | |
| 233 | 233F | CO1/tRNAs | 7225L | 16 | CGGACTACCCCGATGC | | 519 |
| | | Ser/Asp/COII | | | | | |
| | 233R | | 7744H | 20 | CCTGAGCGTCTGAGATGTTA | | |
| 234 | 234F | tRNAs | 7469L | 18 | CCCAAAGCTGGTTTCAAG | | 510 |
| | | Ser/Asp/COII | | | | | |
| | 234R | | 7979H | 18 | GTCAAGGAGTCGCAGGTC | | |
| 235 | 235F | COII | 7690L | 20 | CTTCCTAGTCCTGTATGCCC | | 557 |
| | 235R | | 8247H | 18 | GGGTAAATACGGGCCCTA | | |
| 236 | 236F | COII/tRNA | 7975L | 16 | AGGCGACCTGCGACTC | | 504 |
| | | Lys/ATPase 8 | | | | | |
| | 236R | | 8479H | 21 | TTTATTTTTATGGGCTTTGGT | | |
| 237 | 237F | COII/tRNA | 8225L | 22 | ATTCCCCTAAAAATCTTTGAAA | | 516 |
| | | Lys/ATPase | | | | | |
| | | 8/ATPase 6 | | | | | |
| | 237R | 8741H | | | 25 | GCAATAAAAATGATTAAGGAT | |
| | | | | | ACTA | | |
| 238 | 238F | ATPase | 8499L | 24 | AAAATTATAACAAACCCTGAG | | 497 |
| | | 8/ATPase 6 | | | AAC | | |
| | 238R | | 8996H | 16 | GCGGTTAGGCGTACGG | | |
| 239 | 239F | ATPase | 8722L | 26 | CGAACCTGATCTCTTATACTAG | | 515 |
| | | 8/ATPase | | | TATC | | |
| | | 6/COIII | | | | | |
| | 239R | | 9237H | 18 | TCATGGGCTGGGTTTTAC | | |
| 240 | 240F | ATPase | 8978L | 18 | TTCAACCAATAGCCCTGG | | 506 |
| | | 6/COIII | | | | | |
| | 240R | | 9484H | 19 | CAGAAAAATCCTGCGAAGA | | |
| 241 | 241F | COIII | 9229L | 22 | ATCATATAGTAAAACCCAGCC | | 505 |
| | | | | | C | | |
| | 241R | | 9734H | 21 | TCGAAGTACTCTGAGGCTTGT | | |
| 242 | 242F | COIII/tRNA | 9470L | 21 | CTCAGAAGTTTTTTTCTTCGC | | 537 |
| | | Glu | | | | | |
| | 242R | | 10007H | 25 | AGTTAATTGGAAGTTAACGGT | | |
| | | | | | ACTA | | |
| 243 | 243F | COIII/tRNA | 9732L | 22 | CTACAAGCCTCAGAGTACTTCG | | 520 |
| | | Glu/ND3 | | | | | |
| | 243R | | 10252H | 21 | GGAGGGCAATTTCTAGATCAA | | |
| 244 | 244F | COIII/tRNA | 9976L | 24 | ATTGATGAGGGTCTTACTCTTT | | 523 |
| | | Glu/ND3/tRN | | | TA | | |
| | | A Arg | | | | | |
| | 244R | | 10499H | 23 | CTAGAAGTGAGATGGTAAATG | | |
| | | | | | CT | | |
| 245 | 245F | ND3/tRNA | 10209L | 26 | TTCTCCATAAAATTCTTCTTAG | | 522 |
| | | Arg/ND4L | | | TAGC | | |
| | 245R | | 10731H | 26 | AGTAGGTTTAGGTTATGTACGT | | |
| | | | | | AGTC | | |
| 246 | 246F | tRNA | 10450L | 24 | ATGATAATCATATTTACCAAAT | | 536 |
| | | Arg/ND4L/ND | | | GC | | |
| | | 4 | | | | | |
| | 246R | | 10986H | 18 | GTTGGCTTGCCATGATTG | | |
| 247 | 247F | ND4L/ND4 | 10719L | 23 | ACATATGGCCTAGACTACGTAC | | 511 |
| | | | | | A | | |
| | 247R | | 11230H | 18 | GCGATGAGTAGGGGAAGG | | |
| 248 | 248F | ND4 | 10979L | 17 | CCCCTCACAATCATGGC | | 502 |
| | 248R | | 11481H | 22 | AGTGTGAGGCGTATTATACCAT | | |
| 249 | 249F | ND4 | 11213L | 20 | TACACCCTAGTAGGCTCCCT | | 524 |
| | 249R | | 11737H | 21 | TTTGAGTTTGCTAGGCAGAAT | | |
| 250 | 250F | ND4 | 11474L | 20 | GGCGGCTATGGTATAATACG | | 510 |
| | 250R | | 11984H | 24 | CCATTGTGTTGTGGTAAATATG | | |
| | | | | | TA | | |
| 251 | 251F | ND4/tRNAs | 11721L | 24 | TTACATCCTCATTACTATTCTG | | 511 |
| | | His/Ser | | | CC | | |
| | 251R | | 12232H | 18 | TTAGACATGGGGGCATGA | | |
| 252 | 252F | ND4/tRNAs | 11968L | 23 | AGCCCTATACTCCCTCTACATA | | 538 |
| | | His/Ser/Leu/ND5 | | | T | | |
| | 252R | | 12506H | 25 | TTCGAGATAATAACTTCTTGGT | | |
| | | | | | CTA | | |
| 253 | 253F | tRNAs | 12213L | 22 | GCTCACAAGAACTGCTAACTC | | 516 |
| | | Ser/Leu/ND5 | | | A | | |
| | 253R | | 12729H | 22 | GAATAGGTTGTTAGCGGTAACT | | |
| 254 | 254F | ND5 | 12458L | 24 | CATCCACCTTTATTATCAGTCT | | 532 |
| | | | | | CT | | |
| | 254R | | 12990H | 17 | ATTTGCCTGCTGCTGCT | | |
| 255 | 255F | ND5 | 12714L | 25 | TACCATACTAATCTTAGTTACC | | 520 |
| | | | | | GCT | | |
| | 255R | | 13234H | 21 | AGTGGAGAAGGCTACGATTTT | | |
| 256 | 256F | ND5 | 12979L | 17 | GGCCTCCTCCTAGCAGC | | 501 |
| | 256R | | 13480H | 21 | ACCTGTGAGGAAAGGTATTCC | | |
| 257 | 257F | ND5 | 13225L | 21 | GACATCAAAAAAATCGTAGCC | | 504 |
| | 257R | | 13729H | 25 | AAATGTTGTTAGTAATGAGAA | | |
| | | | | | ATCC | | |
| 258 | 258F | ND5 | 13472L | 21 | CATTAGCAGGAATACCTTTCC | | 506 |
| | 258R | | 13978H | 19 | CTAGGAGGAGTAGGGGCAG | | |
| 259 | 259F | ND5/ND6 | 13720L | 21 | CTATTCGCAGGATTTCTCATT | | 517 |
| | 259R | | 14237H | 16 | GTGCGGGGGCTTTGTA | | |
| 260 | 260F | ND5/ND6 | 13939L | 19 | CGCACAATCCCCTATCTAG | | 545 |
| | 260R | | 14484H | 22 | TTAATTTATTTAGGGGGAATGA | | |
| 261 | 261F | ND6/tRNA | 14209L | 22 | AACTACTACTAATCAACGCCCA | | 522 |
| | | Glu | | | | | |
| | 261R | | 14731H | 22 | GGTCATTGGTGTTCTTGTAGTT | | |
| 262 | 262F | ND6/tRNA | 14471L | 20 | CCAAAGACAACCATCATTCC | | 508 |
| | | Glu/Cyt b | | | | | |
| | 262R | | 14979H | 18 | CGTGAAGGTAGCGGATGA | | |
| 263 | 263F | tRNA Glu/Cyt | 14715L | 23 | ACCATCGTTGTATTTCAACTAC | | 514 |
| | | b | | | A | | |
| | 263R | | 15229H | 21 | TAGCCTCCTCAGATTCATTGA | | |
| 264 | 264F | Cyt b | 14961L | 22 | ACGTAAATTATGGCTGAATCAT | | 518 |
| | 264R | | 15479H | 20 | CCTAGGAGGTCTGGTGAGAA | | |
| 265 | 265F | Cyt b | 15223L | 22 | CCTAGTTCAATGAATCTGAGGA | | 509 |
| | 265R | | 15732H | 17 | AATGAGGAGGTCTGCGG | | |
| 266 | 266F | Cyt b/tRNA | 15449L | 24 | TTCCTTCTCTCCTTAATGACATT | | 530 |
| | | Thr/Phe | | | A | | |
| | 266R | | 15979H | 20 | TAGCTTTGGGTGCTAATGGT | | |
| 267 | 267F | Cyt b/tRNAs | 15723L | 18 | GACTCCTAGCCGCAGACC | | 509 |
| | | Thr/Phe/D-Loop | | | | | |
| | 267R | | 16232H | 20 | GGAGTTGCAGTTGATGTGTG | | |
| 268 | 268F | tRNA Phe/D-Loop | 15968L | 22 | TCTTTAACTCCACCATTAGCAC | | 517 |
| | 268R | | 16485H | 24 | GGAACCAGATGTCGGATACAG | | |
| | | | | | TTC | | |

[0071] PCR amplifications were performed in triplicate, each containing 5-50 ng total cellular DNA or 1 ng mtDNA, 100 ng of each forward and reverse primers, and 12.5 μl of Taq PCR Master Mix (Qiagen) in a reaction volume of 25 μl. After denaturation at 95° C. for 2 min, amplification was carried out for 30 cycles at 95° C. for 10 sec, 60° C. for 10 sec, and 72° C. for 1 min, followed by 72° C. for 4 min and cooling to 4° C. Triplicate reactions were pooled and purified with the QIAquick 96 PCR Purification Kit (Qiagen). Sequencing reaction were preformed using 3 μl of PCR product, forward or reverse PCR primer, and BigDyeTerminator chemistry (Perkin-Elmer). Sequencing reactions were purified using Centri-Sep 96 plates (Princeton Separations). Electrophoresis and base calling was performed using a 3700 DNA Analyzer (Perkin-Elmer). Sequence data for the PCR fragments were built into contiguous mtDNA sequences using extensive source code modifications in the Contig Assembly Program (CAP; Thompson, J. D. et al., (1994) Nucl Acids Res 22:4673-4680) and aligned with the published sequence of mitochondrial DNA (e.g., SEQ ID NO:1) using modified publicly available FASTA (Pearson et al., 1990 Proc. Nat. Acad. Sci. USA 85:2444) and CLUSTALW (Thompson et al., 1994 Nucl. Ac. Res. 22:4673) software that was modified in order to identify nucleotide substitutions. Data analysis included categorization of sample sequences according to various parameters, including: patient haplogroup, mtDNA gene region in which an identified SNP resided and, for protein encoding mtDNA genes in which a SNP was identified, whether the SNP was a synonymous substitution (i.e., resulted in no change in the amino acid sequence of the encoded protein) or a non-synonymous substitution (i.e., resulted in a different amino acid sequence for the encoded protein). Full length mtDNA sequences from 560 unrelated human subjects are set forth as SEQ ID NOS:2-561.

### Example 3

### Single Nucleotide Polymorphisms in Mirochondrial DNA that Segregate with Specific Haplogroups

[0072] The distribution of mtDNA haplogroups amongst the 435 individual samples of European origin were 52%, 10.8%, 9.7%,10.6%, 7.6%, 1.8%, 3.2%, 1.8% and 2.5% for the haplogroups H (n=226), K (n=47), U (n=42), T (n=46), J (n=33), W (n=8), I (n=14), V (n=8) and X (n=11) respectively. The African mtDNA haplogroups L1, L2, and L3 were represented by 3.3%, 4.1%, and 7.4%, respectively, in our population before collection of additional African American individuals in order to expand data sets for the L haplogroups, which totaled 56 individual subjects; 69 samples were obtained from individual subjects of Asian descent. Novel polymorphisms were identified that were associated, either as “haplogroup-specific” or “haplogroup-associated” polymorphisms as described above, with one (haplogroup-specific) or more (haplogroup-associated) of mtDNA haplogroups A, B, C, D, E, H, I, J, K, L1, L2, L3, T, U, V, W and X (Tables 3 and 4). Novel nucleotide substitutions that were specific for individual European haplogroups are C114T, C497T, T1189C, A3480G, T9698C, A10550G, A10978C, T11299C, A11470G, T12954C, C14167T and T14798C for haplogroup K; T3197C, A7768G, G9477A, T13617C, T14182, A14793G, A15218G and C16256T for haplogroup U; G228A, C295T, C462T and G15257A for haplogroup J; G930A, G1888A, T5426C, C6489A, G8697A, A11812G, T13965C, A14233G and C16296T for haplogroup T; T1243C, A3505G, G5046A, G5460A, C11674T and G15884C for haplogroup W; T250C, G12501A, and A13780G for haplogroup I; T239C, C456T, T4336C, T677C, A16162G for haplogroup H; T16298C for haplogroup V; G225A, T226C, G6371T, C8393T, A13966G, and G15927A for haplogroup X. Other novel SNPs are shared by two of the European haplogroups, i.e., A181 IG and Al 1467G, which occurred in haplogroups U and K; G207A in haplogroups I and W; T4216C, A11251G, and C15452A in haplogroups J and T; T16304C in haplogroups H and T; A15924G in haplogroups I and K; G13708A in haplogroups J and X. Many of these novel SNPs allowed for the identification of novel subgroups for haplotypes H, K, U, J, and T based on CLUSTALW/NJPLOT⁷ analysis (FIG. 1).

[0073] Nucleotide substitutions at positions T489C, G709A, G3010A, T6221C, G11914A, C12705T, G14905A, G15043A, C16223T, C16294T and T16362C were found in European and African haplogroups. In this regard, they are “haplogroup associated” rather than “haplogroup specific”. The finding that all individuals not belonging to haplogroup H carried the nucleotide substitutions A73G, C7028T, and G11719A, which were absent in most of the H haplotypes (93-99%), confirmed a previous report (Andrews, R. M. et al. (1999) Nature Genetics 23:147).

### Example 4

### Single Nucleotide Polymorphisms and Deletions in Mitochondrial DNA that Segregate with African Haplogroups

[0074] Nucleotide changes that were novel and unique to all members of the three African mtDNA haplogroups are A8701G, T9540C, and T10873C. In addition to the unique changes previously identified for the L1 and L2 haplogroups at T10810C and G16390A, respectively, the substitutions G247A, T825A, G2758A, T2885C, G3666A, T7146, C8468T, C8655T, G10688A, C13506T, T13789C, T14178C, G14560A, and C16187T were found in all (or all but one) haplogroup L1 mtDNAs, whereas the substitutions T2416C, G8206A, A9221G, T10155C, T11944C, and G13590A were present in all (or all but one) haplogroup L2 mtDNAs. Changes at nucleotide positions 2758, 2768, 3308, and 16187, previously reported and not associated with any mtDNA haplogroup, were found in haplogroup L1 mtDNA (Table 3). Nucleotide substitutions that were found both in haplogroups L1 and L2 in addition to C3594T were C182T, G769A, G1018A, A4104G, C7256T, T7521C, and C13650T. A nucleotide substitution found in haplogroups L1 and L3 was A13105G, and a substitution found in L2 and L3 was G15301A.

[0075] The African L3 haplotypes were identified based on the absence of the HpaI restriction site at nucleotide position 3592 which corresponds to the absence of a C to T transition at nucleotide position 3594, and also the absence of substitutions at positions 182, 769, 1018, 4104, 7256, 7521, and 13650. Nucleotide changes that occurred in L3 mtDNA only were A249del, A289del, A290del, C2092T, T2352C, C4883T, C5178A, C6587T, C8650T, A9545G, A14152G, C14668T, T15670C, T15942C, C3450T, T3552A, A4715G, G5733A, T6221C, C7196A, G8584A, C9449T, A10086G, G10373A, C10400T, A10819G, A13263G, C13914A, T14212C, T14318C, T14783C, A15311G, A15487T, A15824G, G15930A, T15944del, T16124C, T16325C, and C16327T. Many of these nucleotide changes were clustered in subgroups of L3 (FIG. 2). All of the L3 haplotypes were characterized by the absence of polymorphisms that were present in one or both of the other African haplogroups, except for substitutions A13105 and G15301A, which were also present in some of L1 and all of L2 mtDNAs, respectively. Of the three African haplogroups identified to date, the L3 mtDNA haplogroup that was found in the population sample described herein appeared to be of most recent origin, based according to non-limiting theory on the observation that the overall level of sequence divergence was lower than for the L1 and L2 haplogroups.

[0076] Additional clusters of polymorphisms (Tables 3 and 4) were detected and their relationships plotted using reduced meridian networks (Bandelt et al. 1995 Genetics 141:743) for European mtDNA haplogroups (FIG. 3), for European H and V mtDNA haplogroups (FIG. 4), for African mtDNA haplogroups (FIG. 5) and for Asian mtDNA mtDNA haplogroups (FIG. 6).

### Example 5

### Single Nucleotide Polymorphisms in Mitochondrial DNA that Correlate with Cancer and Tumors

[0077] None of the somatic changes previously reported in colorectal cancer tissue were found in tissues from the population analyzed here. More than one-third of the somatic changes previously found in lung, bladder, and head and neck tumors were also detected in the herein described population which included non-neoplastic blood, brain, and skeletal muscle samples (Table 2). The A1811G polymorphism was associated with mtDNA haplogroups K and U and was detected in 100% of the haplogroup K and in 29% of the haplogroup U mtDNAs for which the entire mtDNA was sequenced, and in an additional 24 blood samples from individuals for which only the ribosomal RNA genes were analyzed. The G2758A, A2768G, T3308C, G10688A, T10810C, and T16187C changes were associated specifically with haplogroup L1 mtDNAs and appeared together with a number of other polymorphisms (Table 1, FIG. 1). The A to C substitution (not C to A as previously reported) was found at nucleotide 16183 in 25 individual blood samples (12% of our sample population) and in four paired skeletal muscle samples from the same individuals. Furthermore, nucleotide substitutions at positions 150 (C to T), 195 (T to C) and 16519 (T to C) were common systemic polymorphisms which were found in 13%, 25% and 70%, respectively, of the herein characterized population. These substitutions were present in blood and brain, and in all skeletal muscle tissues paired with blood samples. Nucleotide substitution A4917G was found in all of haplogroup T mtDNAs where it was associated with other T-specific polymorphisms (Table 3, FIG. 1).

[0078] From the foregoing it will be appreciated that, although specific embodiments of the invention have been described herein for purposes of illustration, various modifications may be made without deviating from the spirit and scope of the invention. Accordingly, the invention is not limited except as by the appended claims.

The application's sequence listing, which the Patent Office published only in electronic form, follows.

SEQUENCE LISTING (697 sequences)

SEQ ID NO: 1 - DNA, 16569 bp, Homo sapiens mitochondrial
  conflict 3107: "n" refers to a nucleotide at position 3107 of the Cambridge Reference Sequence (CRS, Anderson et al. 1981 Nature 290:457-465), later determined to be absent from the human mtDNA sequence according to the revised CRS (rCRS, Andrews et al. 1999Nature Genetics 23:147); "n" therefore represents a single nucleotide deletion.
gatcacaggtctatcaccctattaaccactcacgggagctctccatgcatttggtattttcgtctggggggtatgcacgcgatagcattgcgagacgctggagccggagcaccctatgtcgcagtatctgtctttgattcctgcctcatcctattatttatcgcacctacgttcaatattacaggcgaacatacttactaaagtgtgttaattaattaatgcttgtaggacataataataacaattgaatgtctgcacagccactttccacacagacatcataacaaaaaatttccaccaaaccccccctcccccgcttctggccacagcacttaaacacatctctgccaaaccccaaaaacaaagaaccctaacaccagcctaaccagatttcaaattttatcttttggcggtatgcacttttaacagtcaccccccaactaacacattattttcccctcccactcccatactactaatctcatcaatacaacccccgcccatcctacccagcacacacacaccgctgctaaccccataccccgaaccaaccaaaccccaaagacaccccccacagtttatgtagcttacctcctcaaagcaatacactgaaaatgtttagacgggctcacatcaccccataaacaaataggtttggtcctagcctttctattagctcttagtaagattacacatgcaagcatccccgttccagtgagttcaccctctaaatcaccacgatcaaaaggaacaagcatcaagcacgcagcaatgcagctcaaaacgcttagcctagccacacccccacgggaaacagcagtgattaacctttagcaataaacgaaagtttaactaagctatactaaccccagggttggtcaatttcgtgccagccaccgcggtcacacgattaacccaagtcaatagaagccggcgtaaagagtgttttagatcaccccctccccaataaagctaaaactcacctgagttgtaaaaaactccagttgacacaaaatagactacgaaagtggctttaacatatctgaacacacaatagctaagacccaaactgggattagataccccactatgcttagccctaaacctcaacagttaaatcaacaaaactgctcgccagaacactacgagccacagcttaaaactcaaaggacctggcggtgcttcatatccctctagaggagcctgttctgtaatcgataaaccccgatcaacctcaccacctcttgctcagcctatataccgccatcttcagcaaaccctgatgaaggctacaaagtaagcgcaagtacccacgtaaagacgttaggtcaaggtgtagcccatgaggtggcaagaaatgggctacattttctaccccagaaaactacgatagcccttatgaaacttaagggtcgaaggtggatttagcagtaaactaagagtagagtgcttagttgaacagggccctgaagcgcgtacacaccgcccgtcaccctcctcaagtatacttcaaaggacatttaactaaaacccctacgcatttatatagaggagacaagtcgtaacatggtaagtgtactggaaagtgcacttggacgaaccagagtgtagcttaacacaaagcacccaacttacacttaggagatttcaacttaacttgaccgctctgagctaaacctagccccaaacccactccaccttactaccagacaaccttagccaaaccatttacccaaataaagtataggcgatagaaattgaaacctggcgcaatagatatagtaccgcaagggaaagatgaaaaattataaccaagcataatatagcaaggactaacccctataccttctgcataatgaattaactagaaataactttgcaaggagagccaaagctaagacccccgaaaccagacgagctacctaagaacagctaaaagagcacacccgtctatgtagcaaaatagtgggaagatttataggtagaggcgacaaacctaccgagcctggtgatagctggttgtccaagatagaatcttagttcaactttaaatttgcccacagaaccctctaaatccccttgtaaatttaactgttagtccaaagaggaacagctctttggacactaggaaaaaaccttgtagagagagtaaaaaatttaacacccatagtaggcctaaaagcagccaccaattaagaaagcgttcaagctcaacacccactacctaaaaaatcccaaacatataactgaactcctcacacccaattggaccaatctatcaccctatagaagaactaatgttagtataagtaacatgaaaacattctcctccgcataagcctgcgtcagattaaaacactgaactgacaattaacagcccaatatctacaatcaaccaacaagtcattattaccctcactgtcaacccaacacaggcatgctcataaggaaaggttaaaaaaagtaaaaggaactcggcaaatcttaccccgcctgtttaccaaaaacatcacctctagcatcaccagtattagaggcaccgcctgcccagtgacacatgtttaacggccgcggtaccctaaccgtgcaaaggtagcataatcacttgttccttaaatagggacctgtatgaatggctccacgagggttcagctgtctcttacttttaaccagtgaaattgacctgcccgtgaagaggcgggcataacacagcaagacgagaagaccctatggagctttaatttattaatgcaaacagtacctaacaaacccacaggtcctaaactaccaaacctgcattaaaaatttcggttggggcgacctcggagcagaacccaacctccgagcagtacatgctaagacttcaccagtcaaagcgaactactatactcaattgatccaataacttgaccaacggaacaagttaccctagggataacagcgcaatcctattctagagtccatatcaacaatagggtttacgacctcgatgttggatcaggacatcccgatggtgcagccgctattaaaggttcgtttgttcaacgattaaagtcctacgtgatctgagttcagaccggagtaatccaggtcggtttctatctacnttcaaattcctccctgtacgaaaggacaagagaaataaggcctacttcacaaagcgccttcccccgtaaatgatatcatctcaacttagtattatacccacacccacccaagaacagggtttgttaagatggcagagcccggtaatcgcataaaacttaaaactttacagtcagaggttcaattcctcttcttaacaacatacccatggccaacctcctactcctcattgtacccattctaatcgcaatggcattcctaatgcttaccgaacgaaaaattctaggctatatacaactacgcaaaggccccaacgttgtaggcccctacgggctactacaacccttcgctgacgccataaaactcttcaccaaagagcccctaaaacccgccacatctaccatcaccctctacatcaccgccccgaccttagctctcaccatcgctcttctactatgaacccccctccccatacccaaccccctggtcaacctcaacctaggcctcctatttattctagccacctctagcctagccgtttactcaatcctctgatcagggtgagcatcaaactcaaactacgccctgatcggcgcactgcgagcagtagcccaaacaatctcatatgaagtcaccctagccatcattctactatcaacattactaataagtggctcctttaacctctccacccttatcacaacacaagaacacctctgattactcctgccatcatgacccttggccataatatgatttatctccacactagcagagaccaaccgaacccccttcgaccttgccgaaggggagtccgaactagtctcaggcttcaacatcgaatacgccgcaggccccttcgccctattcttcatagccgaatacacaaacattattataataaacaccctcaccactacaatcttcctaggaacaacatatgacgcactctcccctgaactctacacaacatattttgtcaccaagaccctacttctaacctccctgttcttatgaattcgaacagcatacccccgattccgctacgaccaactcatacacctcctatgaaaaaacttcctaccactcaccctagcattacttatatgatatgtctccatacccattacaatctccagcattccccctcaaacctaagaaatatgtctgataaaagagttactttgatagagtaaataataggagcttaaacccccttatttctaggactatgagaatcgaacccatccctgagaatccaaaattctccgtgccacctatcacaccccatcctaaagtaaggtcagctaaataagctatcgggcccataccccgaaaatgttggttatacccttcccgtactaattaatcccctggcccaacccgtcatctactctaccatctttgcaggcacactcatcacagcgctaagctcgcactgattttttacctgagtaggcctagaaataaacatgctagcttttattccagttctaaccaaaaaaataaaccctcgttccacagaagctgccatcaagtatttcctcacgcaagcaaccgcatccataatccttctaatagctatcctcttcaacaatatactctccggacaatgaaccataaccaatactaccaatcaatactcatcattaataatcataatagctatagcaataaaactaggaatagccccctttcacttctgagtcccagaggttacccaaggcacccctctgacatccggcctgcttcttctcacatgacaaaaactagcccccatctcaatcatataccaaatctctccctcactaaacgtaagccttctcctcactctctcaatcttatccatcatagcaggcagttgaggtggattaaaccaaacccagctacgcaaaatcttagcatactcctcaattacccacataggatgaataatagcagttctaccgtacaaccctaacataaccattcttaatttaactatttatattatcctaactactaccgcattcctactactcaacttaaactccagcaccacgaccctactactatctcgcacctgaaacaagctaacatgactaacacccttaattccatccaccctcctctccctaggaggcctgcccccgctaaccggctttttgcccaaatgggccattatcgaagaattcacaaaaaacaatagcctcatcatccccaccatcatagccaccatcaccctccttaacctctacttctacctacgcctaatctactccacctcaatcacactactccccatatctaacaacgtaaaaataaaatgacagtttgaacatacaaaacccaccccattcctccccacactcatcgcccttaccacgctactcctacctatctccccttttatactaataatcttatagaaatttaggttaaatacagaccaagagccttcaaagccctcagtaagttgcaatacttaatttctgtaacagctaaggactgcaaaaccccactctgcatcaactgaacgcaaatcagccactttaattaagctaagcccttactagaccaatgggacttaaacccacaaacacttagttaacagctaagcaccctaatcaactggcttcaatctacttctcccgccgccgggaaaaaaggcgggagaagccccggcaggtttgaagctgcttcttcgaatttgcaattcaatatgaaaatcacctcggagctggtaaaaagaggcctaacccctgtctttagatttacagtccaatgcttcactcagccattttacctcacccccactgatgttcgccgaccgttgactattctctacaaaccacaaagacattggaacactatacctattattcggcgcatgagctggagtcctaggcacagctctaagcctccttattcgagccgagctgggccagccaggcaaccttctaggtaacgaccacatctacaacgttatcgtcacagcccatgcatttgtaataatcttcttcatagtaatacccatcataatcggaggctttggcaactgactagttcccctaataatcggtgcccccgatatggcgtttccccgcataaacaacataagcttctgactcttacctccctctctcctactcctgctcgcatctgctatagtggaggccggagcaggaacaggttgaacagtctaccctcccttagcagggaactactcccaccctggagcctccgtagacctaaccatcttctccttacacctagcaggtgtctcctctatcttaggggccatcaatttcatcacaacaattatcaatataaaaccccctgccataacccaataccaaacgcccctcttcgtctgatccgtcctaatcacagcagtcctacttctcctatctctcccagtcctagctgctggcatcactatactactaacagaccgcaacctcaacaccaccttcttcgaccccgccggaggaggagaccccattctataccaacacctattctgatttttcggtcaccctgaagtttatattcttatcctaccaggcttcggaataatctcccatattgtaacttactactccggaaaaaaagaaccatttggatacataggtatggtctgagctatgatatcaattggcttcctagggtttatcgtgtgagcacaccatatatttacagtaggaatagacgtagacacacgagcatatttcacctccgctaccataatcatcgctatccccaccggcgtcaaagtatttagctgactcgccacactccacggaagcaatatgaaatgatctgctgcagtgctctgagccctaggattcatctttcttttcaccgtaggtggcctgactggcattgtattagcaaactcatcactagacatcgtactacacgacacgtactacgttgtagcccacttccactatgtcctatcaataggagctgtatttgccatcataggaggcttcattcactgatttcccctattctcaggctacaccctagaccaaacctacgccaaaatccatttcactatcatattcatcggcgtaaatctaactttcttcccacaacactttctcggcctatccggaatgccccgacgttactcggactaccccgatgcatacaccacatgaaacatcctatcatctgtaggctcattcatttctctaacagcagtaatattaataattttcatgatttgagaagccttcgcttcgaagcgaaaagtcctaatagtagaagaaccctccataaacctggagtgactatatggatgccccccaccctaccacacattcgaagaacccgtatacataaaatctagacaaaaaaggaaggaatcgaaccccccaaagctggtttcaagccaaccccatggcctccatgactttttcaaaaaggtattagaaaaaccatttcataactttgtcaaagttaaattataggctaaatcctatatatcttaatggcacatgcagcgcaagtaggtctacaagacgctacttcccctatcatagaagagcttatcacctttcatgatcacgccctcataatcattttccttatctgcttcctagtcctgtatgcccttttcctaacactcacaacaaaactaactaatactaacatctcagacgctcaggaaatagaaaccgtctgaactatcctgcccgccatcatcctagtcctcatcgccctcccatccctacgcatcctttacataacagacgaggtcaacgatccctcccttaccatcaaatcaattggccaccaatggtactgaacctacgagtacaccgactacggcggactaatcttcaactcctacatacttcccccattattcctagaaccaggcgacctgcgactccttgacgttgacaatcgagtagtactcccgattgaagcccccattcgtataataattacatcacaagacgtcttgcactcatgagctgtccccacattaggcttaaaaacagatgcaattcccggacgtctaaaccaaaccactttcaccgctacacgaccgggggtatactacggtcaatgctctgaaatctgtggagcaaaccacagtttcatgcccatcgtcctagaattaattcccctaaaaatctttgaaatagggcccgtatttaccctatagcaccccctctaccccctctagagcccactgtaaagctaacttagcattaaccttttaagttaaagattaagagaaccaacacctctttacagtgaaatgccccaactaaatactaccgtatggcccaccataattacccccatactccttacactattcctcatcacccaactaaaaatattaaacacaaactaccacctacctccctcaccaaagcccataaaaataaaaaattataacaaaccctgagaaccaaaatgaacgaaaatctgttcgcttcattcattgcccccacaatcctaggcctacccgccgcagtactgatcattctatttccccctctattgatccccacctccaaatatctcatcaacaaccgactaatcaccacccaacaatgactaatcaaactaacctcaaaacaaatgataaccatacacaacactaaaggacgaacctgatctcttatactagtatccttaatcatttttattgccacaactaacctcctcggactcctgcctcactcatttacaccaaccacccaactatctataaacctagccatggccatccccttatgagcgggcacagtgattataggctttcgctctaagattaaaaatgccctagcccacttcttaccacaaggcacacctacaccccttatccccatactagttattatcgaaaccatcagcctactcattcaaccaatagccctggccgtacgcctaaccgctaacattactgcaggccacctactcatgcacctaattggaagcgccaccctagcaatatcaaccattaaccttccctctacacttatcatcttcacaattctaattctactgactatcctagaaatcgctgtcgccttaatccaagcctacgttttcacacttctagtaagcctctacctgcacgacaacacataatgacccaccaatcacatgcctatcatatagtaaaacccagcccatgacccctaacaggggccctctcagccctcctaatgacctccggcctagccatgtgatttcacttccactccataacgctcctcatactaggcctactaaccaacacactaaccatataccaatgatggcgcgatgtaacacgagaaagcacataccaaggccaccacacaccacctgtccaaaaaggccttcgatacgggataatcctatttattacctcagaagtttttttcttcgcaggatttttctgagccttttaccactccagcctagcccctaccccccaattaggagggcactggcccccaacaggcatcaccccgctaaatcccctagaagtcccactcctaaacacatccgtattactcgcatcaggagtatcaatcacctgagctcaccatagtctaatagaaaacaaccgaaaccaaataattcaagcactgcttattacaattttactgggtctctattttaccctcctacaagcctcagagtacttcgagtctcccttcaccatttccgacggcatctacggctcaacattttttgtagccacaggcttccacggacttcacgtcattattggctcaactttcctcactatctgcttcatccgccaactaatatttcactttacatccaaacatcactttggcttcgaagccgccgcctgatactggcattttgtagatgtggtttgactatttctgtatgtctccatctattgatgagggtcttactcttttagtataaatagtaccgttaacttccaattaactagttttgacaacattcaaaaaagagtaataaacttcgccttaattttaataatcaacaccctcctagccttactactaataattattacattttgactaccacaactcaacggctacatagaaaaatccaccccttacgagtgcggcttcgaccctatatcccccgcccgcgtccctttctccataaaattcttcttagtagctattaccttcttattatttgatctagaaattgccctccttttacccctaccatgagccctacaaacaactaacctgccactaatagttatgtcatccctcttattaatcatcatcctagccctaagtctggcctatgagtgactacaaaaaggattagactgaaccgaattggtatatagtttaaacaaaacgaatgatttcgactcattaaattatgataatcatatttaccaaatgcccctcatttacataaatattatactagcatttaccatctcacttctaggaatactagtatatcgctcacacctcatatcctccctactatgcctagaaggaataatactatcgctgttcattatagctactctcataaccctcaacacccactccctcttagccaatattgtgcctattgccatactagtctttgccgcctgcgaagcagcggtgggcctagccctactagtctcaatctccaacacatatggcctagactacgtacataacctaaacctactccaatgctaaaactaatcgtcccaacaattatattactaccactgacatgactttccaaaaaacacataatttgaatcaacacaaccacccacagcctaattattagcatcatccctctactattttttaaccaaatcaacaacaacctatttagctgttccccaaccttttcctccgaccccctaacaacccccctcctaatactaactacctgactcctacccctcacaatcatggcaagccaacgccacttatccagtgaaccactatcacgaaaaaaactctacctctctatactaatctccctacaaatctccttaattataacattcacagccacagaactaatcatattttatatcttcttcgaaaccacacttatccccaccttggctatcatcacccgatgaggcaaccagccagaacgcctgaacgcaggcacatacttcctattctacaccctagtaggctcccttcccctactcatcgcactaatttacactcacaacaccctaggctcactaaacattctactactcactctcactgcccaagaactatcaaactcctgagccaacaacttaatatgactagcttacacaatagcttttatagtaaagatacctctttacggactccacttatgactccctaaagcccatgtcgaagcccccatcgctgggtcaatagtacttgccgcagtactcttaaaactaggcggctatggtataatacgcctcacactcattctcaaccccctgacaaaacacatagcctaccccttccttgtactatccctatgaggcataattataacaagctccatctgcctacgacaaacagacctaaaatcgctcattgcatactcttcaatcagccacatagccctcgtagtaacagccattctcatccaaaccccctgaagcttcaccggcgcagtcattctcataatcgcccacgggcttacatcctcattactattctgcctagcaaactcaaactacgaacgcactcacagtcgcatcataatcctctctcaaggacttcaaactctactcccactaatagctttttgatgacttctagcaagcctcgctaacctcgccttaccccccactattaacctactgggagaactctctgtgctagtaaccacgttctcctgatcaaatatcactctcctacttacaggactcaacatactagtcacagccctatactccctctacatatttaccacaacacaatggggctcactcacccaccacattaacaacataaaaccctcattcacacgagaaaacaccctcatgttcatacacctatcccccattctcctcctatccctcaaccccgacatcattaccgggttttcctcttgtaaatatagtttaaccaaaacatcagattgtgaatctgacaacagaggcttacgaccccttatttaccgagaaagctcacaagaactgctaactcatgcccccatgtctaacaacatggctttctcaacttttaaaggataacagctatccattggtcttaggccccaaaaattttggtgcaactccaaataaaagtaataaccatgcacactactataaccaccctaaccctgacttccctaattccccccatccttaccaccctcgttaaccctaacaaaaaaaactcatacccccattatgtaaaatccattgtcgcatccacctttattatcagtctcttccccacaacaatattcatgtgcctagaccaagaagttattatctcgaactgacactgagccacaacccaaacaacccagctctccctaagcttcaaactagactacttctccataatattcatccctgtagcattgttcgttacatggtccatcatagaattctcactgtgatatataaactcagacccaaacattaatcagttcttcaaatatctactcatcttcctaattaccatactaatcttagttaccgctaacaacctattccaactgttcatcggctgagagggcgtaggaattatatccttcttgctcatcagttgatgatacgcccgagcagatgccaacacagcagccattcaagcaatcctatacaaccgtatcggcgatatcggtttcatcctcgccttagcatgatttatcctacactccaactcatgagacccacaacaaatagcccttctaaacgctaatccaagcctcaccccactactaggcctcctcctagcagcagcaggcaaatcagcccaattaggtctccacccctgactcccctcagccatagaaggccccaccccagtctcagccctactccactcaagcactatagttgtagcaggaatcttcttactcatccgcttccaccccctagcagaaaatagcccactaatccaaactctaacactatgcttaggcgctatcaccactctgttcgcagcagtctgcgcccttacacaaaatgacatcaaaaaaatcgtagccttctccacttcaagtcaactaggactcataatagttacaatcggcatcaaccaaccacacctagcattcctgcacatctgtacccacgccttcttcaaagccatactatttatgtgctccgggtccatcatccacaaccttaacaatgaacaagatattcgaaaaataggaggactactcaaaaccatacctctcacttcaacctccctcaccattggcagcctagcattagcaggaatacctttcctcacaggtttctactccaaagaccacatcatcgaaaccgcaaacatatcatacacaaacgcctgagccctatctattactctcatcgctacctccctgacaagcgcctatagcactcgaataattcttctcaccctaacaggtcaacctcgcttccccacccttactaacattaacgaaaataaccccaccctactaaaccccattaaacgcctggcagccggaagcctattcgcaggatttctcattactaacaacatttcccccgcatcccccttccaaacaacaatccccctctacctaaaactcacagccctcgctgtcactttcctaggacttctaacagccctagacctcaactacctaaccaacaaacttaaaataaaatccccactatgcacattttatttctccaacatactcggattctaccctagcatcacacaccgcacaatcccctatctaggccttcttacgagccaaaacctgcccctactcctcctagacctaacctgactagaaaagctattacctaaaacaatttcacagcaccaaatctccacctccatcatcacctcaacccaaaaaggcataattaaactttacttcctctctttcttcttcccactcatcctaaccctactcctaatcacataacctattcccccgagcaatctcaattacaatatatacaccaacaaacaatgttcaaccagtaactactactaatcaacgcccataatcatacaaagcccccgcaccaataggatcctcccgaatcaaccctgacccctctccttcataaattattcagcttcctacactattaaagtttaccacaaccaccaccccatcatactctttcacccacagcaccaatcctacctccatcgctaaccccactaaaacactcaccaagacctcaacccctgacccccatgcctcaggatactcctcaatagccatcgctgtagtatatccaaagacaaccatcattccccctaaataaattaaaaaaactattaaacccatataacctcccccaaaattcagaataataacacacccgaccacaccgctaacaatcaatactaaacccccataaataggagaaggcttagaagaaaaccccacaaaccccattactaaacccacactcaacagaaacaaagcatacatcattattctcgcacggactacaaccacgaccaatgatatgaaaaaccatcgttgtatttcaactacaagaacaccaatgaccccaatacgcaaaactaaccccctaataaaattaattaaccactcattcatcgacctccccaccccatccaacatctccgcatgatgaaacttcggctcactccttggcgcctgcctgatcctccaaatcaccacaggactattcctagccatgcactactcaccagacgcctcaaccgccttttcatcaatcgcccacatcactcgagacgtaaattatggctgaatcatccgctaccttcacgccaatggcgcctcaatattctttatctgcctcttcctacacatcgggcgaggcctatattacggatcatttctctactcagaaacctgaaacatcggcattatcctcctgcttgcaactatagcaacagccttcataggctatgtcctcccgtgaggccaaatatcattctgaggggccacagtaattacaaacttactatccgccatcccatacattgggacagacctagttcaatgaatctgaggaggctactcagtagacagtcccaccctcacacgattctttacctttcacttcatcttgcccttcattattgcagccctagcaacactccacctcctattcttgcacgaaacgggatcaaacaaccccctaggaatcacctcccattccgataaaatcaccttccacccttactacacaatcaaagacgccctcggcttacttctcttccttctctccttaatgacattaacactattctcaccagacctcctaggcgacccagacaattataccctagccaaccccttaaacacccctccccacatcaagcccgaatgatatttcctattcgcctacacaattctccgatccgtccctaacaaactaggaggcgtccttgccctattactatccatcctcatcctagcaataatccccatcctccatatatccaaacaacaaagcataatatttcgcccactaagccaatcactttattgactcctagccgcagacctcctcattctaacctgaatcggaggacaaccagtaagctacccttttaccatcattggacaagtagcatccgtactatacttcacaacaatcctaatcctaataccaactatctccctaattgaaaacaaaatactcaaatgggcctgtccttgtagtataaactaatacaccagtcttgtaaaccggagatgaaaacctttttccaaggacaaatcagagaaaaagtctttaactccaccattagcacccaaagctaagattctaatttaaactattctctgttctttcatggggaagcagatttgggtaccacccaagtattgactcacccatcaacaaccgctatgtatttcgtacattactgccagccaccatgaatattgtacggtaccataaatacttgaccacctgtagtacataaaaacccaatccacatcaaaaccccctccccatgcttacaagcaagtacagcaatcaaccctcaactatcacacatcaactgcaactccaaagccacccctcacccactaggataccaacaaacctacccacccttaacagtacatagtacataaagccatttaccgtacatagcacattacagtcaaatcccttctcgtccccatggatgacccccctcagataggggtcccttgaccaccatcctccgtgaaatcaatatcccgcacaagagtgctactctcctcgctccgggcccataacacttgggggtagctaaagtgaactgtatccgacatctggttcctacttcagggtcataaagcctaaatagcccacacgttccccttaaataagacatcacgatg

SEQ ID NO: 2 - DNA, 16569 bp, Homo sapiens mitochondrial
  conflict 3107: "n" refers to a nucleotide at position 3107 of the Cambridge Reference Sequence (CRS, Anderson et al. 1981 Nature 290:457-465), later determined to be absent from the human mtDNA sequence according to the revised CRS (rCRS, Andrews et al. 1999Nature Genetics 23:147); "n" therefore represents a single nucleotide deletion at a position corresponding to  nucleotide 3107 of SEQ ID NO:1 as provided herein.
  misc_feature 16234: n = A,T,C or G
gatcacaggtctatcaccctattaaccactcacgggagctctccatgcatttggtattttcgtctggggggtgtgcacgcgatagcattgcgagacgctggagccggagcaccttatgtcgcagtatctgtctttgattcctgcctcatcctattatttatcgcacctacgttcaatattacaggcgaacatacttactaaagtgtgttaattaattaatgcttgtaggacataataataacaattgaatgtctgcacagccactttccacacagacatcataacaaaaaatttccaccaaaccccccctcccccgcttctggccacagcacttaaacacatctctgccaaaccccaaaaacaaagaaccctaacaccagcctaaccagatttcaaattttatcttttggcggtatgcacttttaacagtcaccccccaactaacacattattttcccctcccactcccatactactaatctcatcaatacaacccccgcccatcctacccagcacacacacaccgctgctaaccccataccccgaaccaaccaaaccccaaagacaccccccacagtttatgtagcttacctcctcaaagcaatacactgaaaatgtttagacgggctcacatcaccccataaacaaataggtttggtcctagcctttctattagctcttagtaagattacacatgcaagcatccccgttccagtgagttcaccctctaaatcaccacgatcaaaagggacaagcatcaagcacgcagcaatgcagctcaaaacgcttagcctagccacacccccacgggaaacagcagtgattaacctttagcaataaacgaaagtttaactaagctatactaaccccagggttggtcaatttcgtgccagccaccgcggtcacacgattaacccaagtcaatagaagccggcgtaaagagtgttttagatcaccccctccccaataaagctaaaactcacctgagttgtaaaaaactccagttgacacaaaatagactacgaaagtggctttaacatatctgaacacacaatagctaagacccaaactgggattagataccccactatgcttagccctaaacctcaacagttaaatcaacaaaactgctcgccagaacactacgagccacagcttaaaactcaaaggacctggcggtgcttcatacccctctagaggagcctgttctgtaatcgataaaccccgatcaacctcaccacctcttgctcagcctatataccgccatcttcagcaaaccctgatgaaggctacaaagtaagcgcaagtacccacgtaaagacgttaggtcaaggtgtagcccatgaggtggcaagaaatgggctacattttctaccccagaaaactacgatagcccttatgaaacttaagggtcgaaggtggatttagcagtaaactgagagtagagtgcttagttgaacagggccctgaagcgcgtacacaccgcccgtcaccctcctcaagtatacttcaaaggacatttaactaaaacccctacgcatttatatagaggagacaagtcgtaacatggtaagtgtactggaaagtgcacttggacgaaccagagtgtagcttaacacaaagcacccaacttacacttaggagatttcaacttaacttgaccgctctgagctaaacctagccccaaacccactccaccttactaccagacaaccttagccaaaccatttacccaaataaagtataggcgatagaaattgaaacctggcgcaatagatatagtaccgcaagggaaagatgaaaaattatagccaagcataatatagcaaggactaacccctataccttctgcataatgaattaactagaaataactttgcaaggagagccaaagctaagacccccgaaaccagacgagctacctaagaacagctaaaagagcacacccgtctatgtagcaaaatagtgggaagatttataggtagaggcgacaaacctaccgagcctggtgatagctggttgtccaagatagaatcttagttcaactttaaatttgcccacagaaccctctaaatccccttgtaaatttaactgttagtccaaagaggaacagctctttggacactaggaaaaaaccttgtagagagagtaaaaaatttaacacccatagtaggcctaaaagcagccaccaattaagaaagcgttcaagctcaacacccactacctaaaaaatcccaaacatataactgaactcctcacacccaattggaccaatctatcaccctatagaagaactaatgttagtataagtaacatgaaaacattctcctccgcataagcctgcgtcagattaaaacactgaactgacaattaacagcccaatatctacaatcaaccaacaagtcattattaccctcactgtcaacccaacacaggcatgctcataaggaaaggttaaaaaaagtaaaaggaactcggcaaatcttaccccgcctgtttaccaaaaacatcacctctagcatcaccagtattagaggcaccgcctgcccagtgacacatgtttaacggccgcggtaccctaaccgtgcaaaggtagcataatcacttgttccttaaatagggacctgtatgaatggctccacgagggttcagctgtctcttacttttaaccagtgaaattgacctgcccgtgaagaggcgggcatgacacagcaagacgagaagaccctatggagctttaatttattaatgcaaacagtacctaacaaacccacaggtcctaaactaccaaacctgcattaaaaatttcggttggggcgacctcggagcagaacccaacctccgagcagtacatgctaagacttcaccagtcaaagcgaactactatactcaattgatccaataacttgaccaacggaacaagttaccctagggataacagcgcaatcctattctagagtccatatcaacaatagggtttacgacctcgatgttggatcaggacatcccgatggtgcagccgctattaaaggttcgtttgttcaacgattaaagtcctacgtgatctgagttcagaccggagtaatccaggtcggtttctatctacnttcaaattcctccctgtacgaaaggacaagagaaataaggcctacttcacaaagcgccttcccccgtaaatgatatcatctcaacttagtattatacccacacccacccaagaacagggtttgttaagatggcagagcccggtaatcgcataaaacttaaaactttacagtcagaggttcaattcctcttcttaacaacatacccatggccaacctcctactcctcattgtacccattctaatcgcaatggcattcctaatgcttaccgaacgaaaaattctaggctatatacaactacgcaaaggccccaacgttgtaggcccctacgggctactacaacccttcgctgacgccataaaactcttcaccaaggagcccctaaaacccgccacatctaccatcaccctctacatcaccgccccgaccttagctctcaccatcgctcttctactatgaacccccctccccatacccaaccccctggtcaacctcaacctaggcctcctatttattctagccacctctagcctagccgtttactcaatcctctgatcagggtgagcatcaaactcaaactacgccctgatcggcgcactgcgagcagtagcccaaacaatctcatatgaagtcaccctagccatcattctactatcaacattactaataagtggctcctttaacctctccacccttatcacaacacaagaacacctctgattactcctgccatcatgacccttggccataatatgatttatctccacactagcagagaccaaccgaacccccttcgaccttgccgaaggggagtccgaactagtctcaggcttcaacatcgaatacgccgcaggccccttcgccctattcttcatagccgaatacacaaacattattataataaacaccctcaccactacaatcttcctaggaacaacatatgacgcactctcccctgaactctacacaacatattttgtcaccaagaccctacttctaacctccctgttcttatgaattcgaacagcatacccccgattccgctacgaccaactcatacacctcctatgaaaaaacttcctaccactcaccctagcattacttatatgatatgtctccatacccattacaatctccagcattccccctcaaacctaagaaatatgtctgataaaagagttactttgatagagtaaataataggagcttaaacccccttatttctaggactatgagaatcgaacccatccctgagaatccaaaattctccgtgccacctatcacaccccatcctaaagtaaggtcagctaaataagctatcgggcccataccccgaaaatgttggttatacccttcccgtactaattaatcccctggcccaacccgtcatctactctaccatctttgcaggcacactcatcacagcgctaagctcgcactgattttttacctgagtaggcctagaaataaacatgctagcttttattccagttctaaccaaaaaaataaaccctcgttccacagaagctgccatcaagtatttcctcacgcaagcaaccgcatccataatccttctaatagctatcctcttcaacaatatactctccggacaatgaaccataaccaatactaccaatcaatactcatcattaataatcataatggctatagcaataaaactaggaatagccccctttcacttctgagtcccagaggttacccaaggcacccctctgacatccggcctgcttcttctcacatgacaaaaactagcccccatctcaatcatataccaaatctctccctcactaaacgtaagccttctcctcactctctcaatcttatccatcatagcaggcagttgaggtggattaaaccaaacccagctacgcaaaatcttagcatactcctcaattacccacataggatgaataatagcagttctaccgtacaaccctaacataaccattcttaatttaactatttatattatcctaactactaccgcattcctactactcaacttaaactccagcaccacgaccctactactatctcgcacctgaaacaagctaacatgactaacacccttaattccatccaccctcctctccctaggaggcctgcccccgctaaccggctttttgcccaaatgggccattatcgaagaattcacaaaaaacaatagcctcatcatccccaccatcatagccaccatcaccctccttaacctctacttctacctacgcctaatctactccacctcaatcacactactccccatatctaacaacgtaaaaataaaatgacagtttgaacatacaaaacccaccccattcctccccacactcatcgcccttaccacgctactcctacctatctccccttttatactaataatcttatagaaatttaggttaaatacagaccaagagccttcaaagccctcagtaagttgcaatacttaatttctgtaacagctaaggactgcaaaaccccactctgcatcaactgaacgcaaatcagccactttaattaagctaagcccttactagaccaatgggacttaaacccacaaacacttagttaacagctaagcaccctaatcaactggcttcaatctacttctcccgccgccgggaaaaaaggcgggagaagccccggcaggtttgaagctgcttcttcgaatttgcaattcaatatgaaaatcacctcggagctggtaaaaagaggcctaacccctgtctttagatttacagtccaatgcttcactcagccattttacctcacccccactgatgttcgccgaccgttgactattctctacaaaccacaaagacattggaacactatacctattattcggcgcatgagctggagtcctaggcacagctctaagcctccttattcgagccgagctgggccagccaggcaaccttctaggtaacgaccacatctacaacgttatcgtcacagcccatgcatttgtaataatcttcttcatagtaatacccatcataatcggaggctttggcaactgactagttcccctaataatcggtgcccccgatatggcgtttccccgcataaacaacataagcttctgactcttacctccctctctcctactcctgctcgcatctgctatagtggaggccggagcaggaacaggttgaacagtctaccctcccttagcagggaactactcccaccctggagcctccgtagacctaaccatcttctccttacacctagcaggtgtctcctctatcttaggggccatcaatttcatcacaacaattatcaatataaaaccccctgccataacccaataccaaacgcccctcttcgtctgatccgtcctaatcacagcagtcctacttctcctatctctcccagtcctagctgctggcatcactatactactaacagaccgcaacctcaacaccaccttcttcgaccccgccggaggaggagaccccattctataccaacacctattctgatttttcggtcaccctgaagtttatattcttatcctaccaggcttcggaataatctcccatattgtaacttactactccggaaaaaaagaaccatttggatacataggtatggtctgagctatgatatcaattggcttcctagggtttatcgtgtgagcacaccatatatttacagtaggaatagacgtagacacacgagcatatttcacctccgctaccataatcatcgctatccccaccggcgtcaaagtatttagctgactcgccacactccacggaagcaatatgaaatgatctgctgcagtgctctgagccctaggattcatctttcttttcaccgtaggtggcctgactggcattgtattagcaaactcatcactagacatcgtactacacgacacgtactacgttgtagctcacttccactatgtcctatcaataggagctgtatttgccatcataggaggcttcattcactgatttcccctattctcaggctacaccctagaccaaacctacgccaaaatccatttcactatcatattcatcggcgtaaatctaactttcttcccacaacactttctcggcctatccggaatgccccgacgttactcggactaccccgatgcatacaccacatgaaacatcctatcatctgtaggctcattcatttctctaacagcagtaatattaataattttcatgatttgagaagccttcgcttcgaagcgaaaagtcctaatagtagaagaaccctccataaacctggagtgactatatggatgccccccaccctaccacacattcgaagaacccgtatacataaaatctagacaaaaaaggaaggaatcgaaccccccaaagctggtttcaagccaaccccatggcctccatgactttttcaaaaaggtattagaaaaaccatttcataactttgtcaaagttaaattataggctaaatcctatatatcttaatggcacatgcagcgcaagtaggtctacaagacgctacttcccctatcatagaagagcttatcacctttcatgatcacgccctcataatcattttccttatctgcttcctagtcctgtatgcccttttcctaacactcacaacaaaactaactaatactaacatctcagacgctcaggaaatagaaaccgtctgaactatcctgcccgccatcatcctagtcctcatcgccctcccatccctacgcatcctttacataacagacgaggtcaacgatccctcccttaccatcaaatcaattggccaccaatggtactgaacctacgagtacaccgactacggcggactaatcttcaactcctacatacttcccccattattcctagaaccaggcgacctgcgactccttgacgttgacaatcgagtagtactcccgattgaagcccccattcgtataataattacatcacaagacgtcttgcactcatgagctgtccccacattaggcttaaaaacagatgcaattcccggacgtctaaaccaaaccactttcaccgctacacgaccgggggtatactacggtcaatgctctgaaatctgtggagcaaaccacagtttcatgcccatcgtcctagaattaattcccctaaaaatctttgaaatagggcccgtatttaccctatagcaccccctctaccccctctagagcccactgtaaagctaacttagcattaaccttttaagttaaagattaagagaaccaacacctctttacagtgaaatgccccaactaaatactaccgtatggcccaccataattacccccatactccttacactattcctcatcacccaactaaaaatattaaacacaaactaccacctacctccctcaccaaagcccataaaaataaaaaattataacaaaccctgagaaccaaaatgaacgaaaatctgttcgcttcattcattgcccccacaatcctaggcctacccgccgcagtactgatcattctatttccccctctattgatccccacctccaaatatctcatcaacaaccgactaatcaccacccaacaatgactaatcaaactaacctcaaaacaaatgataaccatacacaacactaaaggacgaacctgatctcttatactagtatccttaatcatttttattgccacaactaacctcctcggactcctgcctcactcatttacaccaaccacccaactatctataaacctagccatggccatccccttatgagcgggcgcagtgattataggctttcgctctaagattaaaaatgccctagcccacttcttaccacaaggcacacctacaccccttatccccatactagttattatcgaaaccatcagcctactcattcaaccaatagccctggccgtacgcctaaccgctaacattactgcaggccacctactcatgcacctaattggaagcaccaccctagcaatatcaaccattaaccttccctctacacttatcatcttcacaattctaattctactgactatcctagaaatcgctgtcgccttaatccaagcctacgttttcacacttctagtaagcctctacctgcacgacaacacataatgacccaccaatcacatgcctatcatatagtaaaacccagcccatgacccctaacaggggccctctcagccctcctaatgacctccggcctagccatgtgatttcacttccactccataacgctcctcatactaggcctactaaccaacacactaaccatataccaatgatggcgcgatgtaacacgagaaagcacataccaaggccaccacacaccacctgtccaaaaaggccttcgatacgggataatcctatttattacctcagaagtttttttcttcgcaggatttttctgagccttttaccactccagcctagcccctaccccccaattaggagggcactggcccccaacaggcatcaccccgctaaatcccctagaagtcccactcctaaacacatccgtattactcgcatcaggagtatcaatcacctgagctcaccatagtctaatagaaaacaaccgaaaccaaataattcaagcactgctcattacaattttactgggtctctattttaccctcctacaagcctcagagtacttcgagtctcccttcaccatttccgacggcatctacggctcaacattttttgtagccacaggcttccacggacttcacgtcattattggctcaactttcctcactatctgcttcatccgccaactaatatttcactttacatccaaacatcactttggcttcgaagccgccgcctgatactggcattttgtagatgtggtttgactatttctgtatgtctccatctattgatgagggtcttactcttttagtataaatagtaccgttaacttccaattaactagttttgacaacattcaaaaaagagtaataaacttcgccttaattttaataatcaacaccctcctagccttactactaataattattacattttgactaccacaactcaacggctacatagaaaaatccaccccttacgagtgcggcttcgaccctatatcccccgcccgcgtccctttctccataaaattcttcttagtagctattaccttcttattatttgatctagaaattgccctccttttacccctaccatgagccctacaaacaactaacctgccactaatagttatgtcatccctcttattaatcatcatcctagccctaagtctggcctatgagtgactacaaaaaggattagactgagccgaattggtatatagtttaaacaaaacgaatgatttcgactcattaaattatgataatcatatttaccaaatgcccctcatttacataaatattatactagcatttaccatctcacttctaggaatactagtatatcgctcacacctcatgtcctccctactatgcctagaaggaataatactatcgctgttcattatagctactctcataaccctcaacacccactccctcttagccaatattgtgcctattgccatactagtctttgccgcctgcgaagcagcggtgggcctagccctactagtctcaatctccaacacatatggcctagactacgtacataacctaaacctactccaatgctaaaactaatcgtcccaacaattatattactaccactgacatgactttccaaaaaacacataatttgaatcaacacaaccacccacagcctaattattagcatcatccctctactattttttaaccaaatcaacaacaacctatttagctgttccccaaccttttcctccgaccccctaacaacccccctcctaatactaactacctgactcctgcccctcacaatcatggcaagccaacgccacttatccagtgaaccactatcacgaaaaaaactctacctctctatactaatctccctacaaatctccttaattataacattcacagccacagaactaatcatattttatatcttcttcgaaaccacacttatccccaccttggctatcatcacccgatgaggcaaccagccagaacgcctgaacgcaggcacatacttcctattctacaccctagtaggctcccttcccctactcatcgcactaatttacactcacaacaccctaggctcactaaacattctactactcaccctcactgcccaagaactatcaaactcctgagccaacaacttaatatgactagcttacacaatagcttttatagtaaagatacctctttacggactccacttatgactccctaaagcccatgtcgaagcccccatcgctgggtcaatagtacttgccgcagtactcttgaagctaggcggctatggtataatacgcctcacactcattctcaaccccctgacaaaacacatagcctaccccttccttgtactatccctatgaggcataattataacaagctccatctgcctacgacaaacagacctaaaatcgctcattgcatactcttcaatcagccacatagccctcgtagtaacagccattctcatccaaaccccctgaagcttcaccggcgcagtcattctcataatcgcccacggacttacatcctcattactattctgcctagcaaactcaaactacgaacgcactcacagtcgcatcataatcctctctcaaggacttcaaactctactcccactaatagctttttgatgacttctagcaagcctcgctaacctcgccttaccccccactattaacctactgggagaactctctgtgctagtaaccacattctcctgatcaaatatcactctcctacttacaggactcaacatactagtcacagccctatactccctctacatatttaccacaacacaatggggctcactcacccaccacattaacaacataaaaccctcattcacacgagaaaacaccctcatgttcatacacctatcccccattctcctcctatccctcaaccccgacatcattaccgggttttcctcttgtaaatatagtttaaccaaaacatcagattgtgaatctgacaacagaggcttacgaccccttatttaccgagaaagctcacaagaactgctaactcatgcccccatgtctaacaacatggctttctcaacttttaaaggataacagctatccattggtcttaggccccaagaattttggtgcaactccaaataaaagtaataaccatgcacactactataaccaccctaaccctaacttccctaattccccccatccttaccaccctcgttaaccctaacaaaaaaaactcatacccccattatgtaaaatccattgtcgcatccacctttattatcagtctcttccccacaacaatattcatgtgcctagaccaagaagttattatctcgaactgacactgagccacaacccaaacaacccagctctccctaagcttcaaactagactacttctccataatattcatccctgtagcattgttcgttacatggtccatcatagaattctcactgtgatatataaactcagacccaaacattaatcagttcttcaaatatctactcatcttcctaattaccatactaatcttagttaccgctaacaacctattccaactgttcatcggctgagagggcgtaggaattatatccttcttgctcatcagttgatgatacgcccgagcagatgccaacacagcagccattcaagcaatcctatacaaccgtatcggcgatatcggtttcatcctcgccttagcatgatttatcctacactccaactcatgagacccacaacaaatagcccttctaaacgccaatccaagcctcaccccactactaggcctcctcctagcagcagcaggcaaatcagcccaattaggtctccacccctgactcccctcagccatagaaggccccaccccagtctcagccctactccactcaagcactatagttgtagcaggaatcttcttactcatccgcttccaccccctagcagaaaatagcccactaatccaaactctaacactatgcttaggcgctatcaccactctgttcgcagcagtctgcgcccttacacaaaatgacatcaaaaaaatcgtagccttctccacttcaagtcaactaggactcataatagttacaatcggcatcaaccaaccacacctagcattcctgcacatctgtacccacgccttcttcaaagccatactatttatgtgctccgggtccatcatccacaaccttaacaatgaacaagatattcgaaaaataggaggactactcaaaaccatacctctcacttcaacctccctcaccattggcagcctagcattagcaggaatacctttcctcacaggtttctactccaaagaccacatcatcgaaaccgcaaacatatcatacacaaacgcctgagccctatctattactctcatcgctacctccctgacaagcgcctatagcactcgaataattcttctcaccctaacaggtcaacctcgcttccccacccttactaacattaacgaaaataaccccaccctactaaaccccattaaacgcctggcagccggaagcctattcgcaggatttctcattactaacaacatttcccccgcatcccccttccaaacaacaatccccctctacctaaaactcacagccctcgctgtcactttcctaggacttctaacagccctagacctcaactacctaaccaacaaacttaaaataaaatccccactatgcacattttatttctccaacatactcggattctaccctagcatcacacaccgcacaatcccctatctaggccttcttacgagccaaaacctgcccctactcctcctagacctaacctgactagaaaagctattacctaaaacaatttcacagcaccaaatctccacctccatcatcacctcaacccaaaaaggcataattaaactttacttcctctctttcttcttcccactcatcctaaccctactcctaatcacataacctattcccccgagcaatttcaattacaatatatacaccaacaaacaatgttcaaccagtaactactactaatcaacgcccataatcatacaaagcccccgcaccaataggatcctcccgaatcaaccctgacccctctccttcataaattattcagcttcctacactattaaagtttaccacaaccaccaccccatcatactctttcacccacagcaccaatcctacctccatcgctaaccccactaaaacactcaccaagacctcaacccctgacccccatgcctcaggatactcctcaatagccatcgctgtagtatatccaaagacaaccatcattccccctaaataaattaaaaaaactattaaacccatataacctcccccaaaattcagaataataacacacccgaccacaccgctaacaatcaatactaaacccccataaataggagaaggcttagaagaaaaccccacaaaccccattactaaacccacactcaacagaaacaaagcatacatcattattctcgcacggactacaaccacgaccaatgatatgaaaaaccatcgttgtatttcaactacaagaacaccaatgaccccaatacgcaaaattaaccccctaataaaattaattaaccactcactcatcgacctccccaccccatccaacatctccgcatgatgaaacttcggctcactccttggcgcctgcctgatcctccaaatcaccacaggactattcctagccatgcactactcaccagacgcctcaaccgccttttcatcaatcgcccacatcactcgagacgtaaattatggctgaatcatccgctaccttcacgccaatggcgcctcaatattctttatctgcctcttcctacacatcgggcgaggcctatattacggatcatttctctactcagaaacctgaaacatcggcattatcctcctgcttgcaactatagcaacagccttcataggctatgtcctcccgtgaggccaaatatcattctgaggggccacagtaattacaaacttactatccgccatcccatacattgggacagacctagttcaatgaatctgaggaggctactcagtagacagtcccaccctcacacgattctttacctttcacttcatcttgcccttcattattgcagccctagcagcactccacctcctattcttgcacgaaacgggatcaaacaaccccctaggaatcacctcccattccgataaaatcaccttccacccttactacacaatcaaagacgccctcggcttacttctcttccttctctccttaatgacattaacactattctcaccagacctcctaggcgacccagacaattataccctagccaaccccttaaacacccctccccacatcaagcccgaatgatatttcctattcgcctacacaattctccgatccgtccctaacaaactaggaggcgtccttgccctattactatccatcctcatcctagcaataatccccatcctccatatatccaaacaacaaagcataatatttcgcccactaagccaatcactttattgactcctagccgcagacctcctcattctaacctgaatcggaggacaaccagtaagctacccttttaccatcattggacaagtagcatccgtactatacttcacaacaatcctaatcctaataccaactatctccctaattgaaaacaaaatactcaaatgggcctgtccttgtagtataaactaatacaccagtcttgtaagccggagatgaaaacctttttccaaggacaaatcagagaaaaagtctttaactccaccattagcacccaaagctaagattctaatttaaactattctctgttctttcatggggaagcagatttgggtaccacccaagtattgactcacccatcaacaaccgctatgtatttcgtacattactgccagccaccatgaatattgtacggtaccataaatacttgaccacctgtagtacataaaaacccaatccacatcaaaaccccctccccatgcttacaagcaagtacagcaatcaacctccaactatcanacatcaactgcaactccaaagccacccctcacccactaggataccaacaaacctacccacccttaacagtacatagcacataaagccatttaccgtacatagcacattacagtcaaatcccttctcgtccccatggatgacccccctcagataggggtcccttgaccaccatcctccgtgaaatcaatatcccgcacaagagtgctactctcctcgctccgggcccataacacttgggggtagctaaagtgaactgtatccgacatctggttcctacttcagggccataaagcctaaatagcccacacgttccccttaaataagacatcacgatg

SEQ ID NO: 3 - DNA, 16569 bp, Homo sapiens mitochondrial
  3107: "n" refers to a nucleotide at position 3107 of the Cambridge Reference Sequence (CRS, Anderson et al. 1981 Nature 290:457-465), later determined to be absent from the human mtDNA sequence according to the revised CRS (rCRS, Andrews et al. 1999 Nature Genetics 23:147); "n" therefore represents a single nucleotide deletion at a position corresponding to nucleotide 3107 of SEQ ID NO:1 as provided herein.
gatcacaggtctatcaccctattaaccactcacgggagctctccatgcatttggtattttcgtctggggggtatgcacgcgatagcattgcgagacgctggagccggagcaccctatgtcgcagtatctgtctttgattcctgcctcatcctattatttatcgcacctacgttcaatattacaggcgaacatacttactaaagtgtgttaattaattaatgcttgtaggacataataataacaattgaatgtctgcacagccactttccacacagacatcataacaaaaaatttccaccaaaccccccctcccccgcttctggccacagcacttaaacacatctctgccaaaccccaaaaacaaagaaccctaacaccagcctaaccagatttcaaattttatcttttggcggtatgcacttttaacagtcaccccccaactaacacattattttcccctcccactcccatactactaatctcatcaatacaacccccgcccatcctacccagcacacacacaccgctgctaaccccataccccgaaccaaccaaaccccaaagacaccccccacagtttatgtagcttacctcctcaaagcaatacactgaaaatgtttagacgggctcacatcaccccataaacaaataggtttggtcctagcctttctattagctcttagtaagattacacatgcaagcatccccgttccagtgagttcaccctctaaatcaccacgatcaaaaggaacaagcatcaagcacgcagcaatgcagctcaaaacgcttagcctagccacacccccacgggaaacagcagtgattaacctttagcaataaacgaaagtttaactaagctatactaaccccagggttggtcaatttcgtgccagccaccgcggtcacacgattaacccaagtcaatagaagccggcgtaaagagtgttttagatcaccccctccccaataaagctaaaactcacctgagttgtaaaaaactccagttgacacaaaatagactacgaaagtggctttaacatatctgaacacacaatagctaagacccaaactgggattagataccccactatgcttagccctaaacctcaacagttaaatcaacaaaactgctcgccagaacactacgagccacagcttaaaactcaaaggacctggcggtgcttcatatccctctagaggagcctgttctgtaatcgataaaccccgatcaacctcaccacctcttgctcagcctatataccgccatcttcagcaaaccctgatgaaggctacaaagtaagcgcaagtacccacgtaaagacgttaggtcaaggtgtagcccatgaggtggcaagaaatgggctacattttctaccccagaaaactacgatagcccttatgaaacttaagggtcgaaggtggatttagcagtaaactgagagtagagtgcttagttgaacagggccctgaagcgcgtacacaccgcccgtcaccctcctcaagtatacttcaaaggacatttaactaaaacccctacgcatttatatagaggagacaagtcgtaacatggtaagtgtactggaaagtgcacttggacgaaccagagtgtagcttaacacaaagcacccaacttacacttaggagatttcaacttaacttgaccgctctgagctaaacctagccccaaacccactccaccttactaccagacaaccttagccaaaccatttacccaaataaagtataggcgatagaaattgaaacctggcgcaatagatatagtaccgcaagggaaagatgaaaaattataaccaagcataatatagcaaggactaacccctataccttctgcataatgaattaactagaaataactttgcaaggagagccaaagctaagacccccgaaaccagacgagctacctaagaacagctaaaagagcacacccgtctatgtagcaaaatagtgggaagatttataggtagaggcgacaaacctaccgagcctggtgatagctggttgtccaagatagaatcttagttcaactttaaatttgcccacagaaccctctaaatccccttgtaaatttaactgttagtccaaagaggaacagctctttggacactaggaaaaaaccttgtagagagagtaaaaaatttaacacccatagtaggcctaaaagcagccaccaattaagaaagcgttcaagctcaacacccactacctaaaaaatcccaaacatataactgaactcctcacacccaattggaccaatctatcaccctatagaagaactaatgttagtataagtaacatgaaaacattctcctccgcataagcctgcgtcagattaaaacactgaactgacaattaacagcccaatatctacaatcaaccaacaagtcattattaccctcactgtcaacccaacacaggcatgctcataaggaaaggttaaaaaaagtaaaaggaactcggcaaatcttaccccgcctgtttaccaaaaacatcacctctagcatcaccagtattagaggcaccgcctgcccagtgacacatgtttaacggccgcggtaccctaaccgtgcaaaggtagcataatcacttgttccttaaatagggacctgtatgaatggctccacgagggttcagctgtctcttacttttaaccagtgaaattgacctgcccgtgaagaggcgggcataacacagcaagacgagaagaccctatggagctttaatttattaatgcaaacagtacctaacaaacccacaggtcctaaactaccaaacctgcattaaaaatttcggttggggcgacctcggagcagaacccaacctccgagcagtacatgctaagacttcaccagtcaaagcgaactactatactcaattgatccaataacttgaccaacggaacaagttaccctagggataacagcgcaatcctattctagagtccatatcaacaatagggtttacgacctcgatgttggatcaggacatcccgatggtgcagccgctattaaaggttcgtttgttcaacgattaaagtcctacgtgatctgagttcagaccggagtaatccaggtcggtttctatctacnttcaaattcctccctgtacgaaaggacaagagaaataaggcctacttcacaaagcgccttcccccgtaaatgatatcatctcaacttagtattatacccacacccacccaagaacagggtttgttaagatggcagagcccggtaatcgcataaaacttaaaactttacagtcagaggttcaattcctcttcttaacaacatacccatggccaacctcctactcctcattgtacccattctaatcgcaatggcattcctaatgcttaccgaacgaaaaattctaggctatatacaactacgcaaaggccccaacgttgtaggcccctacgggctactacaacccttcgctgacgccataaaactcttcaccaaagagcccctaaaacccgccacatctaccatcaccctctacatcaccgccccgaccttagctctcaccatcgctcttctactatgaacccccctccccatacccaaccccctggtcaacctcaacctaggcctcctatttattctagccacctctagcctagccgtttactcaatcctctgatcagggtgagcatcaaactcaaactacgccctgatcggcgcactgcgagcagtagcccaaacaatctcatatgaagtcaccctagccatcattctactatcaacattactaataagtggctcctttaacctctccacccttatcacaacacaagaacacctctgattactcctgccatcatgacccttggccataatatgatttatctccacactagcagagaccaaccgaacccccttcgaccttgccgaaggggagtccgaactagtctcaggcttcaacatcgaatacgccgcaggccccttcgccctattcttcatagccgaatacacaaacattattataataaacaccctcaccactacaatcttcctaggaacaacatatgacgcactctcccctgaactctacacaacatattttgtcaccaagaccctacttctaacctccctgttcttatgaattcgaacagcatacccccgattccgctacgaccaactcatacacctcctatgaaaaaacttcctaccactcaccctagcattacttatatgatatgtctccatacccattacaatctccagcattccccctcaaacctaagaaatatgtctgataaaagagttactttgatagagtaaataataggagcttaaacccccttatttctaggactatgagaatcgaacccatccctgagaatccaaaattctccgtgccacctatcacaccccatcctaaagtaaggtcagctaaataagctatcgggcccataccccgaaaatgttggttatacccttcccgtactaattaatcccctggcccaacccgtcatctactctaccatctttgcaggcacactcatcacagcgctaagctcgcactgattttttacctgagtaggcctagaaataaacatgctagcttttattccagttctaaccaaaaaaataaaccctcgttccacagaagctgccatcaagtatttcctcacgcaagcaaccgcatccataatccttctaatagctatcctcttcaacaatatactctccggacaatgaaccataaccaatactaccaatcaatactcatcattaataatcataatggctatagcaataaaactaggaatagccccctttcacttctgagtcccagaggttacccaaggcacccctctgacatccggcctgcttcttctcacatgacaaaaactagcccccatctcaatcatataccaaatctctccctcactaaacgtaagccttctcctcactctctcaatcttatccatcatagcaggcagttgaggtggattaaaccaaacccagctacgcaaaatcttagcatactcctcaattacccacataggatgaataatagcagttctaccgtacaaccctaacataaccattcttaatttaactatttatattatcctaactactaccgcattcctactactcaacttaaactccagcaccacgaccctactactatctcgcacctgaaacaagctaacatgactaacacccttaattccatccaccctcctctccctaggaggcctgcccccgctaaccggctttttgcccaaatgggccattatcgaagaattcacaaaaaacaatagcctcatcatccccaccatcatagccaccatcaccctccttaacctctacttctacctacgcctaatctactccacctcaatcacactactccccatatctaacaacgtaaaaataaaatgacagtttgaacatacaaaacccaccccattcctccccacactcatcgcccttaccacgctactcctacctatctccccttttatactaataatcttatagaaatttaggttaaatacagaccaagagccttcaaagccctcagtaagttgcaatacttaatttctgtaacagctaaggactgcaaaaccccactctgcatcaactgaacgcaaatcagccactttaattaagctaagcccttactagaccaatgggacttaaacccacaaacacttagttaacagctaagcaccctaatcaactggcttcaatctacttctcccgccgccgggaaaaaaggcgggagaagccccggcaggtttgaagctgcttcttcgaatttgcaattcaatatgaaaatcacctcggagctggtaaaaagaggcctaacccctgtctttagatttacagtccaatgcttcactcagccattttacctcacccccactgatgttcgccgaccgttgactattctctacaaaccacaaagacattggaacactatacctattattcggcgcatgagctggagtcctaggcacagctctaagcctccttattcgagccgagctgggccagccaggcaaccttctaggtaacgaccacatctacaacgttatcgtcacagcccatgcatttgtaataatcttcttcatagtaatacccatcataatcggaggctttggcaactgactagttcccctaataatcggtgcccccgatatggcgtttccccgcataaacaacataagcttctgactcttacctccctctctcctactcctgctcgcatctgctatagtggaggccggagcaggaacaggttgaacagtctaccctcccttagcagggaactactcccaccctggagcctccgtagacctaaccatcttctccttacacctagcaggtgtctcctctatcttaggggccatcaatttcatcacaacaattatcaatataaaaccccctgccataacccaataccaaacgcccctcttcgtctgatccgtcctaatcacagcagtcctacttctcctatctctcccagtcctagctgctggcatcactatactactaacagaccgcaacctcaacaccaccttcttcgaccccgccggaggaggagaccccattctataccaacacctattctgatttttcggtcaccctgaagtttatattcttatcctaccaggcttcggaataatctcccatattgtaacttactactccggaaaaaaagaaccatttggatacataggtatggtctgagctatgatatcaattggcttcctagggtttatcgtgtgagcacaccatatatttacagtaggaatagacgtagacacacgagcatatttcacctccgctaccataatcatcgctatccccaccggcgtcaaagtatttagctgactcgccacactccacggaagcaatatgaaatgatctgctgcagtgctctgagccctaggattcatctttcttttcaccgtaggtggcctgactggcattgtattagcaaactcatcactagacatcgtactacacgacacgtactacgttgtagcccacttccactatgtcctatcaataggagctgtatttgccatcataggaggcttcattcactgatttcccctattctcaggctacaccctagaccaaacctacgccaaaatccatttcactatcatattcatcggcgtaaatctaactttcttcccacaacactttctcggcctatccggaatgccccgacgttactcggactaccccgatgcatacaccacatgaaacatcctatcatctgtaggctcattcatttctctaacagcagtaatattaataattttcatgatttgagaagccttcgcttcgaagcgaaaagtcctaatagtagaagaaccctccataaacctggagtgactatatggatgccccccaccctaccacacattcgaagaacccgtatacataaaatctagacaaaaaaggaaggaatcgaaccccccaaagctggtttcaagccaaccccatggcctccatgactttttcaaaaaggtattagaaaaaccatttcataactttgtcaaagttaaattataggctaaatcctatatatcttaatggcacatgcagcgcaagtaggtctacaagacgctacttcccctatcatagaagagcttatcacctttcatgatcacgccctcataatcattttccttatctgcttcctagtcctgtatgcccttttcctaacactcacaacaaaactaactaatactaacatctcagacgctcaggaaatagaaaccgtctgaactatcctgcccgccatcatcctagtcctcatcgccctcccatccctacgcatcctttacataacagacgaggtcaacgatccctcccttaccatcaaatcaattggccaccaatggtactgaacctacgagtacaccgactacggcggactaatcttcaactcctacatacttcccccattattcctagaaccaggcgacctgcgactccttgacgttgacaatcgagtagtactcccgattgaagcccccattcgtataataattacatcacaagacgtcttgcactcatgagctgtccccacattaggcttaaaaacagatgcaattcccggacgtctaaaccaaaccactttcaccgctacacgaccgggggtatactacggtcaatgctctgaaatctgtggagcaaaccacagtttcatgcccatcgtcctagaattaattcccctaaaaatctttgaaatagggcccgtatttaccctatagcaccccctctaccccctctagagcccactgtaaagctaacttagcattaaccttttaagttaaagattaagagaaccaacacctctttacagtgaaatgccccaactaaatactaccgtatggcccaccataattacccccatactccttacactattcctcatcacccaactaaaaatattaaacacaaactaccacctacctccctcaccaaagcccataaaaataaaaaattataacaaaccctgagaaccaaaatgaacgaaaatctgttcgcttcattcattgcccccacaatcctaggcctacccgccgcagtactgatcattctatttccccctctattgatccccacctccaaatatctcatcaacaaccgactaatcaccacccaacaatgactaatcaaactaacctcaaaacaaatgataaccatacacaacactaaaggacgaacctgatctcttatactagtatccttaatcatttttattgccacaactaacctcctcggactcctgcctcactcatttacaccaaccacccaactatctataaacctagccatggccatccccttatgagcgggcacagtgattataggctttcgctctaagattaaaaatgccctagcccacttcttaccacaaggcacacctacaccccttatccccatactagttattatcgaaaccatcagcctactcattcaaccaatagccctggccgtacgcctaaccgctaacattactgcaggccacctactcatgcacctaattggaagcgccaccctagcaatatcaaccattaaccttccctctacacttatcatcttcacaattctaattctactgactatcctagaaatcgctgtcgccttaatccaagcctacgttttcacacttctagtaagcctctacctgcacgacaacacataatgacccaccaatcacatgcctatcatatagtaaaacccagcccatgacccctaacaggggccctctcagccctcctaatgacctccggcctagccatgtgatttcacttccactccataacgctcctcatactaggcctactaaccaacacactaaccatataccaatgatggcgcgatgtaacacgagaaagcacataccaaggccaccacacaccacctgtccaaaaaggccttcgatacgggataatcctatttattacctcagaagtttttttcttcgcaggatttttctgagccttttaccactccagcctagcccctaccccccaattaggagggcactggcccccaacaggcatcaccccgctaaatcccctagaagtcccactcctaaacacatccgtattactcgcatcaggagtatcaatcacctgagctcaccatagtctaatagaaaacaaccgaaaccaaataattcaagcactgcttattacaattttactgggtctctattttaccctcctacaagcctcagagtacttcgagtctcccttcaccatttccgacggcatctacggctcaacattttttgtagccacaggcttccacggacttcacgtcattattggctcaactttcctcactatctgcttcatccgccaactaatatttcactttacatccaaacatcactttggcttcgaagccgccgcctgatactggcattttgtagatgtggtttgactatttctgtatgtctccatctattgatgagggtcttactcttttagtataaatagtaccgttaacttccaattaactagttttgacaacattcaaaaaagagtaataaacttcgccttaattttaataatcaacaccctcctagccttactactaataattattacattttgactaccacaactcaacggctacatagaaaaatccaccccttacgagtgcggcttcgaccctatatcccccgcccgcgtccctttctccataaaattcttcttagtagctattaccttcttattatttgatctagaaattgccctccttttacccctaccatgagccctacaaacaactaacctgccactaatagttatgtcatccctcttattaatcatcatcctagccctaagtctggcctatgagtgactacaaaaaggattagactgaaccgaattggtatatagtttaaacaaaacgaatgatttcgactcattaaattatgataatcatatttaccaaatgcccctcatttacataaatattatactagcatttaccatctcacttctaggaatactagtatatcgctcacacctcatatcctccctactatgcctagaaggaataatactatcgctgttcattatagctactctcataaccctcaacacccactccctcttagccaatattgtgcctattgccatactagtctttgccgcctgcgaagcagcggtgggcctagccctactagtctcaatctccaacacatatggcctagactacgtacataacctaaacctactccaatgctaaaactaatcgtcccaacaattatattactaccactgacatgactttccaaaaaacacataatttgaatcaacacaaccacccacagcctaattattagcatcatccctctactattttttaaccaaatcaacaacaacctatttagctgttccccaaccttttcctccgaccccctaacaacccccctcctaatactaactacctgactcctacccctcacaatcatggcaagccaacgccacttatccaatgaaccactatcacgaaaaaaactctacctctctatactaatctccctacaaatctccttaattataacattcacagccacagaactaatcatattttatatcttcttcgaaaccacacttatccccaccttggctatcatcacccgatgaggcaaccagccagaacgcctgaacgcaggcacatacttcctattctacaccctagtaggctcccttcccctactcatcgcactaatttacactcacaacaccctaggctcactaaacattctactactcactctcactgcccaagaactatcaaactcctgagccaacaacttaatatgactagcttacacaatagcttttatagtaaagatacctctttacggactccacttatgactccctaaagcccatgtcgaagcccccatcgctgggtcaatagtacttgccgcagtactcttaaaactaggcggctatggtataatacgcctcacactcattctcaaccccctgacaaaacacatagcctaccccttccttgtactatccctatgaggcataattataacaagctccatctgcctacgacaaacagacctaaaatcgctcattgcatactcttcaatcagccacatagccctcgtagtaacagccattctcatccaaaccccctgaagcttcaccggcgcagtcattctcataatcgcccacgggcttacatcctcattactattctgcctagcaaactcaaactacgaacgcactcacagtcgcatcataatcctctctcaaggacttcaaactctactcccactaatagctttttgatgacttctagcaagcctcgctaacctcgccttaccccccactattaacctactgggagaactctctgtgctagtaaccacgttctcctgatcaaatatcactctcctacttacaggactcaacatactagtcacagccctatactccctctacatatttaccacaacacaatggggctcactcacccaccacattaacaacataaaaccctcattcacacgagaaaacaccctcatgttcatacacctatcccccattctcctcctatccctcaaccccgacatcattaccgggttttcctcttgtaaatatagtttaaccaaaacatcagattgtgaatctgacaacagaggcttacgaccccttatttaccgagaaagctcacaagaactgctaactcatgcccccatgtctaacaacatggctttctcaacttttaaaggataacagctatccattggtcttaggccccaaaaattttggtgcaactccaaataaaagtaataaccatgcacactactataaccaccctaaccctgacttccctaattccccccatccttaccaccctcgttaaccctaacaaaaaaaactcatacccccattatgtaaaatccattgtcgcatccacctttattatcagtctcttccccacaacaatattcatgtgcctagaccaagaagttattatctcgaactgacactgagccacaacccaaacaacccagctctccctaagcttcaaactagactacttctccataatattcatccctgtagcattgttcgttacatggtccatcatagaattctcactgtgatatataaactcagacccaaacattaatcagttcttcaaatatctactcatcttcctaattaccatactaatcttagttaccgctaacaacctattccaactgttcatcggctgagagggcgtaggaattatatccttcttgctcatcagttgatgatacgcccgagcagatgccaacacagcagccattcaagcaatcctatacaaccgtatcggcgatatcggtttcatcctcgccttagcatgatttatcctacactccaactcatgagacccacaacaaatagcccttctaaacgctaatccaagcctcaccccactactaggcctcctcctagcagcagcaggcaaatcagcccaattaggtctccacccctgactcccctcagccatagaaggccccaccccagtctcagccctactccactcaagcactatagttgtagcaggaatcttcttactcatccgcttccaccccctagcagaaaatagcccactaatccaaactctaacactatgcttaggcgctatcaccactctgttcgcagcagtctgcgcccttacacaaaatgacatcaaaaaaatcgtagccttctccacttcaagtcaactaggactcataatagttacaatcggcatcaaccaaccacacctagcattcctgcacatctgtacccacgccttcttcaaagccatactatttatgtgctccgggtccatcatccacaaccttaacaatgaacaagatattcgaaaaataggaggactactcaaaaccatacctctcacttcaacctccctcaccattggcagcctagcattagcaggaatacctttcctcacaggtttctactccaaagaccacatcatcgaaaccgcaaacatatcatacacaaacgcctgagccctatctattactctcatcgctacctccctgacaagcgcctatagcactcgaataattcttctcaccctaacaggtcaacctcgcttccccacccttactaacattaacgaaaataaccccaccctactaaaccccattaaacgcctggcagccggaagcctattcgcaggatttctcattactaacaacatttcccccgcatcccccttccaaacaacaatccccctctacctaaaactcacagccctcgctgtcactttcctaggacttctaacagccctagacctcaactacctaaccaacaaacttaaaataaaatccccactatgcacattttatttctccaacatactcggattctaccctagcatcacacaccgcacaatcccctatctaggccttcttacgagccaaaacctgcccctactcctcctagacctaacctgactagaaaagctattacctaaaacaatttcacagcaccaaatctccacctccatcatcacctcaacccaaaaaggcataattaaactttacttcctctctttcttcttcccactcatcctaaccctactcctaatcacataacctattcccccgagcaatctcaattacaatatatacaccaacaaacaatgttcaaccagtaactactactaatcaacgcccataatcatacaaagcccccgcaccaataggatcctcccgaatcaaccctgacccctctccttcataaattattcagcttcctacactattaaagtttaccacaaccaccaccccatcatactctttcacccacagcaccaatcctacctccatcgctaaccccactaaaacactcaccaagacctcaacccctgacccccatgcctcaggatactcctcaatagccatcgctgtagtatatccaaagacaaccatcattccccctaaataaattaaaaaaactattaaacccatataacctcccccaaaattcagaataataacacacccgaccacaccgctaacaatcaatactaaacccccataaataggagaaggcttagaagaaaaccccacaaaccccattactaaacccacactcaacagaaacaaagcatacatcattattctcgcacggactacaaccacgaccaatgatatgaaaaaccatcgttgtatttcaactacaagaacaccaatgaccccaatacgcaaaactaaccccctaataaaattaattaaccactcattcatcgacctccccaccccatccaacatctccgcatgatgaaacttcggctcactccttggcgcctgcctgatcctccaaatcaccacaggactattcctagccatgcactactcaccagacgcctcaaccgccttttcatcaatcgcccacatcactcgagacgtaaattatggctgaatcatccgctaccttcacgccaatggcgcctcaatattctttatctgcctcttcctacacatcgggcgaggcctatattacggatcatttctctactcagaaacctgaaacatcggcattatcctcctgcttgcaactatagcaacagccttcataggctatgtcctcccgtgaggccaaatatcattctgaggggccacagtaattacaaacttactatccgccatcccatacattgggacagacctagttcaatgaatctgaggaggctactcagtagacagtcccaccctcacacgattctttacctttcacttcatcttgcccttcattattgcagccctagcagcactccacctcctattcttgcacgaaacgggatcaaacaaccccctaggaatcacctcccattccgataaaatcaccttccacccttactacacaatcaaagacgccctcggcttacttctcttccttctctccttaatgacattaacactattctcaccagacctcctaggcgacccagacaattataccctagccaaccccttaaacacccctccccacatcaagcccgaatgatatttcctattcgcctacacaattctccgatccgtccctaacaaactaggaggcgtccttgccctattactatccatcctcatcctagcaataatccccatcctccatatatccaaacaacaaagcataatatttcgcccactaagccaatcactttattgactcctagccgcagacctcctcattctaacctgaatcggaggacaaccagtaagctacccttttaccatcattggacaagtagcatccgtactatacttcacaacaatcctaatcctaataccaactatctccctaattgaaaacaaaatactcaaatgggcctgtccttgtagtataaactaatacaccagtcttgtaaaccggagatgaaaacctttttccaaggacaaatcagagaaaaagtctttaactccaccattagcacccaaagctaagattctaatttaaactattctctgttctttcatggggaagcagatttgggtaccacccaagtattgactcacccatcaacaaccgctatgtatttcgtacattactgccagccaccatgaatattgtacggtaccataaatacttgaccacctgtagtacataaaaacccaatccacatcaaaaccccctccccatgcttacaagcaagtacagcaatcaaccctcaactatcacacatcaactgcaactccaaagccacccctcacccactaggataccaacaaacctacccacccttaacagtacatagtacataaagccatttaccgtacatagcacattacagtcaaatcccttctcgtccccatggatgacccccctcagataggggtcccttgaccaccatcctccgtgaaatcaatatcccgcacaagagtgctactctcctcgctccgggcccataacacttgggggtagctaaagtgaactgtatccgacatctggttcctacttcagggccataaagcctaaatagcccacacgttccccttaaataagacatcacgatg

SEQ ID NO: 4 - DNA, 16570 bp, Homo sapiens mitochondrial
  3108: "n" refers to a nucleotide at position 3107 of the Cambridge Reference Sequence (CRS, Anderson et al. 1981 Nature 290:457-465), later determined to be absent from the human mtDNA sequence according to the revised CRS (rCRS, Andrews et al. 1999 Nature Genetics 23:147); "n" therefore represents a single nucleotide deletion at a position corresponding to nucleotide 3107 of SEQ ID NO:1 as provided herein.
gatcacaggtctatcaccctattaaccactcacgggagctctccatgcatttggtattttcgtctggggggtgtgcacgcgatagcattgcgagacgctggagccggagcaccctatgtcgcagtatctgtctttgattcctgccccatcccattatttatcgcacctacgttcaatattacaggcgaacatacttactaaagtgtgttaattaattaatgcttgtaggacataataataacaattgaatgtctgcacagccgctttccacacagacatcataacaaaaaatttccaccaaaccccccctcccccgccttctggccacagcacttaaacacatctctgccaaaccccaaaaacaaagaaccctaacaccagcctaaccagatttcaaattttatcttttggcggtatgcacttttaacagtcaccccccaactaacacattattttcccctcccactcccatactactaatctcatcaatacaacccccgcccatcctacccagcacacacacaccgctgctaaccccataccccgaaccaaccaaaccccaaagacaccccccacagtttatgtagcttacctcctcaaagcaatacactgaaaatgtttagacgggctcacatcaccccataaacaaataggtttggtcctagcctttctattagctcttagtaagattacacatgcaagcatccccattccagtgagttcaccctctaaatcaccacgatcaaaagggacaagcatcaagcacgcagcaatgcagctcaaaacgcttagcctagccacacccccacgggaaacagcagtgattaacctttagcaataaacgaaagtttaactaagctatactaaccccagggttggtcaatttcgtgccagccaccgcggtcacacgattaacccaagtcaatagaagccggcgtaaagagtgttttagatcaccccctccccaataaagctaaaactcacctgagttgtaaaaaactccagttgacacaaaatagactacgaaagtggctttaacatatctgaacacacaatagctaagacccaaactgggattagataccccactatgcttagccctaaacctcaacagttaaatcaacaaaactgctcgccagaacactacgagccacagcttaaaactcaaaggacctggcggtgcttcatatccctctagaggagcctgttctgtaatcgataaaccccgatcaacctcaccacctcttgctcagcctatataccgccatcttcagcaaaccctgatgaaggctacaaagtaagcgcaagtacccacgtaaagacgttaggtcaaggtgtagcccatgaggtggcaagaaatgggctacattttctaccccagaaaactacgatagcccttatgaaacttaagggtcgaaggtggatttagcagtaaactgagagtagagtgcttagttgaacagggccctgaagcgcgtacacaccgcccgtcaccctcctcaagtatacttcaaaggacatttaactaaaacccctacgcatttatatagaggagacaagtcgtaacatggtaagtgtactggaaagtgcacttggacgaaccagagtgtagcttaacacaaagcacccaacttacacttaggagatttcaacttaacttgaccgctctgagctaaacctagccccaaacccactccaccttactaccagacaaccttagccaaaccatttacccaaataaagtataggcgatagaaattgaaacctggcgcaatagatatagtaccgcaagggaaagatgaaaaattatagccaagcataatatagcaaggactaacccctataccttctgcataatgaattaactagaaataactttgcaaggagagccaaagctaagacccccgaaaccagacgagctacctaagaacagctaaaagagcacacccgtctatgtagcaaaatagtgggaagatttataggtagaggcgacaaacctaccgagcctggtgatagctggttgtccaagatagaatcttagttcaactttaaatttgcccacagaaccctctaaatccccttgtaaatttaactgttaatccaaagaggaacagctctttggacactaggaaaaaaccttgtagagagagtaaaaaatttaacacccatagtaggcctaaaagcagccaccaattaagaaagcgttcaagctcaacacccactacctaaaaaatcccaaacatataactgaactcctcacacccaattggaccaatctatcaccctatagaagaactaatgttagtataagtaacatgaaaacattctcctccgcataagcctgcgtcagattaaaacactgaactgacaattaacagcccaatatctacaatcaaccaacaagtcattattaccctcactgtcaacccaacacaggcatgctcataaggaaaggttaaaaaaagtaaaaggaactcggcaaatcttaccccgcctgtttaccaaaaacatcacctctagcatcaccagtattagaggcaccgcctgcccagtgacacatgtttaacggccgcggtaccctaaccgtgcaaaggtagcataatcacttgttccttaaatagggacctgtatgaatggctccacgagggttcagctgtctcttacttttaaccagtgaaattgacctgcccgtgaagaggcgggcatgacacagcaagacgagaagaccctatggagctttaatttattaatgcaaacagtacctaacaaacccacaggtcctaaactaccaaacctgcattaaaaatttcggttggggcgacctcggagcagaacccaacctccgagcagtacatgctaagacttcaccagtcaaagcgaactactatactcaattgatccaataacttgaccaacggaacaagttaccctagggataacagcgcaatcctattctagagtccatatcaacaatagggtttacgacctcgatgttggatcaggacatcccgatggtgcagccgctattaaaggttcgtttgttcaacgattaaagtcctacgtgatctgagttcagaccggagtaatccaggtcggtttctatctacnttcaaattcctccctgtacgaaaggacaagagaaataaggcctacttcacaaagcgccttcccccgtaaatgatatcatctcaacttagtattatacccacacccacccaagaacagggtttgttaagatggcagagcccggtaatcgcataaaacttaaaactttacagtcagaggttcaattcctcttcttaacaacatacccatggccaacctcctactcctcattgtacccattctaatcgcaatggcattcctaatgcttaccgaacgaaaaattctaggctatatacaactacgcaaaggccccaacgttgtaggcccctacgggctactacaacccttcgctgacgccataaaactcttcaccaaggagcccctaaaacccgccacatctaccatcaccctctacatcaccgccccgaccttagctctcaccatcgctcttctactatgaacccccctccccatacccaaccccctggtcaacctcaacctaggcctcctatttattctagccacctctagcctagccgtttactcaatcctctgatcagggtgagcatcaaactcaaactacgccctgatcggcgcactgcgagcagtagcccaaacaatctcatatgaagtcaccctagccatcattctactatcaacattactaataagtggctcctttaacctctccacccttatcacaacacaagaacacctctgattactcctgccatcatgacccttggccataatatgatttatctccacactagcagagaccaaccgaacccccttcgaccttgccgaaggggagtccgaactagtctcaggcttcaacatcgaatacgccgcaggccccttcgccctattcttcatagccgaatacacaaacattattataataaacaccctcaccactacaatcttcctaggaacaacatatgacgcactctcccctgaactctacacaacatattttgtcaccaagaccctacttctaacctccctgttcttatgaattcgaacagcatacccccgattccgctacgaccaactcatacacctcctatgaaaaaacttcctaccactcaccctagcattacttatatgatatgtctccatacccattacaatctccagcattccccctcaaacctaagaaatatgtctgataaaagagttactttgatagagtaaataataggagcttaaacccccttatttctaggactatgagaatcgaacccatccctgagaatccaaaattctccgtgccacctatcacaccccatcctaaagtaaggtcagctaaataagctatcgggcccataccccgaaaatgttggttatacccttcccgtactaattaatcccctggcccaacccgtcatctactctaccatctttgcaggcacactcatcacagcgctaagctcgcactgattttttacctgagcaggcctagaaataaacatgctagcttttattccagttctaaccaaaaaaataaaccctcgttccacagaagctgccatcaagtatttcctcacgcaagcaaccgcatccataatccttctaatagctatcctcttcaacaatatactctccggacaatgaaccataaccaatactaccaatcaatactcatcattaataatcataatggctatagcaataaaactaggaatagccccctttcacttctgagtcccagaggttacccaaggcacccctctgacatccggcctgcttcttctcacatgacaaaaactagcccccatctcaatcatataccaaatctctccctcactaaacgtaagccttctcctcactctctcaatcttatccatcatagcaggcagttgaggtggattaaaccaaacccagctacgcaaaatcttagcatactcctcaattacccacataggatgaataatagcagttctaccgtacaaccctaacataaccattcttaatttaactatttatattatcctaactactaccgcattcctactactcaacttaaactccagcaccacgaccctactactatctcgcacctgaaacaagctaacatgactaacacccttaattccatccaccctcctctccctaggaggcctgcccccgctaaccggctttttgcccaaatgggccattatcgaagaattcacaaaaaacaatagcctcatcatccccaccatcatagccaccatcaccctccttaacctctacttctacctacgcctaatctactccacctcaatcacactactccccatatctaacaacgtaaaaataaaatgacagtttgaacatacaaaacccaccccattcctccccacactcatcgcccttaccacgctactcctacctatctccccttttatactaataatcttatagaaatttaggttaaatacagaccaagagccttcaaagccctcagtaagttgcaatacttaatttctgtaacagctaaggactgcaaaaccccactctgcatcaactgaacgcaaatcagccactttaattaagctaagcccttactagaccaatgggacttaaacccacaaacacttagttaacagctaagcaccctaatcaactggcttcaatctacttctcccgccgccgggaaaaaaggcgggagaagccccggcaggtttgaagctgcttcttcgaatttgcaattcaatatgaaaatcacctcggagctggtaaaaagaggcctaacccctgtctttagatttacagtccaatgcttcactcagccattttacctcacccccactgatgttcgccgaccgttgactattctctacaaaccacaaagacattggaacactatacctattattcggcgcatgagctggagtcctaggcacagctctaagcctccttattcgagccgagctgggccagccaggcaaccttctaggtaacgaccacatctacaacgttatcgtcacagcccatgcatttgtaataatcttcttcatagtaatacccatcataatcggaggctttggcaactgactagttcccctaataatcggtgcccccgatatggcgtttccccgcataaacaacataagcttctgactcttacctccctctctcctactcctgctcgcatctgctatagtggaggccggagcaggaacaggttgaacagtctaccctcccttagcagggaactactcccaccctggagcctccgtagacctaaccatcttctccttacacctagcaggtgtctcctctatcttaggggccatcaatttcatcacaacaattatcaatataaaaccccctgccataacccaataccaaacgcccctcttcgtctgatccgtcctaatcacagcagtcctacttctcctatctctcccagtcctagctgctggcatcactatactactaacagaccgcaacctcaacaccaccttcttcgaccccgccggaggaggagaccccattctataccaacacctattctgatttttcggtcaccctgaagtttatattcttatcctaccaggcttcggaataatctcccatattgtaacttactactccggaaaaaaagaaccatttggatacataggtatggtctgagctatgatatcaattggcttcctagggtttatcgtgtgagcacaccatatatttacagtaggaatagacgtagacacacgagcatatttcacctccgctaccataatcatcgctatccccaccggcgtcaaagtatttagctgactcgccacactccacggaagcaatatgaaatgatctgctgcagtgctctgagccctaggattcatctttcttttcaccgtaggtggcctgactggcattgtattagcaaactcatcactagacatcgtactacacgacacgtactacgttgtagctcacttccactatgtcctatcaataggagctgtatttgccatcataggaggcttcattcactgatttcccctattctcaggctacaccctagaccaaacctacgccaaaatccatttcactatcatattcatcggcgtaaatctaactttcttcccacaacactttctcggcctatccggaatgccccgacgttactcggactaccccgatgcatacaccacatgaaacatcctatcatctgtaggctcattcatttctctaacagcagtaatattaataattttcatgatttgagaagccttcgcttcgaagcgaaaagtcctaatagtagaagaaccctccataaacctggagtgactatatggatgccccccaccctaccacacattcgaagaacccgtatacataaaatctagacaaaaaaggaaggaatcgaaccccccaaagctggtttcaagccaaccccatggcctccatgactttttcaaaaaggtattagaaaaaccatttcataactttgtcaaagttaaattataggctaaatcctatatatcttaatggcacatgcagcgcaagtaggtctacaagacgctacttcccctatcatagaagagcttatcacctttcatgatcacgccctcataatcattttccttatctgcttcctagtcctgtatgcccttttcctaacactcacaacaaaactaactaatactaacatctcagacgctcaggaaatagaaaccgtctgaactatcctgcccgccatcatcctagtcctcatcgccctcccatccctacgcatcctttacataacagacgaggtcaacgatccctcccttaccatcaaatcaattggccaccaatggtactgaacctacgagtacaccgactacggcggactaatcttcaactcctacatacttcccccattattcctagaaccaggcgacctgcgactccttgacgttgacaatcgagtagtactcccgattgaagcccccattcgtataataattacatcacaagacgtcttgcactcatgagctgtccccacattaggcttaaaaacagatgcaattcccggacgtctaaaccaaaccactttcaccgctacacgaccgggggtatactacggtcaatgctctgaaatctgtggagcaaaccacagtttcatgcccatcgtcctagaattaattcccctaaaaatctttgaaatagggcccgtatttaccctatagcaccccctctaccccctctagagcccactgtaaagctaacttagcattaaccttttaagttaaagattaagagaaccaacacctctttacagtgaaatgccccaactaaatactaccgtatggcccaccataattacccccatactccttacactattcctcatcacccaactaaaaatattaaacacaaactaccacctacctccctcaccaaagcccataaaaataaaaaattataacaaaccctgagaaccaaaatgaacgaaaatctgttcgcttcattcattgcccccacaatcctaggcctacccgccgcagtactgatcattctatttccccctctattgatccccacctccaaatatctcatcaacaaccgactaatcaccacccaacaatgactaatcaaactaacctcaaaacaaatgataaccatacacaacactaaaggacgaacctgatctcttatactagtatccttaatcatttttattgccacaactaacctcctcggactcctgcctcactcatttacaccaaccacccaactatctataaacctagccatggccatccccttatgagcgggcgcagtgattataggctttcgctctaagattaaaaatgccctagcccacttcttaccacaaggcacacctacaccccttatccccatactagttattatcgaaaccatcagcctactcattcaaccaatagccctggccgtacgcctaaccgctaacattactgcaggccacctactcatgcacctaattggaagcaccaccctagcaatatcaaccattaaccttccctctacacttatcatcttcacaattctaattctactgactatcctagaaatcgctgtcgccttaatccaagcctacgttttcacacttctagtaagcctctacctgcacgacaacacataatgacccaccaatcacatgcctatcatatagtaaaacccagcccatgacccctaacaggggccctctcagccctcctaatgacctccggcctagccatgtgatttcacttccactccataacgctcctcatactaggcctactaaccaacacactaaccatataccaatgatggcgcgatgtaacacgagaaagcacataccaaggccaccacacaccacctgtccaaaaaggccttcgatacgggataatcctatttattacctcagaagtttttttcttcgcaggatttttctgagccttttaccactccagcctagcccctaccccccaattaggagggcactggcccccaacaggcatcaccccgctaaatcccctagaagtcccactcctaaacacatccgtattactcgcatcaggagtatcaatcacctgagctcaccatagtctaatagaaaacaaccgaaaccaaataattcaagcactgctcattacaattttactgggcctctattttaccctcctacaagcctcagagtacttcgagtctcccttcaccatttccgacggcatctacggctcaacattttttgtagccacaggcttccacggacttcacgtcattattggctcaactttcctcactatctgcttcatccgccaactaatatttcactttacatccaaacatcactttggcttcgaagccgccgcctgatactggcattttgtagatgtggtttgactatttctgtatgtctccatctattgatgagggtcttactcttttagtataaatagtaccgttaacttccaattaactagttttgacaacattcaaaaaagagtaataaacttcgccttaattttaataatcaacaccctcctagccttactactaataattattacattttgactaccacaactcaacggctacatagaaaaatccaccccttacgagtgcggcttcgaccctatatcccccgcccgcgtccctttctccataaaattcttcttagtagctattaccttcttattatttgatctagaaattgccctccttttacccctaccatgagccctacaaacaactaacctgccactaatagttatgtcatccctcttattaatcatcatcctagccctaagtctggcctatgagtgactacaaaaaggattagactgaaccgaattggtatatagtttaaacaaaacgaatgatttcgactcattaaattatgataatcatatttaccaaatgcccctcatttacataaatattatactagcatttaccatctcacttctaggaatactagtatatcgctcacacctcatgtcctccctactatgcctagaaggaataatactatcgctgttcattatagctactctcataaccctcaacacccactccctcttagccaatattgtgcctattgccatactagtctttgccgcctgcgaagcagcggtgggcctagccctactagtctcaatctccaacacatatggcctagactacgtacataacctaaacctactccaatgctaaaactaatcgtcccaacaattatattactaccactgacatgactttccaaaaaacacataatttgaatcaacacaaccacccacagcctaattattagcatcatccctctactattttttaaccaaatcaacaacaacctatttagctgttccccaaccttttcctccgaccccctaacaacccccctcctaatactaactacctgactcctacccctcacaatcatggcaagccaacgccacttatccagtgaaccactatcacgaaaaaaactctacctctctatactaatctccctacaaatctccttaattataacattcacagccacagaactaatcatattttatatcttcttcgaaaccacacttatccccaccttggctatcatcacccgatgaggcaaccagccagaacgcctgaacgcaggcacatacttcctattctacaccctagtaggctcccttcccctactcatcgcactaatttacactcacaacaccctaggctcactaaacattctactactcaccctcactgcccaagaactatcaaactcctgagccaacaacttaatatgactagcttacacaatagcttttatagtaaagatacctctttacggactccacttatgactccctaaagcccatgtcgaagcccccatcgctgggtcaatagtacttgccgcagtactcttgaaactaggcggctatggtataatacgcctcacactcattctcaaccccctgacaaaacacatagcctaccccttccttgtactatccctatgaggcataattataacaagctccatctgcctacgacaaacagacctaaaatcgctcattgcatactcttcaatcagccacatagccctcgtagtaacagccattctcatccaaaccccctgaagcttcaccggcgcagtcattctcataatcgcccacggacttacatcctcattactattctgcctagcaaactcaaactacgaacgcactcacagtcgcatcataatcctctctcaaggacttcaaactctactcccactaatagctttttgatgacttctagcaagcctcgctaacctcgccttaccccccactattaacctactgggagaactctctgtgctagtaaccacgttctcctgatcaaatatcactctcctacttacaggactcaacatactagtcacagccctatactccctctacatatttaccacaacacaatggggctcactcacccaccacattaacaacataaaaccctcattcacacgagaaaacaccctcatgttcatacacctatcccccattctcctcctatccctcaaccccgacatcattaccgggttttcctcttgtaaatatagtttaaccaaaacatcagattgtgaatctgacaacagaggcttacgaccccttatttaccgagaaagctcacaagaactgctaactcatgcccccatgtctaacaacatggctttctcaacttttaaaggataacagctatccattggtcttaggccccaagaattttggtgcaactccaaataaaagtaataaccatgcacactactataaccaccctaaccctaacttccctaattccccccatccttaccaccctcgttaaccctaacaaaaaaaactcatacccccattatgtaaaatccattgtcgcatccacctttattatcagtctcttccccacaacaatattcatgtgcctagaccaagaagttattatctcgaactgacactgagccacaacccaaacaacccagctctccctaagcttcaaactagactacttctccataatattcatccctgtagcattgttcgttacatggtccatcatagaattctcactgtgatatataaactcagacccaaacattaatcagttcttcaaatatctactcatcttcctaattaccatactaatcttagttaccgctaacaacctattccaactgttcatcggctgagagggcgtaggaattatatccttcttgctcatcagttgatgatacgcccgagcagatgccaacacagcagccattcaagcaatcctatacaaccgtatcggcgatatcggtttcatcctcgccttagcatgatttatcctacactccaactcatgagacccacaacaaatagcccttctaaacgctaatccaagcctcaccccactactaggcctcctcctagcagcagcaggcaaatcagcccaattaggtctccacccctgactcccctcagccatagaaggccccaccccagtctcagccctactccactcaagcactatagttgtagcaggaatcttcttactcatccgcttccaccccctagcagaaaatagcccactaatccaaactctaacactatgcttaggcgctatcaccactctgttcgcagcagtctgcgcccttacacaaaatgacatcaaaaaaatcgtagccttctccacttcaagtcaactaggactcataatagttacaatcggcatcaaccaaccacacctagcattcctgcacatctgtacccacgccttcttcaaagccatactatttatgtgctccgggtccatcatccacaaccttaacaatgaacaagatattcgaaaaataggaggactactcaaaaccatacctctcacttcaacctccctcaccattggcagcctagcattagcaggaatacctttcctcacaggtttctactccaaagaccacatcatcgaaaccgcaaacatatcatacacaaacgcctgagccctatctattactctcatcgctacctccctgacaagcgcctatagcactcgaataattcttctcaccctaacaggtcaacctcgcttccccacccttactaacattaacgaaaataaccccaccctactaaaccccattaaacgcctggcagccggaagcctattcgcaggatttctcattactaacaacatttcccccgcatcccccttccaaacaacaatccccctctacctaaaactcacagccctcgctgtcactttcctaggacttctaacagccctagacctcaactacctaaccaacaaacttaaaataaaatccccactatgcacattttatttctccaacatactcggattctaccctagcatcacacaccgcacaatcccctatctaggccttcttacgagccaaaacctgcccctactcctcctagacctaacctgactagaaaagctattacctaaaacaatttcacagcaccaaatctccacctccatcatcacctcaacccaaaaaggcataattaaactttacttcctctctttcttcttcccactcatcctaaccctactcctaatcacataacctattcccccgagcaatttcaattacaatatatacaccaacaaacaatgttcaaccagtaactactactaatcaacgcccataatcatacaaagcccccgcaccaataggatcctcccgaatcaaccctgacccctctccttcataaattattcagcttcctacactattaaagtttaccacaaccaccaccccatcatactctttcacccacagcaccaatcctacctccatcgctaaccccactaaaacactcaccaagacctcaacccctgacccccatgcctcaggatactcctcaatagccatcgctgtagtatatccaaagacaaccatcattccccctaaataaattaaaaaaactattaaacccatataacctcccccaaaattcagaataataacacacccgaccacaccgctaacaatcaatactaaacccccataaataggagaaggcttagaagaaaaccccacaaaccccattactaaacccacactcaacagaaacaaagcatacatcattattctcgcacggactacaaccacgaccaatgatatgaaaaaccatcgttgtatttcaactacaagaacaccaatgaccccaatacgcaaaattaaccccctaataaaattaattaaccactcactcatcgacctccccaccccatccaacatctccgcatgatgaaacttcggctcactccttggcgcctgcctgatcctccaaatcaccacaggactattcctagccatgcactactcaccagacgcctcaaccgccttttcatcaatcgcccacatcactcgagacgtaaattatggctgaatcatccgctaccttcacgccaatggcgcctcaatattctttatctgcctcttcctacacatcgggcgaggcctatattacggatcatttctctactcagaaacctgaaacatcggcattatcctcctgcttgcaactatagcaacagccttcataggctatgtcctcccgtgaggccaaatatcattctgaggggccacagtaattacaaacttactatccgccatcccatacattgggacagacctagttcaatgaatctgaggaggctactcagtagacagtcccaccctcacacgattctttacctttcacttcatcttgcccttcattattgcagccctagcagcactccacctcctattcttgcacgaaacgggatcaaacaaccccctaggaatcacctcccattccgataaaatcaccttccacccttactacacaatcaaagacgccctcggcttacttctcttccttctctccttaatgacattaacactattctcaccagacctcctaggcgacccagacaattataccctagccaaccccttaaacacccctccccacatcaagcccgaatgatatttcctattcgcctacacaattctccgatccgtccctaacaaactaggaggcgtccttgccctattactatccatcctcatcctagcaataatccccatcctccatatatccaaacaacaaagcataatatttcgcccactaagccaatcactttattgactcctagccgcagacctcctcattctaacctgaatcggaggacaaccagtaagctacccttttaccatcattggacaagtagcatccgtactatacttcacaacaatcctaatcctaataccaactatctccctaattgaaaacaaaatactcaaatgggcctgtccttgtagtataaactaatacaccagtcttgtaaaccggagatgaaaacctttttccaaggacaaatcagagaaaaagtctttaactccaccattagcacccaaagctaagattctaatttaaactattctctgttctttcatggggaagcagatttgggtaccacccaagtattgactcacccatcaacaaccgctatgtatttcgtacattactgccagccaccatgaatattgtacggtaccataaatacttgaccacctgtagtacataaaaacccaatccacatcaaaaccccctccccatgcttacaagcaagtacagcaatcaacccccaactatcacacatcaactgcaactccaaagccacccctcacccactaggataccaacaaacctatccacccttaacagtacatagcacataaagccatttaccgtacatagcacattacagtcaaatcccttctcgtccccatggatgacccccctcagataggggtcccttgaccaccatcctccgtgaaatcaatatcccgcacaagagtgctactctcctcgctccgggcccataacacttgggggtagctaaagtgaactgtatccgacatctggttcctacttcagggccataaagcctaaatagcccacacgttccccttaaataagacatcacgatg

SEQ ID NO: 5 - DNA, 16570 bp, Homo sapiens mitochondrial
  3108: "n" refers to a nucleotide at position 3107 of the Cambridge Reference Sequence (CRS, Anderson et al. 1981 Nature 290:457-465), later determined to be absent from the human mtDNA sequence according to the revised CRS (rCRS, Andrews et al. 1999 Nature Genetics 23:147); "n" therefore represents a single nucleotide deletion at a position corresponding to nucleotide 3107 of SEQ ID NO:1 as provided herein.
gatcacaggtctatcaccctattaaccactcacgggagctctccatgcatttggtattttcgtctggggggtgtgcacgcgatagcattgcgagacgctggagccggagcaccctatgtcgcagtatctgtctttgattcctgccccatcccattatttatcgcacctacgttcaatattacaggcgaacatacttactaaagtgtgttaattaattaatgcttgtaggacataataataacaattgaatgtctgcacagccgctttccacacagacatcataacaaaaaatttccaccaaaccccccctcccccccgcttctggccacagcacttaaacacatctctgccaaaccccaaaaacaaagaaccctaacaccagcctaaccagatttcaaattttatcttttggcggtatgcacttttaacagtcaccccccaactaacacattatcttcccctcccactcccatactactaatctcatcaatacaaccccgcccatcctacccagcacacacacaccgctgctaaccccataccccgaaccaaccaaaccccaaagacaccccccacagtttatgtagcttacctcctcaaagcaatacactgaaaatgtttagacgggctcacatcaccccataaacaaataggtttggtcctagcctttctattagctcttagtaagattacacatgcaagcatccccgttccagtgagttcaccctctaaatcaccacgatcaaaagggacaagcatcaagcacgcagcaatgcagctcaaaacgcttagcctagccacacccccacgggaaacagcagtgattaacctttagcaataaacgaaagtttaactaagctatactaaccccagggttggtcaatttcgtgccagccaccgcggtcacacgattaacccaagtcaatagaagccggcgtaaagagtgttttagatcaccccctccccaataaagctaaaactcacctgagttgtaaaaaactccagttgacacaaaatagactacgaaagtggctttaacatatctgaacacacaatagctaagacccaaactgggattagataccccactatgcttagccctaaacctcaacagttaaatcaacaaaactgctcgccagaacactacgagccacagcttaaaactcaaaggacctggcggtgcttcatacccctctagaggagcctgttctgtaatcgataaaccccgatcaacctcaccacctcttgctcagcctatataccgccatcttcagcaaaccctgatgaaggctacaaagtaagcgcaagtacccacgtaaagacgttaggtcaaggtgtagcccatgaggtggcaagaaatgggctacattttctaccccagaaaactacgatagcccttatgaaacttaagggtcgaaggtggatttagcagtaaactgagagtagagtgcttagttgaacagggccctgaagcgcgtacacaccgcccgtcaccctcctcaagtatacttcaaaggacatttaactaaaacccctacgcatttatatagaggagacaagtcgtaacatggtaagtgtactggaaagtgcacttggacgaaccagagtgtagcttaacacaaagcacccaacttacacttaggagatttcaacttaacttgaccgctctgagctaaacctagccccaaacccactccaccttactaccagacaaccttagccaaaccatttacccaaataaagtataggcgatagaaattgaaacctggcgcaatagatatagtaccgcaagggaaagatgaaaaattatagccaagcataatatagcaaggactaacccctataccttctgcataatgaattaactagaaataactttgcaaggagagccaaagctaagacccccgaaaccagacgagctacctaagaacagctaaaagagcacacccgtctatgtagcaaaatagtgggaagatttataggtagaggcgacaaacctaccgagcctggtgatagctggttgtccaagatagaatcttagttcaactttaaatttgcccacagaaccctctaaatccccttgtaaatttaactgttagtccaaagaggaacagctctttggacactaggaaaaaaccttgtagagagagtaaaaaatttaacacccatagtaggcctaaaagcagccaccaattaagaaagcgttcaagctcaacacccactacctaaaaaatcccaaacatataactgaactcctcacacccaattggaccaatctatcaccctatagaagaactaatgttagtataagtaacatgaaaacattctcctccgcataagcctgcgtcagattaaaacactgaactgacaattaacagcccaatatctacaatcaaccaacaagtcattattaccctcactgtcaacccaacacaggcatgctcataaggaaaggttaaaaaaagtaaaaggaactcggcaaatcttaccccgcctgtttaccaaaaacatcacctctagcatcaccagtattagaggcaccgcctgcccagtgacacatgtttaacggccgcggtaccctaaccgtgcaaaggtagcataatcacttgttccttaaatagggacctgtatgaatggctccacgagggttcagctgtctcttacttttaaccagtgaaattgacctgcccgtgaagaggcgggcatgacacagcaagacgagaagaccctatggagctttaatttattaatgcaaacagtacctaacaaacccacaggtcctaaactaccaaacctgcattaaaaatttcggttggggcgacctcggagcagaacccaacctccgagcagtacatgctaagacttcaccagtcaaagcgaactactatactcaattgatccaataacttgaccaacggaacaagttaccctagggataacagcgcaatcctattctagagtccatatcaacaatagggtttacgacctcgatgttggatcaggacatcccgatggtgcagccgctattaaaggttcgtttgttcaacgattaaagtcctacgtgatctgagttcagaccggagtaatccaggtcggtttctatctacnttcaaattcctccctgtacgaaaggacaagagaaataaggcctacttcacaaagcgccttcccccgtaaatgatatcatctcaacttagtattatacccacacccacccaagaacagggtttgttaagatggcagagcccggtaatcgcataaaacttaaaactttacagtcagaggttcaattcctcttcttaacaacatacccatggccaacctcctactcctcattgtacccattctaatcgcaatggcattcctaatgcttaccgaacgaaaaattctaggctatatacaactacgcaaaggccccaacgttgtaggcccctacgggctactacaacccttcgctgacgccataaaactcttcaccaaggagcccctaaaacccgccacatctaccatcaccctctacatcaccgccccgaccttagctctcaccatcgctcttctactatgaacccccctccccatacccaaccccctggtcaacctcaacctaggcctcctatttattctagccacctctagcctagccgtttactcaatcctctgatcagggtgagcatcaaactcaaactacgccctgatcggcgcactgcgagcagtagcccaaacaatctcatatgaagtcaccctagccatcattctactatcaacattactaataagtggctcctttaacctctccacccttatcacaacacaagaacacctctgattactcctgccatcatgacccttggccataatatgatttatctccacactagcagagaccaaccgaacccccttcgaccttgccgaaggggagtccgaactagtctcaggcttcaacatcgaatacgccgcaggccccttcgccctattcttcatagccgaatacacaaacattattataataaacaccctcaccactacaatcttcctaggaacaacatatgacgcactctcccctgaactctacacaacatattttgtcaccaagaccctacttctaacctccctgttcttatgaattcgaacagcatacccccgattccgctacgaccaactcatacacctcctatgaaaaaacttcctaccactcaccctagcattacttatatgatatgtctccatacccattacaatctccagcattccccctcaaacctaagaaatatgtctgataaaagagttactttgatagagtaaataataggagcttaaacccccttatttctaggactatgagaatcgaacccatccctgagaatccaaaattctccgtgccacctatcacaccccatcctaaagtaaggtcagctaaataagctatcgggcccataccccgaaaatgttggttatacccttcccgtactaattaatcccctggcccaacccgtcatctactctaccatctttgcaggcacactcatcacagcgctaagctcgcactgattttttacctgagtaggcctagaaataaacatgctagcttttattccagttctaaccaaaaaaataaaccctcgttccacagaagctgccatcaagtatttcctcacgcaagcaaccgcatccataatccttctaatagctatcctcttcaacaatatactctccggacaatgaaccataaccaatactaccaatcaatactcatcattaataatcataatggctatagcaataaaactaggaatagccccctttcacttctgagtcccagaggttacccaaggcacccctctgacatccggcctgcttcttctcacatgacaaaaactagcccccatctcaatcatataccaaatctctccctcactaaacgtaagccttctcctcactctctcaatcttatccatcatagcaggcagttgaggtggattaaaccaaacccagctacgcaaaatcttagcatactcctcaattacccacataggatgaataatagcagttctaccgtacaaccctaacataaccattcttaatttaactatttatattatcctaactactaccgcattcctactactcaacttaaactccagcaccacgaccctactactatctcgcacctgaaacaagctaacatgactaacacccttaattccatccaccctcctctccctaggaggcctgcccccgctaaccggctttttgcccaaatgggccattatcgaagaattcacaaaaaacaatagcctcatcatccccaccatcatagccaccatcaccctccttaacctctacttctacctacgcctaatctactccacctcaatcacactactccccatatctaacaacgtaaaaataaaatgacagtttgaacatacaaaacccaccccattcctccccacactcatcgcccttaccacgctactcctacctatctccccttttatactaataatcttatagaaatttaggttaaatacagaccaagagccttcaaagccctcagtaagttgcaatacttaatttctgtaacagctaaggactgcaaaaccccactctgcatcaactgaacgcaaatcagccactttaattaagctaagcccttactagaccaatgggacttaaacccacaaacacttagttaacagctaagcaccctaatcaactggcttcaatctacttctcccgccgccgggaaaaaaggcgggagaagccccggcaggtttgaagctgcttcttcgaatttgcaattcaatatgaaaatcacctcggagctggtaaaaagaggcctaacccctgtctttagatttacagtccaatgcttcactcagccattttacctcacccccactgatgttcgccgaccgttgactattctctacaaaccacaaagacattggaacactatacctattattcggcgcatgagctggagtcctaggcacagctctaagcctccttattcgagccgagctgggccagccaggcaaccttctaggtaacgaccacatctacaacgttatcgtcacagcccatgcatttgtaataatcttcttcatagtaatacccatcataatcggaggctttggcaactgactagttcccctaataatcggtgcccccgatatggcgtttccccgcataaacaacataagcttctgactcttacctccctctctcctactcctgctcgcatctgctatagtggaggccggagcaggaacaggttgaacagtctaccctcccttagcagggaactactcccaccctggagcctccgtagacctaaccatcttctccttacacctagcaggtgtctcctctatcttaggggccatcaatttcatcacaacaattatcaatataaaaccccctgccataacccaataccaaacgcccctcttcgtctgatccgtcctaatcacagcagtcctacttctcctatctctcccagtcctagctgctggcatcactatactactaacagaccgcaacctcaacaccaccttcttcgaccccgccggaggaggagaccccattctataccaacacctattctgatttttcggtcaccctgaagtttatattcttatcctaccaggcttcggaataatctcccatattgtaacttactactccggaaaaaaagaaccatttggatacataggtatggtctgagctatgatatcaattggcttcctagggtttatcgtgtgagcacaccatatatttacagtaggaatagacgtagacacacgagcatatttcacctccgctaccataatcatcgctatccccaccggcgtcaaagtatttagctgactcgccacactccacggaagcaatatgaaatgatctgctgcagtgctctgagccctaggattcatctttcttttcaccgtaggtggcctgactggcattgtattagcaaactcatcactagacatcgtactacacgacacgtactacgttgtagctcacttccactatgtcctatcaataggagctgtatttgccatcataggaggcttcattcactgatttcccctattctcaggctacaccctagaccaaacctacgccaaaatccatttcactatcatattcatcggcgtaaatctaactttcttcccacaacactttctcggcctatccggaatgccccgacgttactcggactaccccgatgcatacaccacatgaaacatcctatcatctgtaggctcattcatttctctaacagcagtaatattaataattttcatgatttgagaagccttcgcttcgaagcgaaaagtcctaatagtagaagaaccctccataaacctggagtgactatatggatgccccccaccctaccacacattcgaagaacccgtatacataaaatctagacaaaaaaggaaggaatcgaaccccccaaagctggtttcaagccaaccccatggcctccatgactttttcaaaaaggtattagaaaaaccatttcataactttgtcaaagttaaattataggctaaatcctatatatcttaatggcacatgcagcgcaagtaggtctacaagacgctacttcccctatcatagaagagcttatcacctttcatgatcacgccctcataatcattttccttatctgcttcctagtcctgtatgcccttttcctaacactcacaacaaaactaactaatactaacatctcagacgctcaggaaatagaaaccgtctgaactatcctgcccgccatcatcctagtcctcatcgccctcccatccctacgcatcctttacataacagacgaggtcaacgatccctcccttaccatcaaatcaattggccaccaatggtactgaacctacgagtacaccgactacggcggactaatcttcaactcctacatacttcccccattattcctagaaccaggcgacctgcgactccttgacgttgacaatcgagtagtactcccgattgaagcccccattcgtataataattacatcacaagacgtcttgcactcatgagctgtccccacattaggcttaaaaacagatgcaattcccggacgtctaaaccaaaccactttcaccgctacacgaccgggggtatactacggtcaatgctctgaaatctgtggagcaaaccacagtttcatgcccatcgtcctagaattaattcccctaaaaatctttgaaatagggcccgtatttaccctatagcaccccctctaccccctctagagcccactgtaaagctaacttagcattaaccttttaagttaaagattaagagaaccaacacctctttacagtgaaatgccccaactaaatactaccgtatggcccaccataattacccccatactccttacactattcctcatcacccaactaaaaatattaaacacaaactaccacctacctccctcaccaaagcccataaaaataaaaaattataacaaaccctgagaaccaaaatgaacgaaaatctgttcgcttcattcattgcccccacaatcctaggcctacccgccgcagtactgatcattctatttccccctctattgatccccacctccaaatatctcatcaacaaccgactaatcaccacccaacaatgactaatcaaactaacctcaaaacaaatgataaccatacacaacactaaaggacgaacctgatctcttatactagtatccttaatcatttttattgccacaactaacctcctcggactcctgcctcactcatttacaccaaccacccaactatctataaacctagccatggccatccccttatgagcgggcgcagtgattataggctttcgctctaagattaaaaatgccctagcccacttcttaccacaaggcacacctacaccccttatccccatactagttattatcgaaaccatcagcctactcattcaaccaatagccctggccgtacgcctgaccgctaacattactgcaggccacctactcatgcacctaattggaagcaccaccctagcaatatcaaccattaaccttccctctacacttatcatcttcacaattctaattctactgactatcctagaaatcgctgtcgccttaatccaagcctacgttttcacacttctagtaagcctctacctgcacgacaacacataatgacccaccaatcacatgcctatcatatagtaaaacccagcccatgacccctaacaggggccctctcagccctcctaatgacctccggcctagccatgtgatttcacttccactccataacgctcctcatactaggcctactaaccaacacactaaccatataccaatgatggcgcgatgtaacacgagaaagcacataccaaggccaccacacaccacctgtccaaaaaggccttcgatacgggataatcctatttattacctcagaagtttttttcttcgcaggatttttctgagccttttaccactccagcctagcccctaccccccaattaggagggcactggcccccaacaggcatcaccccgctaaatcccctagaagtcccactcctaaacacatccgtattactcgcatcaggagtatcaatcacctgagctcaccatagtctaatagaaaacaaccgaaaccaaataattcaagcactgctcattacaattttactgggtctctattttaccctcctacaagcctcagagtacttcgagtctcccttcaccatttccgacggcatctacggctcaacattttttgtagccacaggcttccacggacttcacgtcattattggctcaactttcctcactatctgcttcatccgccaactaatatttcactttacatccaaacatcactttggcttcgaagccgccgcctgatactggcattttgtagatgtggtttgactatttctgtatgtctccatctattgatgagggtcttactcttttagtataaatagtaccgttaacttccaattaactagttttgacaacattcaaaaaagagtaataaacttcgccttaattttaataatcaacaccctcctagccttactactaataattattacattttgactaccacaactcaacggctacatagaaaaatccaccccttacgagtgcggcttcgaccctatatcccccgcccgcgtccctttctccataaaattcttcttagtagctattaccttcttattatttgatctagaaattgccctccttttacccctaccatgagccctacaaacaactaacctgccactaatagttatgtcatccctcttattaatcatcatcctagccctaagtctggcctatgagtgactacaaaaaggattagactgagccgaattggtatatagtttaaacaaaacgaatgatttcgactcattaaattatgataatcatatttaccaaatgcccctcatttacataaatattatactagcatttaccatctcacttctaggaatactagtatatcgctcacacctcatgtcctccctactatgcctagaaggaataatactatcgctgttcattatagctactctcataaccctcaacacccactccctcttagccaatattgtgcctattgccatactagtctttgccgcctgcgaagcagcggtgggcctagccctactagtctcaatctccaacacatatggcctagactacgtacataacctaaacctactccaatgctaaaactaatcgtcccaacaattatattactaccactgacatgactttccaaaaaacacataatttgaatcaacacaaccacccacagcctaattattagcatcatccctctactattttttaaccaaatcaacaacaacctatttagctgttccccaaccttttcctccgaccccctaacaacccccctcctaatactaactacctgactcctacccctcacaatcatggcaagccaacgccacttatccagtgaaccactatcacgaaaaaaactctacctctctatactaatctccctacaaatctccttaattataacattcacagccacagaactaatcatattttatatcttcttcgaaaccacacttatccccaccttggctatcatcacccgatgaggcaaccagccagaacgcctgaacgcaggcacatacttcctattctacaccctagtaggctcccttcccctactcatcgcactaatttacactcacaacaccctaggctcactaaacattctactactcaccctcactgcccaagaactatcaaactcctgagccaacaacttaatatgactagcttacacaatagcttttatagtaaagatacctctttacggactccacttatgactccctaaagcccatgtcgaagcccccatcgctgggtcaatagtacttgccgcagtactcttgaaactaggcggctatggtataatacgcctcacactcattctcaaccccctgacaaaacacatagcctaccccttccttgtactatccctatgaggcataattataacaagctccatctgcctacgacaaacagacctaaaatcgctcattgcatactcttcaatcagccacatagccctcgtagtaacagccattctcatccaaaccccctgaagcttcaccggcgcagtcattctcataatcgcccacggacttacatcctcattactattctgcctagcaaactcaaactacgaacgcactcacagtcgcatcataatcctctctcaaggacttcaaactctactcccactaatagctttttgatgacttctagcaagcctcgctaacctcgccttaccccccactattaacctactgggagaactctctgtgctagtaaccacgttctcctgatcaaatatcactctcctacttacaggactcaacatactagtcacagccctatactccctctacatatttaccacaacacaatggggctcactcacccaccacattaacaacataaaaccctcattcacacgagaaaacaccctcatgttcatacacctatcccccattctcctcctatccctcaaccccgacatcattaccgggttttcctcttgtaaatatagtttaaccaaaacatcagattgtgaatctgacaacagaggcttacgaccccttatttaccgagaaagctcacaagaactgctaactcatgcccccatgtctaacaacatggctttctcaacttttaaaggataacagctatccattggtcttaggccccaagaattttggtgcaactccaaataaaagtaataaccatgcacactactataaccaccctaaccctaacttccctaattccccccatccttaccaccctcgttaaccctaacaaaaaaaactcatacccccattatgtaaaatccattgtcgcatccacctttattatcagtctcttccccacaacaatattcatgtgcctagaccaagaagttattatctcgaactgacactgagccacaacccaaacaacccagctctccctaagcttcaaactagactacttctccataatattcatccctgtagcattgttcgttacatggtccatcatagaattctcactgtgatatataaactcagacccaaacattaatcagttcttcaaatatctactcatcttcctaattaccatactaatcttagttaccgctaacaacctattccaactgttcatcggctgagagggcgtaggaattatatccttcttgctcatcagttgatgatacgcccgagcagatgccaacacagcagccattcaagcaatcctatacaaccgtatcggcgatatcggtttcatcctcgccttagcatgatttatcctacactccaactcatgagacccacaacaaatagcccttctaaacgctaatccaagcctcaccccactactaggcctcctcctagcagcagcaggcaaatcagcccaattaggtctccacccctgactcccctcagccatagaaggccccaccccagtctcagccctactccactcaagcactatagttgtagcaggaatcttcttactcatccgcttccaccccctagcagaaaatagcccactaatccaaactctaacactatgcttaggcgctatcaccactctgttcgcagcagtctgcgcccttacacaaaatgacatcaaaaaaatcgtagccttctccacttcaagtcaactaggactcataatagttacaatcggcatcaaccaaccacacctagcattcctgcacatctgtacccacgccttcttcaaagccatactatttatgtgctccgggtccatcatccacaaccttaacaatgaacaagatattcgaaaaataggaggactactcaaaaccatacctctcacttcaacctccctcaccattggcagcctagcattagcaggaatacctttcctcacaggtttctactccaaagaccacatcatcgaaaccgcaaacatatcatacacaaacgcctgagccctatctattactctcatcgctacctccctgacaagcgcctatagcactcgaataattcttctcaccctaacaggtcaacctcgcttccccacccttactaacattaacgaaaataaccccaccctactaaaccccattaaacgcctggcagccggaagcctattcgcaggatttctcattactaacaacatttcccccgcatcccccttccaaacaacaatccccctctacctaaaactcacagccctcgctgtcactttcctaggacttctaacagccctagacctcaactacctaaccaacaaacttaaaataaaatccccactatgcacattttatttctccaacatactcggattctaccctagcatcacacaccgcacaatcccctatctaggccttcttacgagccaaaacctgcccctactcctcctagacctagcctgactagaaaagctattacctaaaacaatttcacaacaccaaatctccacctccatcatcacctcaacccaaaaaggcataattaaactttacttcctctctttcttcttcccactcatcctaaccctactcctaatcacataacctattcccccgagcaatttcaattacaatatatacaccaacaaacaatgttcaaccagtaactactactaatcaacgcccataatcatacaaagcccccgcaccaataggatcctcccgaatcaaccctgacccctctccttcataaattattcagcttcctacactattaaagtttaccacaaccaccaccccatcatactctttcacccacagcaccaatcctacctccatcgctaaccccactaaaacactcaccaagacctcaacccctgacccccatgcctcaggatactcctcaatagccatcgctgtagtatatccaaagacaaccatcattccccctaaataaattaaaaaaactattaaacccatataacctcccccaaaattcagaataataacacacccgaccacaccgctaacaatcaatactaaacccccataaataggagaaggcttagaagaaaaccccacaaaccccattactaaacccacactcaacagaaacaaagcatacatcattattctcgcacggactacaaccacgaccaatgatatgaaaaaccatcgttgtatttcaactacaagaacaccaatgaccccaatacgcaaaattaaccccctaataaaattaattaaccactcactcatcgacctccccaccccatccaacatctccgcatgatgaaacttcggctcactccttggcgcctgcctgatcctccaaatcaccacaggactattcctagccatgcactactcaccagacgcctcaaccgccttttcatcaatcgcccacatcactcgagacgtaaattatggctgaatcatccgctaccttcacgccaatggcgcctcaatattctttatctgcctcttcctacacatcgggcgaggcctatattacggatcatttctctactcagaaacctgaaacatcggcattatcctcctgcttgcaactatagcaacagccttcataggctatgtcctcccgtgaggccaaatatcattctgaggggccacagtaattacaaacttactatccgccatcccatacattgggacagacctagttcaatgaatctgaggaggctactcagtagacagtcccaccctcacacgattctttacctttcacttcatcttgcccttcattattgcagccctagcagcactccacctcctattcttgcacgaaacgggatcaaacaaccccctaggaatcacctcccattccgataaaatcaccttccacccttactacacaatcaaagacgccctcggcttacttctcttccttctctccttaatgacattaacactattctcaccagacctcctaggcgacccagacaattataccctagccaaccccttaaacacccctccccacatcaagcccgaatgatatttcctattcgcctacacaattctccgatccgtccctaacaaactaggaggcgtccttgccctattactatccatcctcatcctagcaataatccccatcctccatatatccaaacaacaaagcataatatttcgcccactaagccaatcactttattgactcctagccgcagacctcctcattctaacctgaatcggaggacaaccagtaagctacccttttaccatcattggacaagtagcatccgtactatacttcacaacaatcctaatcctaataccaactatctccctaattgaaaacaaaatactcaaatgggcctgtccttgtagtataaactaatacaccagtcttgtaaaccggagatgaaaacctttttccaaggacaaatcagagaaaaagtctttaactccaccattagcacccaaagctaagattctaatttaaactattctctgttctttcatggggaagcagatttgggtaccacccaagtattgactcacccatcaacaaccgctatgtatttcgtacattactgccagccaccatgaatattgtacggtaccataaatacttgaccacctgtagtacataaaaacccaatccacatcaaaaccccccccccatgcttacaagcaagtacagcaatcaacccccaactatcacacatcaactgcaactccaaagccacccctcacccactaggataccaacaaacctacccacccttaacagtacatagcacataaagtcatttaccgtacatagcacattacagtcaaatcccttctcgtccccatggatgacccccctcagataggggtcccttgaccaccatcctccgtgaaatcaatatcccgcacaagagtgctactctcctcgctccgggcccataacacttgggggtagctaaagtgaactgtatccgacatctggttcctacttcagggccataaagcctaaatagcccacacgttccccttaaataagacatcacgatg

SEQ ID NO: 6 - DNA, 16572 bp, Homo sapiens mitochondrial
  3110: "n" refers to a nucleotide at position 3107 of the Cambridge Reference Sequence (CRS, Anderson et al. 1981 Nature 290:457-465), later determined to be absent from the human mtDNA sequence according to the revised CRS (rCRS, Andrews et al. 1999 Nature Genetics 23:147); "n" therefore represents a single nucleotide deletion at a position corresponding to nucleotide 3107 of SEQ ID NO:1 as provided herein.
gatcacaggtctatcaccctattaaccactcacgggagctctccatgcatttggtattttcgtctgggggggatgcacgcgatagcattgcgagacgctggagccggagcaccctatgtcgcagtatctgtctttgattcctgccccatcctattatttatcgcacctacgttcaatattacaggcgaacatacctactaaagtgtgttaattaattaatgcttgtaggacataataataacaattgaatgtctgcacagccgctttccacacagacatcataacaaaaaatttccaccaaaccccccctccccccccgcttctggccacagcacttaaacacatctctgccaaaccccaaaaacaaagaaccctaacaccagcctaaccagatttcaaattttatcttttggcggtatgcacttttaacagtcaccccccaactaacacattattttcccctcccactcccatactactaatctcatcaatacaacccccgcccatcctacccagcacacacacaccgctgctaaccccataccccgaaccaaccaaaccccaaagacaccccccacagtttatgtagcttacctcctcaaagcaatacactgaaaatgtttagacgggctcacatcaccccataaacaaataggtttggtcctagcctttctattagctcttagtaagattacacatgcaagcatccccgttccagtgagttcaccctctaaatcaccacgatcaaaagggacaagcatcaagcacgcagcaatgcagctcaaaacgcttagcctagccacacccccacgggaaacagcagtgattaacctttagcaataaacgaaagtttaactaagctatactaaccccagggttggtcaatttcgtgccagccaccgcggtcacacgattaacccaagtcaatagaagccggcgtaaagagtgttttagatcaccccctccccaataaagctaaaactcacctgagttgtaaaaaactccagttgacacaaaatagactacgaaagtggctttaacatatctgaacacacaatagctaagacccaaactgggattagataccccactatgcttagccctaaacctcaacagttaaatcaacaaaactgctcgccagaacactacgagccacagcttaaaactcaaaggacctggcggtgcttcatatccctctagaggagcctgttctgtaatcgataaaccccgatcaacctcaccacctcttgctcagcctatataccgccatcttcagcaaaccctgatgaaggctacaaagtaagcgcaagtacccacgtaaagacgttaggtcaaggtgtagcccatgaggtggcaagaaatgggctacattttctaccccagaaaactacgatagcccttatgaaacttaagggtcgaaggtggatttagcagtaaactgagagtagagtgcttagttgaacagggccctgaagcgcgtacacaccgcccgtcaccctcctcaagtatacttcaaaggacatttaactaaaacccctacgcatttatatagaggagacaagtcgtaacatggtaagtgtactggaaagtgcacttggacgaaccagagtgtagcttaacacaaagcacccaacttacacttaggagatttcaacttaacttgaccgctctgagctaaacctagccccaaacccactccaccttactaccagacaaccttagccaaaccatttacccaaataaagtataggcgatagaaattgaaacctggcgcaatagatatagtaccgcaagggaaagatgaaaaattataaccaagcataatatagcaaggactaacccctataccttctgcataatgaattaactagaaataactttgcaaggagagccaaagctaagacccccgaaaccagacgagctacctaagaacagctaaaagagcacacccgtctatgtagcaaaatagtgggaagatttataggtagaggcgacaaacctaccgagcctggtgatagctggttgtccaagatagaatcttagttcaactttaaatttgcccacagaaccctctaaatccccttgtaaatttaactgttagtccaaagaggaacagctctttggacactaggaaaaaaccttgtagagagagtaaaaaatttaacacccatagtaggcctaaaagcagccaccaattaagaaagcgttcaagctcaacacccactacctaaaaaatcccaaacatataactgaactcctcacacccaattggaccaatctatcaccctatagaagaactaatgttagtataagtaacatgaaaacattctcctccgcataagcctgcgtcagattaaaacactgaactgacaattaacagcccaatatctacaatcaaccaacaagtcattattaccctcactgtcaacccaacacaggcatgctcataaggaaaggttaaaaaaagtaaaaggaactcggcaaatcttaccccgcctgtttaccaaaaacatcacctctagcatcaccagtattagaggcaccgcctgcccagtgacacatgtttaacggccgcggtaccctaaccgtgcaaaggtagcataatcacttgttccttaaatagggacctgtatgaatggctccacgagggttcagctgtctcttacttttaaccagtgaaattgacctgcccgtgaagaggcgggcataacacagcaagacgagaagaccctatggagctttaatttattaatgcaaacagtacctaacaaacccacaggtcctaaactaccaaacctgcattaaaaatttcggttggggcgacctcggagcagaacccaacctccgagcagtacatgctaagacttcaccagtcaaagcgaactactatactcaattgatccaataacttgaccaacggaacaagttaccctagggataacagcgcaatcctattctagagtccatatcaacaatagggtttacgacctcgatgttggatcaggacatcccgatggtgcagccgctattaaaggttcgtttgttcaacgattaaagtcctacgtgatctgagttcagaccggagtaatccaggtcggtttctatctacnttcaaattcctccctgtacgaaaggacaagagaaataaggcctacttcacaaagcgccttcccccgtaaatgatatcatctcaacttagtattatacccacacccacccaagaacagggtttgttaagatggcagagcccggtaatcgcataaaacttaaaactttacagtcagaggttcaattcctcttcttaacaacatacccatggccaacctcctactcctcattgtacccattctaatcgcaatggcattcctaatgcttaccgaacgaaaaattctaggctatatacaactacgcaaaggccccaacgttgtaggcccctacgggctactacaacccttcgctgacgccataaaactcttcaccaaagagcccctaaaacccgccacatctaccatcaccctctacatcaccgccccgaccttagctctcaccatcgctcttctactatgaacccccctccccatacccaaccccctggtcaacctcaacctaggcctcctatttattctagccacctctagcctagccgtttactcaatcctctgatcagggtgagcatcaaactcaaactacgccctgatcggcgcactgcgagcagtagcccaaacaatctcatatgaagtcaccctagccatcattctactatcaacattactaataagtggctcctttaacctctccacccttatcacaacacaagaacacctctgattactcctgccatcatgacccttggccataatatgatttatctccacactagcagagaccaaccgaacccccttcgaccttgccgaaggggagtccgaactagtctcaggcttcaacatcgaatacgccgcaggccccttcgccctattcttcatagccgaatacacaaacattattataataaacaccctcaccactacaatcttcctaggaacaacatatgacgcactctcccctgaactctacacaacatattttgtcaccaagaccctacttctaacctccctgttcttatgaattcgaacagcatacccccgattccgctacgaccaactcatacacctcctatgaaaaaacttcctaccactcaccctagcattacttatatgatatgtctccatacccattacaatctccagcattccccctcaaacctaagaaatatgtctgataaaagagttactttgatagagtaaataataggagcttaaacccccttatttctaggactatgagaatcgaacccatccctgagaatccaaaattctccgtgccacctatcacaccccatcctaaagtaaggtcagctaaataagctatcgggcccataccccgaaaatgttggttatacccttcccgtactaattaatcccctggcccaacccgtcatctactctaccatctttgcaggcacactcatcacagcgctaagctcgcactgattttttacctgagtaggcctagaaataaacatgctagcttttattccagttctaaccaaaaaaataaaccctcgttccacagaagctgccatcaagtatttcctcacgcaagcaaccgcatccataatccttctaatagctatcctcttcaacaatatactctccggacaatgaaccataaccaatactaccaatcaatactcatcattaataatcataatggctatagcaataaaactaggaatagccccctttcacttctgagtcccagaggttacccaaggcacccctctgacatccggcctgcttcttctcacatgacaaaaactagcccccatctcaatcatataccaaatctctccctcactaaacgtaagccttctcctcactctctcaatcttatccatcatagcaggcagttgaggtggattaaaccaaacccagctacgcaaaatcttagcatactcctcaattacccacataggatgaataatagcagttctaccgtacaaccctaacataaccattcttaatttaactatttatattatcctaactactaccgcattcctactactcaacttaaactccagcaccacgaccctactactatctcgcacctgaaacaagctaacatgactaacacccttaattccatccaccctcctctccctaggaggcctgcccccgctaaccggctttttgcccaaatgggccattatcgaagaattcacaaaaaacaatagcctcatcatccccaccatcatagccaccatcaccctccttaacctctacttctacctacgcctaatctactccacctcaatcacactactccccatatctaacaacgtaaaaataaaatgacagtttgaacatacaaaacccaccccattcctccccacactcatcgcccttaccacgctactcctacctatctccccttttatactaataatcttatagaaatttaggttaaatacagaccaagagccttcaaagccctcagtaagttgcaatacttaatttctgtaacagctaaggactgcaaaaccccactctgcatcaactgaacgcaaatcagccactttaattaagctaagcccttactagaccaatgggacttaaacccacaaacacttagttaacagctaagcaccctaatcaactggcttcaatctacttctcccgccgccgggaaaaaaggcgggagaagccccggcaggtttgaagctgcttcttcgaatttgcaattcaatatgaaaatcacctcggagctggtaaaaagaggcctaacccctgtctttagatttacagtccaatgcttcactcagccattttacctcacccccactgatgttcgccgaccgttgactattctctacaaaccacaaagacattggaacactatacctattattcggcgcatgagctggagtcctaggcacagctctaagcctccttattcgagccgagctgggccagccaggcaaccttctaggtaacgaccacatctacaacgttatcgtcacagcccatgcatttgtaataatcttcttcatagtaatacccatcataatcggaggctttggcaactgactagttcccctaataatcggtgcccccgatatggcgtttccccgcataaacaacataagcttctgactcttacctccctctctcctactcctgctcgcatctgctatagtggaggccggagcaggaacaggttgaacagtctaccctcccttagcagggaactactcccaccctggagcctccgtagacctaaccatcttctccttacacctagcaggtgtctcctctatcttaggggccatcaatttcatcacaacaattatcaatataaaaccccctgccataacccaataccaaacgcccctcttcgtctgatccgtcctaatcacagcagtcctacttctcctatctctcccagtcctagctgctggcatcactatactactaacagaccgcaacctcaacaccaccttcttcgaccccgccggaggaggagaccccattctataccaacacctattctgatttttcggtcaccctgaagtttatattcttatcctaccaggcttcggaataatctcccatattgtaacttactactccggaaaaaaagaaccatttggatacataggtatggtctgagctatgatatcaattggcttcctagggtttatcgtgtgagcacaccatatatttacagtaggaatagacgtagacacacgagcatatttcacctccgctaccataatcatcgctatccccaccggcgtcaaagtatttagctgactcgccacactccacggaagcaatatgaaatgatctgctgcagtgctctgagccctaggattcatctttcttttcaccgtaggtggcctgactggcattgtattagcaaactcatcactagacatcgtactacacgacacgtactacgttgtagcccacttccactatgtcctatcaataggagctgtatttgccatcataggaggcttcattcactgatttcccctattctcaggctacaccctagaccaaacctacgccaaaatccatttcactatcatattcatcggcgtaaatctaactttcttcccacaacactttctcggcctatccggaatgccccgacgttactcggactaccccgatgcatacaccacatgaaacatcctatcatctgtaggctcattcatttctctaacagcagtaatattaataattttcatgatttgagaagccttcgcttcgaagcgaaaagtcctaatagtagaagaaccctccataaacctggagtgactatatggatgccccccaccctaccacacattcgaagaacccgtatacataaaatctagacaaaaaaggaaggaatcgaaccccccaaagctggtttcaagccaaccccatggcctccatgactttttcaaaaaggtattagaaaaaccatttcataactttgtcaaagttaaattataggctaaatcctatatatcttaatggcacatgcagcgcaagtaggtctacaagacgctacttcccctatcatagaagagcttatcacctttcatgatcacgccctcataatcattttccttatctgcttcctagtcctgtatgcccttttcctaacactcacaacaaaactaactaatactaacatctcagacgctcaggaaatagaaaccgtctgaactatcctgcccgccatcatcctagtcctcatcgccctcccatccctacgcatcctttacataacagacgaggtcaacgatccctcccttaccatcaaatcaattggccaccaatggtactgaacctacgagtacaccgactacggcggtctaatcttcaactcctacatacttcccccattattcctagaaccaggcgacctgcgactccttgacgttgacaatcgagtagtactcccgattgaagcccccattcgtataataattacatcacaagacgtcttgcactcatgagctgtccccacattaggcttaaaaacagatgcaattcccggacgtctaaaccaaaccactttcaccgctacacgaccgggggtatactacggtcaatgctctgaaatctgtggagcaaaccacagtttcatgcccatcgtcctagaattaattcccctaaaaatctttgaaatagggcccgtatttaccctatagcaccccctctaccccctctagagcccactgtaaagctaacttagcattaaccttttaagttaaagattaagagaaccaacacctctttacagtgaaatgccccaactaaatactaccgtatggcccaccataattacccccatactccttacactattcctcatcacccaactaaaaatattaaacacaaactaccacctacctccctcaccaaagcccataaaaataaaaaattataacaaaccctgagaaccaaaatgaacgaaaatctgttcgcttcattcattgcccccacaatcctaggcctacccgccgcagtactgatcattctatttccccctctattgatccccacctccaaatatctcatcaacaaccgactaatcaccacccaacaatgactaatcaaactaacctcaaaacaaatgataaccatacacaacactaaaggacgaacctgatctcttatactagtatccttaatcatttttattgccacaactaacctcctcggactcctgcctcactcatttacaccaaccacccaactatctataaacctagccatggccatccccttatgagcgggcgcagtgattataggctttcgctctaagattaaaaatgccctagcccacttcttaccacaaggcacacctacaccccttatccccatactagttattatcgaaaccatcagcctactcattcaaccaatagccctggccgtacgcctaaccgctaacattactgcaggccacctactcatgcacctaattggaagcgccaccctagcaatatcaaccattaaccttccctctacacttatcatcttcacaattctaattctactgactatcctagaaatcgctgtcgccttaatccaagcctacgttttcacacttctagtaagcctctacctgcacgacaacacataatgacccaccaatcacatgcctatcatatagtaaaacccagcccatgacccctaacaggggccctctcagccctcctaatgacctccggcctagccatgtgatttcacttccactccataacgctcctcatactaggcctactaaccaacacactaaccatataccaatgatggcgcgatgtaacacgagaaagcacataccaaggccaccacacaccacctgtccaaaaaggccttcgatacgggataatcctatttattacctcagaagtttttttcttcgcaggatttttctgagccttttaccactccagcctagcccctaccccccaattaggagggcactggcccccaacaggcatcaccccgctaaatcccctagaagtcccactcctaaacacatccgtattactcgcatcaggagtatcaatcacctgagctcaccatagtctaatagaaaacaaccgaaaccaaataattcaagcactgcttattacaattttactgggtctctattttaccctcctacaagcctcagagtacttcgagtctcccttcaccatttccgacggcatctacggctcaacattttttgtagccacaggcttccacggacttcacgtcattattggctcaactttcctcactatctgcttcatccgccaactaatatttcactttacatccaaacatcactttggcttcgaagccgccgcctgatactggcattttgtagatgtggtttgactatttctgtatgtctccatctattgatgagggtcttactcttttagtataaatagtaccgttaacttccaattaactagttttgacaacattcaaaaaagagtaataaacttcgccttaattttaataatcaacaccctcctagccttactactaataattattacattttgactaccacaactcaacggctacatagaaaaatccaccccttacgagtgcggcttcgaccctatatcccccgcccgcgtccctttctccataaaattcttcttagtagctattaccttcttattatttgatctagaaattgccctccttttacccctaccatgagccctacaaacaactaacctgccactaatagttatgtcatccctcttattaatcatcatcctagccctaagtctggcctatgagtgactacaaaaaggattagactgaaccgaattggtatatagtttaaacaaaacgaatgatttcgactcattaaattatgataatcatatttaccaaatgcccctcatttacataaatattatactagcatttaccatctcacttctaggaatactagtatatcgctcacacctcatatcctccctactatgcctagaaggaataatactatcgctgttcattatagctactctcataaccctcaacacccactccctcttagccaatattgtgcctattgccatactagtctttgccgcctgcgaagcagcggtgggcctagccctactagtctcaatctccaacacatatggcctagactacgtacataacctaaacctactccaatgctaaaactgatcgtcccaacaattatattactaccactgacatgactttccaaaaaacacataatttgaatcaacacaaccacccacagcctaattattagcatcatccctctactattttttaaccaaatcaacaacaacctatttagctgttccccaaccttttcctccgaccccctaacaacccccctcctaatactaactacctgactcctacccctcacaatcatggcaagccaacgccacttatccagtgaaccactatcacgaaaaaaactctacctctctatactaatctccctacaaatctccttaattataacattcacagccacagaactaatcatattttatatcttcttcgaaaccacacttatccccaccttggctatcatcacccgatgaggcaaccagccagaacgcctgaacgcaggcacatacttcctattctacaccctagtaggctcccttcccctactcatcgcactaatttacactcacaacaccctaggctcactaaacattctactactcactctcactgcccaagaactatcaaactcctgagccaacaacttaatatgactagcttacacaatagcttttatagtaaagatacctctttacggactccacttatgactccctaaagcccatgtcgaagcccccatcgctgggtcaatagtacttgccgcagtactcttaaaactaggcggctatggtataatacgcctcacactcattctcaaccccctgacaaaacacatagcctaccccttccttgtactatccctatgaggcataattataacaagctccatctgcctacgacaaacagacctaaaatcgctcattgcatactcttcaatcagccacatagccctcgtagtaacagccattctcatccaaaccccctgaagcttcaccggcgcagtcattctcataatcgcccacgggcttacatcctcattactattctgcctagcaaactcaaactacgaacgcactcacagtcgcatcataatcctctctcaaggacttcaaactctactcccactaatagctttttgatgacttctagcaagcctcgctaacctcgccttaccccccactattaacctactgggagaactctctgtgctagtaaccacgttctcctgatcaaatatcactctcctacttacaggactcaacatactagtcacagccctatactccctctacatatttaccacaacacaatggggctcactcacccaccacattaacaacataaaaccctcattcacacgagaaaacaccctcatgttcatacacctatcccccattctcctcctatccctcaaccccgacatcattaccgggttttcctcttgtaaatatagtttaaccaaaacatcagattgtgaatctgacaacagaggcttacgaccccttatttaccgagaaagctcacaagaactgctaactcatgcccccatgtctaacaacatggctttctcaacttttaaaggataacagctatccattggtcttaggccccaaaaattttggtgcaactccaaataaaagtaataaccatgcacactactataaccaccctaaccctgacttccctaattccccccatccttaccaccctcgttaaccctaacaaaaaaaactcatacccccattatgtaaaatccattgtcgcatccacctttattatcagtctcttccccacaacaatattcatgtgcctagaccaagaagttattatctcgaactgacactgagccacaacccaaacaacccagctctccctaagcttcaaactagactacttctccataatattcatccctgtagcattgttcgttacatggtccatcatagaattctcactgtgatatataaactcagacccaaacattaatcagttcttcaaatatctactcatcttcctaattaccatactaatcttagttaccgctaacaacctattccaactgttcatcggctgagagggcgtaggaattatatccttcttgctcatcagttgatgatacgcccgagcagatgccaacacagcagccattcaagcaatcctatacaaccgtatcggcgatatcggtttcatcctcgccttagcatgatttatcctacactccaactcatgagacccacaacaaatagcccttctaaacgctaatccaagcctcaccccactactaggcctcctcctagcagcagcaggcaaatcagcccaattaggtctccacccctgactcccctcagccatagaaggccccaccccagtctcagccctactccactcaagcactatagttgtagcaggaatcttcttactcatccgcttccaccccctagcagaaaatagcccactaatccaaactctaacactatgcttaggcgctatcaccactctgttcgcagcagtctgcgcccttacacaaaatgacatcaaaaaaatcgtagccttctccacttcaagtcaactaggactcataatagttacaatcggcatcaaccaaccacacctagcattcctgcacatctgtacccacgccttcttcaaagccatactatttatgtgctccgggtccatcatccacaaccttaacaatgaacaagatattcgaaaaataggaggactactcaaaaccatacctctcacttcaacctccctcaccattggcagcctagcattagcaggaatacctttcctcacaggtttctactccaaagaccacatcatcgaaaccgcaaacatatcatacacaaacgcctgagccctatctattactctcatcgctacctccctgacaagcgcctatagcactcgaataattcttctcaccctaacaggtcaacctcgcttccccacccttactaacattaacgaaaataaccccaccctactaaaccccattaaacgcctggcagccggaagcctattcgcaggatttctcattactaacaacatttcccccgcatcccccttccaaacaacaatccccctctacctaaaactcacagccctcgctgtcactttcctaggacttctaacagccctagacctcaactacctaaccaacaaacttaaaataaaatccccactatgcacattttatttctccaacatactcggattctaccctagcatcacacaccgcacaatcccctatctaggccttcttacgagccaaaacctgcccctactcctcctagacctaacctgactagaaaagctattacctaaaacaatttcacagcaccaaatctccacctccatcatcacctcaacccaaaaaggcataattaaactttacttcctctctttcttcttcccactcatcctaaccctactcctaatcacataacctattcccccgagcaatctcaattacaatatatacaccaacaaacaatgttcaaccagtaactactactaatcaacgcccataatcatacaaagcccccgcaccaataggatcctcccgaatcaaccctgacccctctccttcataaattattcagcttcctacactattaaagtttaccacaaccaccaccccatcatactctttcacccacagcaccaatcctacctccatcgctaaccccactaaaacactcaccaagacctcaacccctgacccccatgcctcaggatactcctcaatagccatcgctgtagtatatccaaagacaaccatcattccccctaaataaattaaaaaaactattaaacccatataacctcccccaaaattcagaataataacacacccgaccacaccgctaacaatcaatactaaacccccataaataggagaaggcttagaagaaaaccccacaaaccccattactaaacccacactcaacagaaacaaagcatacatcattattctcgcacggactacaaccacgaccaatgatatgaaaaaccatcgttgtatttcaactacaagaacaccaatgaccccaatacgcaaaactaaccccctaataaaattaattaaccactcattcatcgacctccccaccccatccaacatctccgcatgatgaaacttcggctcactccttggcgcctgcctgatcctccaaatcaccacaggactattcctagccatgcactactcaccagacgcctcaaccgccttttcatcaatcgcccacatcactcgagacgtaaattatggctgaatcatccgctaccttcacgccaatggcgcctcaatattctttatctgcctcttcctacacatcgggcgaggcctatattacggatcatttctctactcagaaacctgaaacatcggcattatcctcctgcttgcaactatagcaacagccttcataggctatgtcctcccgtgaggccaaatatcattctgaggggccacagtaattacaaacttactatccgccatcccatacattgggacagacctagttcaatgaatctgaggaggctactcagtagacagtcccaccctcacacgattctttacctttcacttcatcttgcccttcattattgcagccctagcagcactccacctcctattcttgcacgaaacgggatcaaacaaccccctaggaatcacctcccattccgataaaatcaccttccacccttactacacaatcaaagacgccctcggcttacttctcttccttctctccttaatgacattaacactattctcaccagacctcctaggcgacccagacaattataccctagccaaccccttaaacacccctccccacatcaagcccgaatgatatttcctattcgcctacacaattctccgatccgtccctaacaaactaggaggcgtccttgccctattactatccatcctcatcctagcaataatccccatcctccatatatccaaacaacaaagcataatatttcgcccactaagccaatcactttattgactcctagccgcagacctcctcattctaacctgaatcggaggacaaccagtaagctacccttttaccatcattggacaagtagcatccgtactatacttcacaacaatcctaatcctaataccaactatctccctaattgaaaacaaaatactcaaatgggcctgtccttgtagtataaactaatacaccagtcttgtaaaccggagatgaaaacctttttccaaggacaaatcagagaaaaagtctttaactccaccattagcacccaaagctaagattctaatttaaactattctctgttctttcatggggaagcagatttgggtaccacccaagtattgactcacccatcaacaaccgctatgtatttcgtacattactgccagccaccatgaatattgtacggtaccataaatacttgaccacctgtagtacataaaaacccaatccacatcaaaaccccctccccatgcttacaagcaagtacagcaatcaaccctcaactatcacacatcaactgcaactccaaagccacccctcacccactaggataccaacaaacctacccacccttaacagtacatagtacataaaaccatttaccgtacatagcacattacagtcaaatcccttctcgtccccatggatgacccccctcagataggggtcccttgaccaccatcctccgtgaaatcaatatcccgcacaagagtgctactctcctcgctccgggcccataacacttgggggtagctaaagtgaactgtatccgacatctggttcctacttcagggccataaagcctaaatagcccacacgttccccttaaataagacatcacgatg

SEQ ID NO: 7 - DNA, 16569 bp, Homo sapiens mitochondrial
  3107: "n" refers to a nucleotide at position 3107 of the Cambridge Reference Sequence (CRS, Anderson et al. 1981 Nature 290:457-465), later determined to be absent from the human mtDNA sequence according to the revised CRS (rCRS, Andrews et al. 1999 Nature Genetics 23:147); "n" therefore represents a single nucleotide deletion at a position corresponding to nucleotide 3107 of SEQ ID NO:1 as provided herein.
gatcacaggtctatcaccctattaaccactcacgggagctctccatgcatttggtattttcgtctggggggtatgcacgcgatagcattgcgagacgctggagccggagcaccctatgtcgcagtatctgtctttgattcctgcctcatcctattatttatcgcacctacgttcaatattacaggcgaacatacttactaaagtgtgttaattaattaatgcttgtaggacataataataacaattgaatgtctgcacagccactttccacacagacatcataacaaaaaatttccaccaaaccccccctcccccgcttctggccacagcacttaaacacatctctgccaaaccccaaaaacaaagaaccctaacaccagcctaaccagatttcaaattttatcttttggcggtatgcacttttaacagtcaccccccaactaacacattattttcccctcccactcccatactactaatctcatcaatacaacccccgcccatcctacccagcacacacacaccgctgctaaccccataccccgaaccaaccaaaccccaaagacaccccccacagtttatgtagcttacctcctcaaagcaatacactgaaaatgtttagacgggctcacatcaccccataaacaaataggtttggtcctagcctttctattagctcttagtaagattacacatgcaagcatccccgttccagtgagttcaccctctaaatcaccacgatcaaaaggaacaagcatcaagcacgcagcaatgcagctcaaaacgcttagcctagccacacccccacgggaaacagcagtgattaacctttagcaataaacgaaagtttaactaagctatactaaccccagggttggtcaatttcgtgccagccaccgcggtcacacgattaacccaagtcaatagaagccggcgtaaagagtgttttagatcaccccctccccaataaagctaaaactcacctgagttgtaaaaaactccagttgacacaaaatagactacgaaagtggctttaacatatctgaacacacaatagctaagacccaaactgggattagataccccactatgcttagccctaaacctcaacagttaaatcaacaaaactgctcgccagaacactacgagccacagcttaaaactcaaaggacctggcggtgcttcatatccctctagaggagcctgttctgtaatcgataaaccccgatcaacctcaccacctcttgctcagcctatataccgccatcttcagcaaaccctgatgaaggctacaaagtaagcgcaagtacccacgtaaagacgttaggtcaaggtgtagcccatgaggtggcaagaaatgggctacattttctaccccagaaaactacgatagcccttatgaaacttaagggtcgaaggtggatttagcagtaaactgagagtagagtgcttagttgaacagggccctgaagcgcgtacacaccgcccgtcaccctcctcaagtatacttcaaaggacatttaactaaaacccctacgcatttatatagaggagacaagtcgtaacatggtaagtgtactggaaagtgcacttggacgaaccagagtgtagcttaacacaaagcacccaacttacacttaggagatttcaacttaacttgaccgctctgagctaaacctagccccaaacccactccaccttactaccagacaaccttagccaaaccatttacccaaataaagtataggcgatagaaattgaaacctggcgcaatagatatagtaccgcaagggaaagatgaaaaattataaccaagcataatatagcaaggactaacccctataccttctgcataatgaattaactagaaataactttgcaaggagagccaaagctaagacccccgaaaccagacgagctacctaagaacagctaaaagagcacacccgtctatgtagcaaaatagtgggaagatttataggtagaggcgacaaacctaccgagcctggtgatagctggttgtccaagatagaatcttagttcaactttaaatttgcccacagaaccctctaaatccccttgtaaatttaactgttagtccaaagaggaacagctctttggacactaggaaaaaaccttgtagagagagtaaaaaatttaacacccatagtaggcctaaaagcagccaccaattaagaaagcgttcaagctcaacacccactacctaaaaaatcccaaacatataactgaactcctcacacccaattggaccaatctatcaccctatagaagaactaatgttagtataagtaacatgaaaacattctcctccgcataagcctgcgtcagattaaaacactgaactgacaattaacagcccaatatctacaatcaaccaacaagtcattattaccctcactgtcaacccaacacaggcatgctcataaggaaaggttaaaaaaagtaaaaggaactcggcaaatcttaccccgcctgtttaccaaaaacatcacctctagcatcaccagtattagaggcaccgcctgcccagtgacacatgtttaacggccgcggtaccctaaccgtgcaaaggtagcataatcacttgttccttaaatagggacctgtatgaatggctccacgagggttcagctgtctcttacttttaaccagtgaaattgacctgcccgtgaagaggcgggcataacacagcaagacgagaagaccctatggagctttaatttattaatgcaaacagtacctaacaaacccacaggtcctaaactaccaaacctgcattaaaaatttcggttggggcgacctcggagcagaacccaacctccgagcagtacatgctaagacttcaccagtcaaagcgaactactatactcaattgatccaataacttgaccaacggaacaagttaccctagggataacagcgcaatcctattctagagtccatatcaacaatagggtttacgacctcgatgttggatcaggacatcccgatggtgcagccgctattaaaggttcgtttgttcaacgattaaagtcctacgtgatctgagttcagaccggagtaatccaggtcggtttctatctacnttcaaattcctccctgtacgaaaggacaagagaaataaggcctacttcacaaagcgccttcccccgtaaatgatatcatctcaacttagtattatacccacacccacccaagaacagggtttgttaagatggcagagcccggtaatcgcataaaacttaaaactttacagtcagaggttcaattcctcttcttaacaacatacccatggccaacctcctactcctcattgtacccattctaatcgcaatggcattcctaatgcttaccgaacgaaaaattctaggctatatacaactacgcaaaggccccaacgttgtaggcccctacgggctactacaacccttcgctgacgccataaaactcttcaccaaagagcccctaaaacccgccacatctaccatcaccctctacatcaccgccccgaccttagctctcaccatcgctcttctactatgaacccccctccccatacccaaccccctggtcaacctcaacctaggcctcctatttattctagccacctctagcctagccgtttactcaatcctctgatcagggtgagcatcaaactcaaactacgccctgatcggcgcactgcgagcagtagcccaaacaatctcatatgaagtcaccctagccatcattctactatcaacattactaataagtggctcctttaacctctccacccttatcacaacacaagaacacctctgattactcctgccatcatgacccttggccataatatgatttatctccacactagcagagaccaaccgaacccccttcgaccttgccgaaggggagtccgaactagtctcaggcttcaacatcgaatacgccgcaggccccttcgccctattcttcatagccgaatacacaaacattattataataaacaccctcaccactacaatcttcctaggaacaacatatgacgcactctcccctgaactctacacaacatattttgtcaccaagaccctacttctaacctccctgttcttatgaattcgaacagcatacccccgattccgctacgaccaactcatacacctcctatgaaaaaacttcctaccactcaccctagcattacttatatgatatgtctccatacccattacaatctccagcattccccctcaaacctaagaaatatgtctgataaaagagttactttgatagagtaaataataggagcttaaacccccttatttctaggactatgagaatcgaacccatccctgagaatccaaaattctccgtgccacctatcacaccccatcctaaagtaaggtcagctaaataagctatcgggcccataccccgaaaatgttggttatacccttcccgtactaattaatcccctggcccaacccgtcatctactctaccatctttgcaggcacactcatcacagcgctaagctcgcactgattttttacctgagcaggcctagaaataaacatgctagcttttattccagttctaaccaaaaaaataaaccctcgttccacagaagctgccatcaagtatttcctcacgcaagcaaccgcatccataatccttctaatagctatcctcttcaacaatatactctccggacaatgaaccataaccaatactaccaatcaatactcatcattaataatcataatggctatagcaataaaactaggaatagccccctttcacttctgagtcccagaggttacccaaggcacccctctgacatccggcctgcttcttctcacatgacaaaaactagcccccatctcaatcatataccaaatctctccctcactaaacgtaagccttctcctcactctctcaatcttatccatcatagcaggcagttgaggtggattaaaccaaacccagctacgcaaaatcttagcatactcctcaattacccacataggatgaataatagcagttctaccgtacaaccctaacataaccattcttaatttaactatttatattatcctaactactaccgcattcctactactcaacttaaactccagcaccacgaccctactactatctcgcacctgaaacaagctaacatgactaacacccttaattccatccaccctcctctccctaggaggcctgcccccgctaaccggctttttgcccaaatgggccattatcgaagaattcacaaaaaacaatagcctcatcatccccaccatcatagccaccatcaccctccttaacctctacttctacctacgcctaatctactccacctcaatcacactactccccatatctaacaacgtaaaaataaaatgacagtttgaacatacaaaacccaccccattcctccccacactcatcgcccttaccacgctactcctacctatctccccttttatactaataatcttatagaaatttaggttaaatacagaccaagagccttcaaagccctcagtaagttgcaatacttaatttctgtaacagctaaggactgcaaaaccccactctgcatcaactgaacgcaaatcagccactttaattaagctaagcccttactagaccaatgggacttaaacccacaaacacttagttaacagctaagcaccctaatcaactggcttcaatctacttctcccgccgccgggaaaaaaggcgggagaagccccggcaggtttgaagctgcttcttcgaatttgcaattcaatatgaaaatcacctcggagctggtaaaaagaggcctaacccctgtctttagatttacagtccaatgcttcactcagccattttacctcacccccactgatgttcgccgaccgttgactattctctacaaaccacaaagacattggaacactatacctattattcggcgcatgagctggagtcctaggcacagctctaagcctccttattcgagccgagctgggccagccaggcaaccttctaggtaacgaccacatctacaacgttatcgtcacagcccatgcatttgtaataatcttcttcatagtaatacccatcataatcggaggctttggcaactgactagttcccctaataatcggtgcccccgatatggcgtttccccgcataaacaacataagcttctgactcttacctccctctctcctactcctgctcgcatctgctatagtggaggccggagcaggaacaggttgaacagtctaccctcccttagcagggaactactcccaccctggagcctccgtagacctaaccatcttctccttacacctagcaggtgtctcctctatcttaggggccatcaatttcatcacaacaattatcaatataaaaccccctgccataacccaataccaaacgcccctcttcgtctgatccgtcctaatcacagcagtcctacttctcctatctctcccagtcctagctgctggcatcactatactactaacagaccgcaacctcaacaccaccttcttcgaccccgccggaggaggagaccccattctataccaacacctattctgatttttcggtcaccctgaagtttatattcttatcctaccaggcttcggaataatctcccatattgtaacttactactccggaaaaaaagaaccatttggatacataggtatggtctgagctatgatatcaattggcttcctagggtttatcgtgtgagcacaccatatatttacagtaggaatagacgtagacacacgagcatatttcacctccgctaccataatcatcgctatccccaccggcgtcaaagtatttagctgactcgccacactccacggaagcaatatgaaatgatctgctgcagtgctctgagccctaggattcatctttcttttcaccgtaggtggcctgactggcattgtattagcaaactcatcactagacatcgtactacacgacacgtactacgttgtagcccacttccactatgtcctatcaataggagctgtatttgccatcataggaggcttcattcactgatttcccctattctcaggctacaccctagaccaaacctacgccaaaatccatttcactatcatattcatcggcgtaaatctaactttcttcccacaacactttctcggcctatccggaatgccccgacgttactcggactaccccgatgcatacaccacatgaaacatcctatcatctgtaggctcattcatttctctaacagcagtaatattaataattttcatgatttgagaagccttcgcttcgaagcgaaaagtcctaatagtagaagaaccctccataaacctggagtgactatatggatgccccccaccctaccacacattcgaagaacccgtatacataaaatctaaacaaaaaaggaaggaatcgaaccccccaaagctggtttcaagccaaccccatggcctccatgactttttcaaaaaggtattagaaaaaccatttcataactttgtcaaagttaaattataggctaaatcctatatatcttaatggcacatgcagcgcaagtaggtctacaagacgccacttcccctatcatagaagagcttatcacctttcatgatcacgccctcataatcatcttccttatctgcttcctagtcctgtatgcccttttcctaacactcacaacaaaactaactaatactaacatctcagacgctcaggaaatagaaaccgtctgaactatcctgcccgccatcatcctagtcctcatcgccctcccatccctacgcatcctttacataacagacgaggtcaacgatccctcccttaccatcaaatcaattggccaccaatggtactgaacctacgagtacaccgactacggcggactaatcttcaactcctacatacttcccccattattcctagaaccaggcgacctgcgactccttgacgttgacaatcgagtagtactcccgattgaagcccccattcgtataataattacatcacaagacgtcttgcactcatgagctgtccccacattaggcttaaaaacagatgcaattcccggacgtctaaaccaaaccactttcaccgctacacgaccgggggtatactacggtcaatgctctgaaatctgtggagcaaaccacagtttcatgcccatcgtcctagaattaattcccctaaaaatctttgaaatagggcccgtatttaccctatagcaccccctctaccccctctagagcccactgtaaagctaacttagcattaaccttttaagttaaagattaagagaaccaacacctctttacagtgaaatgccccaactaaatactaccgtatggcccaccataattacccccatactccttacactattcctcatcacccaactaaaaatattaaacacaaactaccacctacctccctcaccaaagcccataaaaataaaaaattataacaaaccctgagaaccaaaatgaacgaaaatctgttcgcttcattcattgcccccacaatcctaggcctacccgccgcagtactgatcattctatttccccctctattgatccccacctccaaatatctcatcaacaaccgactaatcaccacccaacaatgactaatcaaactaacctcaaaacaaatgataaccatacacaacactaaaggacgaacctgatctcttatactagtatccttaatcatttttattgccacaactaacctcctcggactcctgcctcactcatttacaccaaccacccaactatctataaacctagccatggccatccccttatgagcgggcgcagtgattataggctttcgctctaagattaaaaatgccctagcccacttcttaccacaaggcacacctacaccccttatccccatactagttattatcgaaaccatcagcctactcattcaaccaatagccctggccgtacgcctaaccgctaacattactgcaggccacctactcatgcacctaattggaagcgccaccctagcaatatcaaccattaaccttccctctacacttatcatcttcacaattctaattctactgactatcctagaaatcgctgtcgccttaatccaagcctacgttttcacacttctagtaagcctctacctgcacgacaacacataatgacccaccaatcacatgcctatcatatagtaaaacccagcccatgacccctaacaggggccctctcagccctcctaatgacctccggcctagccatgtgatttcacttccactccataacgctcctcatactaggcctactaaccaacacactaaccatataccaatgatggcgcgatgtaacacgagaaagcacataccaaggccaccacacaccacctgtccaaaaaggccttcgatacgggataatcctatttattacctcagaagtttttttcttcgcaggatttttctgagccttttaccactccagcctagcccctaccccccaattaggagggcactggcccccaacaggcatcaccccgctaaatcccctagaagtcccactcctaaacacatccgtattactcgcatcaggagtatcaatcacctgagctcaccatagtctaatagaaaacaaccgaaaccaaataattcaagcactgcttattacaattttactgggtctctattttaccctcctacaagcctcagagtacttcgagtctcccttcaccatttccgacggcatctacggctcaacattttttgtagccacaggcttccacggacttcacgtcattattggctcaactttcctcactatctgcttcatccgccaactaatatttcactttacatccaaacatcactttggcttcgaagccgccgcctgatactggcattttgtagatgtggtttgactatttctgtatgtctccatctattgatgagggtcttactcttttagtataaatagtaccgttaacttccaattaactagttttgacaacattcaaaaaagagtaataaacttcgccttaattttaataatcaacaccctcctagccttactactaataattattacattttgactaccacaactcaacggctacatagaaaaatccaccccttacgagtgcggcttcgaccctatatcccccgcccgcgtccctttctccataaaattcttcttagtagctattaccttcttattatttgatctagaaattgccctccttttacccctaccatgagccctacaaacaactaacctgccactaatagttatgtcatccctcttattaatcatcatcctagccctaagtctggcctatgagtgactacaaaaaggattagactgaaccgaattggtatatagtttaaacaaaacgaatgatttcgactcattaaattatgataatcatatttaccaaatgcccctcatttacataaatattatactagcatttaccatctcacttctaggaatactagtatatcgctcacacctcatatcctccctactatgcctagaaggaataatactatcgctgttcattatagctactctcataaccctcaacacccactccctcttagccaatattgtgcctattgccatactagtctttgccgcctgcgaagcagcggtgggcctagccctactagtctcaatctccaacacatatggcctagactacgtacataacctaaacctactccaatgctaaaactaatcgtcccaacaattatattactaccactgacatgactttccaaaaaacacataatttgaatcaacacaaccacccacagcctaattattagcatcatccctctactattttttaaccaaatcaacaacaacctatttagctgttccccaaccttttcctccgaccccctaacaacccccctcctaatactaactacctgactcctacccctcacaatcatggcaagccaacgccacttatccagtgaaccactatcacgaaaaaaactctacctctctatactaatctccctacaaatctccttaattataacattcacagccacagaactaatcatattttatatcttcttcgaaaccacacttatccccaccttggctatcatcacccgatgaggcaaccagccagaacgcctgaacgcaggcacatacttcctattctacaccctagtaggctcccttcccctactcatcgcactaatttacactcacaacaccctaggctcactaaacattctactactcactctcactgcccaagaactatcaaactcctgagccaacaacttaatatgactagcttacacaatagcttttatagtaaagatacctctttacggactccacttatgactccctaaagcccatgtcgaagcccccatcgctgggtcaatagtacttgccgcagtactcttaaaactaggcggctatggtataatacgcctcacactcattctcaaccccctgacaaaacacatagcctaccccttccttgtactatccctatgaggcataattataacaagctccatctgcctacgacaaacagacctaaaatcgctcattgcatactcttcaatcagccacatagccctcgtagtaacagccattctcatccaaaccccctgaagcttcaccggcgcagtcattctcataatcgcccacgggcttacatcctcattactattctgcctagcaaactcaaactacgaacgcactcacagtcgcatcataatcctctctcaaggacttcaaactctactcccactaatagctttttgatgacttctagcaagcctcgctaacctcgccttaccccccactattaacctactgggagaactctctgtgctagtaaccacgttctcctgatcaaatatcactctcctacttacaggactcaacatactagtcacagccctatactccctctacatatttaccacaacacaatggggctcactcacccaccacattaacaacataaaaccctcattcacacgagaaaacaccctcatgttcatacacctatcccccattctcctcctatccctcaaccccgacatcattaccgggttttcctcttgtaaatatagtttaaccaaaacatcagattgtgaatctgacaacagaggcttacgaccccttatttaccgagaaagctcacaagaactgctaactcatgcccccatgtctaacaacatggctttctcaacttttaaaggataacagctatccattggtcttaggccccaaaaattttggtgcaactccaaataaaagtaataaccatgcacactactataaccaccctaaccctgacttccctaattccccccatccttaccaccctcgttaaccctaacaaaaaaaactcatacccccattatgtaaaatccattgtcgcatccacctttattatcagtctcttccccacaacaatattcatgtgcctagaccaagaagttattatctcgaactgacactgagccacaacccaaacaacccagctctccctaagcttcaaactagactacttctccataatattcatccctgtagcattgttcgttacatggtccatcatagaattctcactgtgatatataaactcagacccaaacattaatcagttcttcaaatatctactcatcttcctaattaccatactaatcttagttaccgctaacaacctattccaactgttcatcggctgagagggcgtaggaattatatccttcttgctcatcagttgatgatacgcccgagcagatgccaacacagcagccattcaagcaatcctatacaaccgtatcggcgatatcggtttcatcctcgccttagcatgatttatcctacactccaactcatgagacccacaacaaatagcccttctaaacgctaatccaagcctcaccccactactaggcctcctcctagcagcagcaggcaaatcagcccaattaggtctccacccctgactcccctcagccatagaaggccccaccccagtctcagccctactccactcaagcactatagttgtagcaggaatcttcttactcatccgcttccaccccctagcagaaaatagcccactaatccaaactctaacactatgcttaggcgctatcaccactctgttcgcagcagtctgcgcccttacacaaaatgacatcaaaaaaatcgtagccttctccacttcaagtcaactaggactcataatagttacaatcggcatcaaccaaccacacctagcattcctgcacatctgtacccacgccttcttcaaagccatactatttatgtgctccgggtccatcatccacaaccttaacaatgaacaagatattcgaaaaataggaggactactcaaaaccatacctctcacttcaacctccctcaccattggcagcctagcattagcaggaatacctttcctcacaggtttctactccaaagaccacatcatcgaaaccgcaaacatatcatacacaaacgcctgagccctatctattactctcatcgctacctccctgacaagcgcctatagcactcgaataattcttctcaccctaacaggtcaacctcgcttccccacccttactaacattaacgaaaataaccccaccctactaaaccccattaaacgcctggcagccggaagcctattcgcaggatttctcattactaacaacatttcccccgcatcccccttccaaacaacaatccccctctacctaaaactcacagccctcgctgtcactttcctaggacttctaacagccctagacctcaactacctaaccaacaaacttaaaataaaatccccactatgcacattttatttctccaacatactcggattctaccctagcatcacacaccgcacaatcccctatctaggccttcttacgagccaaaacctgcccctactcctcctagacctaacctgactagaaaagctattacctaaaacaatttcacagcaccaaatctccacctccatcatcacctcaacccaaaaaggcataattaaactttacttcctctctttcttcttcccactcatcctaaccctactcctaatcacataacctattcccccgagcaatctcaattacaatatatacaccaacaaacaatgttcaaccagtaactactactaatcaacgcccataatcatacaaagcccccgcaccaataggatcctcccgaatcaaccctgacccctctccttcataaattattcagcttcctacactattaaagtttaccacaaccaccaccccatcatactctttcacccacagcaccaatcctacctccatcgctaaccccactaaaacactcaccaagacctcaacccctgacccccatgcctcaggatactcctcaatagccatcgctgtagtatatccaaagacaaccatcattccccctaaataaattaaaaaaactattaaacccatataacctcccccaaaattcagaataataacacacccgaccacaccgctaacaatcaatactaaacccccataaataggagaaggcttagaagaaaaccccacaaaccccattactaaacccacactcaacagaaacaaagcatacatcattattctcgcacggactacaaccacgaccaatgatatgaaaaaccatcgttgtatttcaactacaagaacaccaatgaccccaatacgcaaaactaaccccctaataaaattaattaaccactcattcatcgacctccccaccccatccaacatctccgcatgatgaaacttcggctcactccttggcgcctgcctgatcctccaaatcaccacaggactattcctagccatgcactactcaccagacgcctcaaccgccttttcatcaatcgcccacatcactcgagacgtaaattatggctgaatcatccgctaccttcacgccaatggcgcctcaatattctttatctgcctcttcctacacatcgggcgaggcctatattacggatcatttctctactcagaaacctgaaacatcggcattatcctcctgcttgcaactatagcaacagccttcataggctatgtcctcccgtgaggccaaatatcattctgaggggccacagtaattacaaacttactatccgccatcccatacattgggacagacctagttcaatgaatctgaggaggctactcagtagacagtcccaccctcacacgattctttacctttcacttcatcttgcccttcattattgcagccctagcagcactccacctcctattcttgcacgaaacgggatcaaacaaccccctaggaatcacctcccattccgataaaatcaccttccacccttactacacaatcaaagacgccctcggcttacttctcttccttctctccttaatgacattaacactattctcaccagacctcctaggcgacccagacaattataccctagccaaccccttaaacacccctccccacatcaagcccgaatgatatttcctattcgcctacacaattctccgatccgtccctaacaaactaggaggcgtccttgccctattactatccatcctcatcctagcaataatccccatcctccatatatccaaacaacaaagcataatatttcgcccactaagccaatcactttattgactcctagccgcagacctcctcattctaacctgaatcggaggacaaccagtaagctacccttttaccatcattggacaagtagcatccgtactatacttcacaacaatcctaatcctaataccaactatctccctaattgaaaacaaaatactcaaatgggcctgtccttgtagtataaactaatacaccagtcttgtaaaccggagatgaaaacctttttccaaggacaaatcagagaaaaagtctttaactccaccattagcacccaaagctaagattctaatttaaactattctctgttctttcatggggaagcagatttgggtaccacccaagtattgactcacccatcaacaaccgctatgtatttcgtacattactgccagccaccatgaatattgtacggtaccataaatacttgaccacctgtagtacataaaaacccaatccacatcaaaaccccctccccatgcttacaagcaagtacagcaatcaaccctcaactatcacacatcaactgcaactccaaagccacccctcacccactaggataccaacaaacctacccacccttaacagtacatagtacataaagccatttaccgtacatagcacattacagtcaaatcccttctcgtccccatggatgacccccctcagataggggtcccttgaccaccatcctccgtgaaatcaatatcccgcacaagagtgctactctcctcgctccgggcccataacacttgggggtagctaaagtgaactgtatccgacatctggttcctacttcagggccataaagcctaaatagcccacacgttccccttaaataagacatcacgatg

SEQ ID NO: 8 - DNA, 16570 bp, Homo sapiens mitochondrial
  3108: "n" refers to a nucleotide at position 3107 of the Cambridge Reference Sequence (CRS, Anderson et al. 1981 Nature 290:457-465), later determined to be absent from the human mtDNA sequence according to the revised CRS (rCRS, Andrews et al. 1999 Nature Genetics 23:147); "n" therefore represents a single nucleotide deletion at a position corresponding to nucleotide 3107 of SEQ ID NO:1 as provided herein.
gatcacaggtctatcaccctattaaccactcacgggagctctccatgcatttggtattttcgtctggggggtgtgcacgcgatagcattgcgagacgctggagccggagcaccctatgtcgcagtatctgtctttgattcctgcctcatcctattatttatcgcacctacgttcaatattacaggcgaacatacttactaaagtgtgttaattaattaatgcttgtaggacataataataacaattgaatgtctgcacagccgctttccacacagacatcataacaaaaaatttccaccaaaccccccctcccccgccttctggccacagcacttaaacacatctctgccaaaccccaaaaacaaagaaccctaacaccagcctaaccagatttcaaattttatcttttggcggtatgcacttttaacagtcaccccccaactaacacattattttcccctcccactcccatactactaatctcatcaatacaacccccgcccatcctacccagcacacacacaccgctgctaaccccataccccgaaccaaccaaaccccaaagacaccccccacagtttatgtagcttacctcctcaaagcaatacactgaaaatgtttagacgggctcacatcaccccataaacaaataggtttggtcctagcctttctattagctcttagtaagattacacatgcaagcatccccattccagtgagttcaccctctaaatcaccacgatcaaaagggacaagcatcaagcacgcagcaatgcagctcaaaacgcttagcctagccacacccccacgggaaacagcagtgattaacctttagcaataaacgaaagtttaactaagctatactaaccccagggttggtcaatttcgtgccagccaccgcggtcacacgattaacccaagtcaatagaagccggcgtaaagagtgttttagatcaccccctccccaataaagctaaaactcacctgagttgtaaaaaactccagttgacacaaaatagactacgaaagtggctttaacatatctgaacacacaatagctaagacccaaactgggattagataccccactatgcttagccctaaacctcaacagttaaatcaacaaaactgctcgccagaacactacgagccacagcttaaaactcaaaggacctggcggtgcttcatatccctctagaggagcctgttctgtaatcgataaaccccgatcaacctcaccacctcttgctcagcctatataccgccatcttcagcaaaccctgatgaaggctacaaagtaagcgcaagtacccacgtaaagacgttaggtcaaggtgtagcccatgaggtggcaagaaatgggctacattttctaccccagaaaactacgatagcccttatgaaacttaagggtcgaaggtggatttagcagtaaactgagagtagagtgcttagttgaacagggccctgaagcgcgtacacaccgcccgtcaccctcctcaagtatacttcaaaggacatttaactaaaacccctacgcatttatatagaggagacaagtcgtaacatggtaagtgtactggaaagtgcacttggacgaaccagagtgtagcttaacacaaagcacccaacttacacttaggagatttcaacttaacttgaccgctctgagctaaacctagccccaaacccactccaccttactaccagacaaccttagccaaaccatttacccaaataaagtataggcgatagaaattgaaacctggcgcaatagatatagtaccgcaagggaaagatgaaaaattataaccaagcataatatagcaaggactaacccctataccttctgcataatgaattaactagaaataactttgcaaggagaaccaaagctaagacccccgaaaccagacgagctacctaagaacagctaaaagagcacacccgtctatgtagcaaaatagtgggaagatttataggtagaggcgacaaacctaccgagcctggtgatagctggttgtccaagatagaatcttagttcaactttaaatttgcccacagaaccctctaaatccccttgtaaatttaactgttagtccaaagaggaacagctctttggacactaggaaaaaaccttgtagagagagtaaaaaatttaacacccatagtaggcctaaaagcagccaccaattaagaaagcgttcaagctcaacacccactacctaaaaaatcccaaacatataactgaactcctcacacccaattggaccaatctatcaccctatagaagaactaatgttagtataagtaacatgaaaacattctcctccgcataagcctgcgtcagattaaaacactgaactgacaattaacagcccaatatctacaatcaaccaacaagtcattattaccctcactgtcaacccaacacaggcatgctcataaggaaaggttaaaaaaagtaaaaggaactcggcaaatcttaccccgcctgtttaccaaaaacatcacctctagcatcaccagtattagaggcaccgcctgcccagtgacacatgtttaacggccgcggtaccctaaccgtgcaaaggtagcataatcacttgttccttaaatagggacctgtatgaatggctccacgagggttcagctgtctcttacttttaaccagtgaaattgacctgcccgtgaagaggcgggcatgacacagcaagacgagaagaccctatggagctttaatttattaatgcaaacagtacctaacaaacccacaggtcctaaactaccaaacctgcattaaaaatttcggttggggcgacctcggagcagaacccaacctccgagcagcacatgctaagacttcaccagtcaaagcgaactactatactcaattgatccaataacttgaccaacggaacaagttaccctagggataacagcgcaatcctattctagagtccatatcaacaatagggtttacgacctcgatgttggatcaggacatcccgatggtgcagccgctattaaaggttcgtttgttcaacgattaaagtcctacgtgatctgagttcagaccggagtaatccaggtcggtttctatctacnttcaaattcctccctgtacgaaaggacaagagaaataaggcctacttcacaaagcgccttcccccgtaaatgatatcatctcaacttagtattatacccacacccacccaagaacagggtttgttaagatggcagagcccggtaatcgcataaaacttaaaactttacagtcagaggttcaattcctcttcttaacaacatacccatggccaacctcctactcctcattgtacccattctaatcgcaatggcattcctaatgcttaccgaacgaaaaattctaggctatatacaactacgcaaaggccccaacgttgtaggcccctacgggctactacaacccttcgctgacgccataaaactcttcaccaaagagcccctaaaacccgccacatctaccatcaccctctacatcaccgccccgaccttagctctcaccatcgctcttctactatgaacccccctccccatacccaaccccctggtcaacctcaacctaggcctcctatttattctagccacctctagcctagccgtttactcaatcctctgatcagggtgagcatcaaactcaaactacgccctgatcggcgcactgcgagcagtagcccaaacaatctcatatgaagtcaccctagccatcattctactatcaacattactaataagtggctcctttaacctctccacccttatcacaacacaagaacacctctgattactcctgccatcatgacccttggccataatatgatttatctccacactagcagagaccaaccgaacccccttcgaccttgccgaaggggagtccgaactagtctcaggcttcaacatcgaatacgccgcaggccccttcgccctattcttcatagccgaatacacaaacattattataataaacaccctcaccactacaatcttcctaggaacaacatatgacgcactctcccctgaactctacacaacatattttgtcaccaagaccctacttctaacctccctgttcttatgaattcgaacagcatacccccgattccgctacgaccaactcatacacctcctatgaaaaaacttcctaccactcaccctagcattacttatatgacatgtctccatacccattacaatctccagcattccccctcaaacctaagaaatatgtctgataaaagagttactttgatagagtaaataataggagcttaaacccccttatttctaggactatgagaatcgaacccatccctgagaatccaaaattctccgtgccacctatcacaccccatcctaaagtaaggtcagctaaataagctatcgggcccataccccgaaaatgttggttatacccttcccgtactaattaatcccctggcccaacccgtcatctactctaccatctttgcaggcacactcatcacagcgctaagctcgcactgattttttacctgagtaggcctagaaataaacatgctagcttttattccagttctaaccaaaaaaataaaccctcgttccacagaagctgccatcaagtatttcctcacgcaagcaaccgcatccataatccttctaatagccatcctcttcaacaatatactctccggacaatgaaccataaccaatactaccaatcaatactcatcattaataatcataatggctatagcaataaaactaggaatagccccctttcacttctgagtcccagaggttacccaaggcacccctctgacatccggcctgcttcttctcacatgacaaaaactagcccccatctcaatcatataccaaatctctccctcactagacgtaagccttctcctcactctctcaatcttatccatcatagcaggcagttgaggtggattaaaccaaacccagctacgcaaaatcttagcatactcctcaattacccacataggatgaataatagcagttctaccgtacaaccctaacataaccattcttaatttaactatttatattatcctaactactaccgcattcctactactcaacttaaactccagcaccacgaccctactactatctcgcacctgaaacaagctaacatgactaacacccttaattccatccaccctcctctccctaggaggcctgcccccgctaaccggctttttgcccaaatgggccattatcgaagaattcacaaaaaacaatagcctcatcatccccaccatcatagccaccatcaccctccttaacctctacttctacctacgcctaatctactccacctcaatcacactactccccatatctaacaacgtaaaaataaaatgacagtttgaacatacaaaacccaccccattcctccccacactcatcgcccttaccacgctactcctacctatctccccttttatactaataatcttatagaaatttaggttaaatacagaccaagagccttcaaagccctcagtaagttgcaatacttaatttctgtaacagctaaggactgcaaaaccccactctgcatcaactgaacgcaaatcagccactttaattaagctaagcccttactagaccaatgggacttaaacccacaaacacttagttaacagctaagcaccctaatcaactggcttcaatctacttctcccgccgccgggaaaaaaggcgggagaagccccggcaggtttgaagctgcttcttcgaatttgcaattcaatatgaaaatcacctcggagctggtaaaaagaggcctaacccctgtctttagatttacagtccaatgcttcactcagccattttacctcacccccactgatgttcgccgaccgttgactattctctacaaaccacaaagacattggaacactatacctattattcggcgcatgagctggagtcctaggcacagctctaagcctccttattcgagccgagctgggccagccaggcaaccttctaggtaacgaccacatctacaacgttatcgtcacagcccatgcatttgtaataatcttcttcatagtaatacccatcataatcggaggctttggcaactgactagttcccctaataatcggtgcccccgatatggcgtttccccgcataaacaacataagcttctgactcttacctccctctctcctactcctgctcgcatctgctatagtggaggccggagcaggaacaggttgaacagtctaccctcccttagcagggaactactcccaccctggagcctccgtagacctaaccatcttctccttacacctagcaggtgtctcctctatcttaggggccatcaatttcatcacaacaattatcaatataaaaccccctgccataacccaataccaaacgcccctcttcgtctgatccgtcctaatcacagcagtcctacttctcctatctctcccagtcctagctgctggcatcactatactactaacagaccgcaacctcaacaccaccttcttcgaccccgccggaggaggagaccccattctataccaacacctattctgatttttcggtcaccctgaagtttatattcttatcctaccaggcttcggaataatctcccatattgtaacttactactccggaaaaaaagaaccatttggatacataggtatggtctgagctatgatatcaattggcttcctagggtttatcgtgtgagcacaccatatatttacagtaggaatagacgtagacacacgagcatatttcacctccgctaccataatcatcgctatccccaccggcgtcaaagtatttagctgactcgccacactccacggaagcaatatgaaatgatctgctgcagtgctctgagccctaggattcatctttcttttcaccgtaggtggcctgactggcattgtattagcaaactcatcactagacatcgtactacacgacacgtactacgtcgtagctcacttccactatgtcctatcaataggagctgtatttgccatcataggaggcttcattcactgatttcccctattctcaggctacaccctagaccaaacctacgccaaaatccatttcactatcatattcatcggcgtaaatctaactttcttcccacaacactttctcggcctatccggaatgccccgacgttactcggactaccccgatgcatacaccacatgaaacatcctatcatctgtaggctcattcatttctctaacagcagtagtattaataattttcatgatttgagaagccttcgcttcgaagcgaaaagtcctaatagtagaagaaccctccataaacctggagtgactatatggatgccccccaccctaccacacattcgaagaacccgtatacataaaatctagacaaaaaaggaaggaatcgaaccccccaaagctggtttcaagccaaccccatggcctccatgactttttcaaaaaggtattagaaaaaccatttcataactttgtcaaagttaaattataggctaaatcctatatatcttaatggcacatgcagcgcaagtaggtctacaagacgctacttcccctatcatagaagagcttatcacctttcatgatcacgccctcataatcattttccttatctgcttcctagtcctgtatgcccttttcctaacactcacaacaaaactaactaatactaacatctcagacgctcaggaaatagaaaccgtctgaactatcctgcccgccatcatcctagtcctcatcgccctcccatccctacgcatcctttacataacagacgaggtcaacgatccctcccttaccatcaaatcaattggccaccaatggtactgaacctacgagtacaccgactacggcggactaatcttcaactcctacatacttcccccattattcctagaaccaggcgacctgcgactccttgacgttgacaatcgagtagtactcccgattgaagcccccattcgtataataattacatcacaagacgtcttgcactcatgagctgtccccacattaggcttaaaaacagatgcaattcccggacgtctaaaccaaaccactttcaccgctacacgaccgggggtatactacggtcaatgctctgaaatctgtggagcaaaccacagtttcatgcccatcgtcctagaattaattcccctaaaaatctttgaaatagggcccgtatttaccctatagcaccccctctaccccctctagagcccactgtaaagctaacttagcattaaccttttaagttaaagattaagagaaccaacacctctttacagtgaaatgccccaactaaatactaccgtatggcccaccataattacccccatactccttacactattcctcatcacccaactaaaaatattaaacacaaactaccacctacctccctcaccaaagcccataaaaataaaaaattataacaaaccctgagaaccaaaatgaacgaaaatctgttcgcttcattcattgcccccacaatcctaggcctacccgccgcagtactgatcattctatttccccctctattgatccccacctccaaatatctcatcaacaaccgactaatcaccacccaacaatgactaatcaaactaacctcaaaacaaataataaccatacacaacactaaaggacgaacctgatctcttatactagtatccttaatcatttttattgccacaactaacctcctcggactcctgcctcactcatttacaccaaccacccaactatctataaacctagccatggccatccccttatgagcgggcgcagtgattataggctttcgctctaagattaaaaatgccctagcccacttcttaccacaaggcacacctacaccccttatccccatactagttattatcgaaaccatcagcctactcattcaaccaatagccctggccgtacgcctaaccgctaacattactgcaggccacctactcatgcacctaattggaagcgccaccctagcaatatcaaccattaaccttccctctacacttatcatcttcacaattctaattctactgactatcctagaaatcgctgtcgccttaatccaagcctacgttttcacacttctagtaagcctctacctgcacgacaacacataatgacccaccaatcacatgcctatcatatagtaaaacccagcccatgacccctaacaggggccctctcagccctcctaatgacctccggcctagccatgtgatttcacttccactccataacgctcctcatactaggcctactaaccaacacactaaccatataccaatgatggcgcgatgtaacacgagaaagcacataccaaggccaccacacaccacctgtccaaaaaggccttcgatacgggataatcctatttattacctcagaagtttttttcttcgcaggatttttctgagccttttaccactccagcctagcccctaccccccaattaggagggcactggcccccaacaggcatcaccccgctaaatcccctagaagtcccactcctaaacacatccgtattactcgcatcaggagtatcaatcacctgagctcaccatagtctaatagaaaacaaccgaaaccaaataattcaagcactgcttattacaattttactgggtctctattttaccctcctacaagcctcagagtacttcgagtctcccttcaccatttccgacggcatctacggctcaacattttttgtagccacaggcttccacggacttcacgtcattattggctcaactttcctcactatctgcttcatccgccaactaatatttcactttacatccaaacatcactttggcttcgaagccgccgcctgatactggcattttgtagatgtggtttgactatttctgtatgtctccatctattgatgagggtcttactcttttagtataaatagtaccgttaacttccaattaactagttttgacaacattcaaaaaagagtaataaacttcgccttaattttaataatcaacaccctcctagccttactactaataattattacattttgactaccacaactcaacggctacatagaaaaatccaccccttacgagtgcggcttcgaccctatatcccccgcccgcgtccctttctccataaaattcttcttagtagctattaccttcttattatttgatctagaaattgccctccttttacccctaccatgagccctacaaacaactaacctgccactaatagttatgtcatccctcttattaatcatcatcctagccctaagtctggcctatgagtgactacaaaaaggattagactgaaccgaattggtatatagtttaaacaaaacgaatgatttcgactcattaaattatgataatcatatctaccaaatgcccctcatttacataaatattatactagcatttaccatctcacttctaggaatactagtatatcgctcacacctcatatcctccctactatgcctagaaggaataatactatcgctgttcattatagctactctcataaccctcaacacccactccctcttagccaatattgtgcctattgccatactagtctttgccgcctgcgaagcagcggtgggcctagccctactagtctcaatctccaacacatatggcctagactacgtacataacctaaacctactccaatgctaaaactaatcgtcccaacaattatattactaccactgacatgactttccaaaaaacacataatttgaatcaacacaaccacccacagcctaattattagcatcatccctctactattttttaaccaaatcaacaacaacctatttagctgttccccaaccttttcctccgaccccctaacaacccccctcctaatactaactacctgactcctacccctcacaatcatggcaagccaacgccacttatccagtgaaccactatcacgaaaaaaactctacctctctatactaatctccctacaaatctccttaattataacattcacagccacagaactaatcatattttatatcttcttcgaaaccacacttatccccaccttggctatcatcacccgatgaggcaaccagccagaacgcctgaacgcaggcacatacttcctattctacaccctagtaggctcccttcccctactcatcgcactgatttacactcacaacaccctaggctcactaaacattctactactcactctcactgcccaagaactatcaaactcctgagccaacaacttaatatgactagcttacacaatagcttttatagtaaagatacctctttacggactccacttatgactccctaaagcccatgtcgaagcccccatcgctgggtcaatagtacttgccgcagtactcttaaaactaggcggctatggtataatacgcctcacactcattctcaaccccctgacaaaacacatagcctaccccttccttgtactatccctatgaggcataattataacaagctccatctgcctacgacaaacagacctaaaatcgctcattgcatactcttcaatcagccacatagccctcgtagtaacagccattctcatccaaaccccctgaagcttcaccggcgcagtcattctcataatcgcccacggacttacatcctcattactattctgcctagcaaactcaaactacgaacgcactcacagtcgcatcataatcctctctcaaggacttcaaactctgctcccactaatagctttttgatgacttctagcaagcctcgctaacctcgccttaccccccactattaacctactgggagaactctctgtgctagtaaccacgttctcctgatcaaatatcactctcctacttacaggactcaacatactagtcacagccctatactccctctacatatttaccacaacacaatggggctcactcacccaccacattaacaacataaaaccctcattcacacgagaaaacaccctcatgttcatacacctatcccccattctcctcctatccctcaaccccgacatcattaccgggttttcctcttgtaaatatagtttaaccaaaacatcagattgtgaatctgacaacagaggcttacgaccccttatttaccgagaaagctcacaagaactgctaactcatgcccccatgtctaacaacatggctttctcaacttttaaaggataacagctatccattggtcttaggccccaaaaattttggtgcaactccaaataaaagtaataaccatgcacactactataaccaccctaaccctgacttccctaattccccccatccttaccaccctcgttaaccctaacaaaaaaaactcatacccccattatgtaaaatccattgtcgcatccacctttattatcagtctcttccccacaacaatattcatgtgcctagaccaagaagttattatctcgaactgacactgagccacaacccaaacaacccagctctccctaagcttcaaactagactacttctccataatattcatccctgtagcattgttcgttacatggtccatcatagaattctcactgtgatatataaactcagacccaaacattaatcagttcttcaaatatctactcatcttcctaattaccatactaatcttagttaccgctaacaacctattccaactgttcatcggctgagagggcgtaggaattatatccttcttgctcatcagttgatgatacgcccgagcagatgccaacacagcagccattcaagcaatcctatacaaccgtatcggcgatatcggtttcatcctcgccttagcatgatttatcctacactccaactcatgagacccacaacaaatagcccttctaaacgctaatccaagcctcaccccactactaggcctcctcctagcagcagcaggcaaatcagcccaattaggtctccacccctgactcccctcagccatagaaggccccaccccagtctcagccctactccactcaagcactatagttgtagcaggaatcttcttactcatccgcttccaccccctagcagaaaatagcccactaatccaaactctaacactatgcttaggcgctatcaccactctgttcgcagcagtctgcgcccttacacaaaatgacatcaaaaaaatcgtagccttctccacttcaagtcaactaggactcataatagttacaatcggcatcaaccaaccacacctagcattcctgcacatctgtacccacgccttcttcaaagccatactatttatgtgctccggatccatcatccacaaccttaacaatgaacaagatattcgaaaaataggaggactactcaaaaccatacctctcacttcaacctccctcaccattggcagcctagcattagcaggaatacctttcctcacaggtttctactccaaagaccacatcatcgaaaccgcaaacatatcatacacaaacgcctgagccctatctattactctcatcgctacctccctgacaagcgcctatagcactcgaataattcttctcaccctaacaggtcaacctcgcttccccacccttactaacattaacgaaaataaccccaccctactaaaccccattaaacgcctggcagccggaagcctattcgcaggatttctcattactaacaacatttcccccgcatcccccttccaaacaacaatccccctctacctaaaactcacagccctcgctgtcactttcctaggacttctaacagccctagacctcaactacctaaccaacaaacttaaaataaaatccccactatgcacattttatttctccaacatactcggattctaccctagcatcacacaccgcacaatcccctatctaggccttctcacgagccaaaacctgcccctactcctcctagacctaacctgactagaaaagctattacctaaaacaatttcacagcaccaaatctccacctccatcatcacctcaacccaaaaaggcataattaaactttacttcctctctttcttcttcccactcatcctaaccctactcctaatcacataacctattcccccgagcaatctcaattacaatatatacaccaacaaacaatgttcaaccagtaactactactaatcaacgcccatagtcatacaaagcccccgcaccaataggatcctcccgaatcaaccctgacccctctccttcataaattattcagcttcctacactattaaagtttaccacaaccaccaccccatcatactctttcacccacagcaccaatcctacctccatcgctaaccccactaaaacactcaccaagacctcaacccctgacccccatgcctcaggatactcctcaatagccatcgctgtagtatatccaaagacaaccatcattccccctaaataaattaaaaaaactattaaacccatataacctcccccaaaattcagaataataacacacccgaccacaccgctaacaatcaatactaaacccccataaataggagaaggcttagaagaaaaccccacaaaccccattactaaacccacactcaacagaaacaaagcatacatcattattctcgcacgggctacaaccacgaccaatgatatgaaaaaccatcgttgtatttcaactacaagaacaccaatgaccccaatacgcaaaattaaccccctaataaaattaattaaccactcattcatcgacctccccaccccatccaacatctccgcatgatgaaacttcggctcactccttggcgcctgcctgatcctccaaatcaccacaggactattcctagccatacactactcaccagacgcctcaaccgccttttcatcaatcgcccacatcactcgagacgtaaattatggctgaatcatccgctaccttcacgccaatggcgcctcaatattctttatctgcctcttcctacacatcgggcgaggcctatattacggatcatttctctactcagaaacctgaaacatcggcattatcctcctgcttgcaactatagcaacagccttcataggctatgtcctcccgtgaggccaaatatcattctgaggggccacagtaattacaaacttactatccgccatcccatacattgggacagacctagttcaatgaatctgaggaggctactcagtagacagtcccaccctcacacgattctttacctttcacttcatcttgcccttcattattgcagccctagcagcactccacctcctattcttgcacgaaacgggatcaaacaaccccctaggaatcacctcccattccgataaaatcaccttccacccttactacacaatcaaagacgccctcggcttacttctcttcattctctccttaatgacattaacactattctcaccagacctcctaggcgacccagacaattataccctagccaaccccttaaacacccctccccacatcaagcccgaatgatatttcctattcgcctacacaattctccgatccgtccctaacaagctaggaggcgtccttgccctattactatccatcctcatcctagcaataatccccatcctccatatatccaaacaacaaagcataatatttcgcccactaagccaatcactttattgactcctagccgcagacctcctcattctaacctgaatcggaggacaaccagtaagctacccttttaccatcattggacaagtagcatccgtactatacttcacaacaatcctaatcctaataccaactatctccctaattgaaaacaaaatactcaaatgggcctgtccttgtagtataaactaatacaccagtcttgtaaaccgaagatgaaaacctttttccaaggacaaatcagagaaaaagtctttaactccaccattagcacccaaagctaagattctaatttaaactattctctgttctttcatggggaagcagatttgggtaccacccaagtattgactcacccatcaacaaccgctatgtatttcgtacattactgccagccaccatgaatattgcacggtaccataaatacttgaccacctgtagtacataaaaacccaatccacatcaaaaccccctccccatgcttacaagcaagtacagcaatcaaccctcaactatcacacatcaactgcaactccaaagccacccctcacccactaggataccaacaaacctacccatctttaacagtacatagtacataaagccatttaccgtacatagcacattacagtcaaatcccttctcgtccccatggatgacccccctcagataggggtcccttgaccaccatcctccgtgaaatcaatatcccgcacaagagtgctactctcctcgctccgggcccataacacttgggggtagctaaagtgaactgtatccgacatctggttcctacttcagggccataaagcctaaatagcccacacgttccccttaaataagacatcacgatg

SEQ ID NO: 9 - DNA, 16570 bp, Homo sapiens mitochondrial
  3108: "n" refers to a nucleotide at position 3107 of the Cambridge Reference Sequence (CRS, Anderson et al. 1981 Nature 290:457-465), later determined to be absent from the human mtDNA sequence according to the revised CRS (rCRS, Andrews et al. 1999 Nature Genetics 23:147); "n" therefore represents a single nucleotide deletion at a position corresponding to nucleotide 3107 of SEQ ID NO:1 as provided herein.
gatcacaggtctatcaccctattaaccactcacgggagctctccatgcatttggtattttcgtctggggggtatgcacgcgatagcattgcgagacgctggagccggagcaccctatgtcgcagtatctgtctttgattcctgcctcatcccattatttatcgcacctacgttcaatattacaggcgaacatacctactaaagtgtgttaattaattaatgcttgtaggacataataataacaattgaatgtctgcacagccgctttccacacagacatcataacaaaaaatttccaccaaaccccccctcccccgccttctggccacagcacttaaacacatctctgccaaaccccaaaaacaaagaaccctaacaccagcctaaccagatttcaaattttatcttttggcggtatgcacttttaacagtcaccccccaactaacacattattttcccctcccactcccatactactaatctcatcaatacaacccccgcccatcctacccagcacacacacaccgctgctaaccccataccccgaaccaaccaaaccccaaagacaccccccacagtttatgtagcttacctcctcaaagcaatacactgaaaatgtttagacgggctcacatcaccccataaacaaataggtttggtcctagcctttctattagctcttagtaagattacacatgcaagcatccccgttccagtgagttcaccctctaaatcaccacgatcaaaagggacaagcatcaagcacgcagcaatgcagctcaaaacgcttagcctagccacacccccacgggaaacagcagtgattaacctttagcaataaacgaaagtttaactaagctatactaaccccagggttggtcaatttcgtgccagccaccgcggtcacacgattaacccaagtcaatagaagccggcgtaaagagtgttttagatcaccccctccccaataaagctaaaactcacctgagttgtaaaaaactccagttgacacaaaatagactacgaaagtggctttaacatatctgaacacacaatagctaagacccaaactgggattagataccccactatgcttagccctaaacctcaacagttaaatcaacaaaactgctcgccagaacactacgagccacagcttaaaactcaaaggacctggcggtgcttcatatccctctagaggagcctgttctgtaatcgataaaccccgatcaacctcaccacctcttgctcagcctatataccgccatcttcagcaaaccctgatgaaggctacaaagtaagcgcaagtacccacgtaaagacgttaggtcaaggtgtagcccatgaggtggcaagaaatgggctacattttctaccccagaaaactacgatagcccttatgaaacttaagggtcgaaggtggatttagcagtaaactgagagtagagtgcttagttgaacagggccctgaagcgcgtacacaccgcccgtcaccctcctcaagtatacttcaaaggacatttaactaaaacccctacgcatttatatagaggagacaagtcgtaacatggtaagtgtactggaaagtgcacttggacgaaccagagtgtagcttaacacaaagcacccaacttacacttaggagatttcaacttaacttgaccgctctgagctaaacctagccccaaacccactccaccttactaccagacaaccttagccaaaccatttacccaaataaagtataggcgatagaaattgaaacctggcgcaatagatatagtaccgcaagggaaagatgaaaaattataaccaagcataatatagcaaggactaacccctataccttctgcataatgaattaactagaaataactttgcaaggagagccaaagctaagacccccgaaaccagacgagctacctaagaacagctaaaagagcacacccgtctatgtagcaaaatagtgggaagatttataggtagaggcgacaaacctaccgagcctggtgatagctggttgtccaagatagaatcttagttcaactttaaatttgcccacagaaccctctaaatccccttgtaaatttaactgttagtccaaagaggaacagctctttggacactaggaaaaaaccttgtagagagagtaaaaaatttaacacccatagtaggcctaaaagcagccaccaattaagaaagcgttcaagctcaacacccactacctaaaaaatcccaaacatataactgaactcctcacacccaattggaccaatctatcaccctatagaagaactaatgttagtataagtaacatgaaaacattctcctccgcataagcctgcgtcagattaaaacactgaactgacaattaacagcccaatatctacaatcaaccaacaagtcattattaccctcactgtcaacccaacacaggcatgctcataaggaaaggttaaaaaaagtaaaaggaactcggcaaatcttaccccgcctgtttaccaaaaacatcacctctagcatcaccagtattagaggcaccgcctgcccagtgacacatgtttaacggccgcggtaccctaaccgtgcaaaggtagcataatcacttgttccttaaatagggacctgtatgaatggctccacgagggttcagctgtctcttacttttaaccagtgaaattgacctgcccgtgaagaggcgggcataacacagcaagacgagaagaccctatggagctttaatttattaatgcaaacagtacctaacaaacccacaggtcctaaactaccaaacctgcattaaaaatttcggttggggcgacctcggagcagaacccaacctccgagcagtacatgctaagacttcaccagtcaaagcgaactactatactcaattgatccaataacttgaccaacggaacaagttaccctagggataacagcgcaatcctattctagagtccatatcaacaatagggtttacgacctcgatgttggatcaggacatcccaatggtgcagccgctattaaaggttcgtttgttcaacgattaaagtcctacgtgatctgagttcagaccggagtaatccaggtcggtttctatctacnttcaaattcctccctgtacgaaaggacaagagaaataaggcctacttcacaaagcgccttcccccgtaaatgatatcatctcaacttagtattatacccacacccacccaagaacagggtttgttaagatggcagagcccggtaatcgcataaaacttaaaactttacagtcagaggttcaattcctcttcttaacaacatacccatggccaacctcctactcctcattgtacccattctaatcgcaatggcattcctaatgcttaccgaacgaaaaattctaggctatatacaactacgcaaaggccccaacgttgtaggcccctacgggctactacaacccttcgctgacgccataaaactcttcaccaaagagcccctaaaacccgccacatctaccatcaccctctacatcaccgccccgaccttagctctcaccatcgctcttctactatgaacccccctccccatacccaaccccctggtcaacctcaacctaggcctcctatttattctagccacctctagcctagccgtttactcaatcctctgatcagggtgagcatcaaactcaaactacgccctgatcggcgcactgcgagcagtagcccaaacaatctcatatgaagtcaccctagccatcattctactatcaacattactaataagtggctcctttaacctctccacccttatcacaacacaagaacacctctgattactcctgccatcatgacccttggccataatatgatttatctccacactagcagagaccaaccgaacccccttcgaccttgccgaaggggagtccgaactagtctcaggcttcaacatcgaatacgccgcaggccccttcgccctattcttcatagccgaatacacaaacattattataataaacaccctcaccactacaatcttcctaggaacaacatatgacgcactctcccctgaactctacacaacatattttgtcaccaagaccctacttctaacctccctgttcttatgaattcgaacagcatacccccgattccgctacgaccaactcatacacctcctatgaaaaaacttcctaccactcaccctagcattacttatatgatatgtctccatacccattacaatctccagcattccccctcaaacctaagaaatatgtctgataaaagagttactttgatagagtaaataataggagcttaaacccccttatttctaggactatgagaatcgaacccatccctgagaatccaaaattctccgtgccacctatcacaccccatcctaaagtaaggtcagctaaataagctatcgggcccataccccgaaaatgttggttatacccttcccgtactaattaatcccctggcccaacccgtcatctactctaccatctttgcaggcacactcatcacagcgctaagctcgcactgattttttacctgagtaggcctagaaataaacatgctagcttttattccagttctaaccaaaaaaataaaccctcgttccacagaagctgccatcaagtatttcctcacgcaagcaaccgcatccataatccttctaatagctatcctcttcaacaatatactctccggacaatgaaccataaccaatactaccaatcaatactcatcattaataatcataatggctatagcaataaaactaggaatagccccctttcacttctgagtcccagaggttacccaaggcacccctctgacatccggcctgcttcttctcacatgacaaaaactagcccccatctcaatcatataccaaatctctccctcactaaacgtaagccttctcctcactctctcaatcttatccatcatagcaggcagttgaggtggattaaaccaaacccagctacgcaaaatcttagcatactcctcaattacccacataggatgaataatagcagttctaccgtacaaccctaacataaccattcttaatttaactatttatattatcctaactactaccgcattcctactactcaacttaaactccagcaccacgaccctactactatctcgcacctgaaacaagctaacatgactaacacccttaattccatccaccctcctctccctaggaggcctgcccccgctaaccggctttttgcccaaatgggccattatcgaagaattcacaaaaaacaatagcctcatcatccccaccatcatagccaccatcaccctccttaacctctacttctacctacgcctaatctactccacctcaatcacactactccccatatctaacaacgtaaaaataaaatgacagtttgaacatacaaaacccaccccattcctccccacactcatcgcccttaccacgctactcctacctatctccccttttatactaataatcttatagaaatttaggttaaatacagaccaagagccttcaaagccctcagtaagttgcaatacttaatttctgtaacagctaaggactgcaaaaccccactctgcatcaactgaacgcaaatcagccactttaattaagctaagcccttactagaccaatgggacttaaacccacaaacacttagttaacagctaagcaccctaatcaactggcttcaatctacttctcccgccgccgggaaaaaaggcgggagaagccccggcaggtttgaagctgcttcttcgaatttgcaattcaatatgaaaatcacctcggagctggtaaaaagaggcctaacccctgtctttagatttacagtccaatgcttcactcagccattttacctcacccccactgatgttcgccgaccgttgactattctctacaaaccacaaagacattggaacactatacctattattcggcgcatgagctggagtcctaggcacagctctaagcctccttattcgagccgagctgggccagccaggcaaccttctaggtaacgaccacatctacaacgttatcgtcacagcccatgcatttgtaataatcttcttcatagtaatacccatcataatcggaggctttggcaactgactagttcccctaataatcggtgcccccgatatggcgtttccccgcataaacaacataagcttctgactcttacctccctctctcctactcctgctcgcatctgctatagtggaggccggagcaggaacaggttgaacagtctaccctcccttagcagggaactactcccaccctggagcctccgtagacctaaccatcttctccttacacctagcaggtgtctcctctatcttaggggccatcaatttcatcacaacaattatcaatataaaaccccctgccataacccaataccaaacgcccctcttcgtctgatccgtcctaatcacagcagtcctacttctcctatctctcccagtcctagctgctggcatcactatactactaacagaccgcaacctcaacaccaccttcttcgaccccgccggaggaggagaccccattctataccaacacctattctgatttttcggtcaccctgaagtttatattcttatcctaccaggcttcggaataatctcccatattgtaacttactactccggaaaaaaagaaccatttggatacataggtatggtctgagctatgatatcaattggcttcctagggtttatcgtgtgagcacaccatatatttacagtaggaatagacgtagacacacgagcatatttcacctccgctaccataatcatcgctatccccaccggcgtcaaagtatttagctgactcgccacactccacggaagcaatatgaaatgatctgctgcagtgctctgagccctaggattcatctttcttttcaccgtaggtggcctgactggcattgtattagcaaactcatcactagacatcgtactacacgacacgtactacgttgtagcccacttccactatgtcctatcaataggagctgtatttgccatcataggaggcttcattcactgatttcccctattctcaggctacaccctagaccaaacctacgccaaaatccatttcactatcatattcatcggcgtaaatctaactttcttcccacaacactttctcggcctatccggaatgccccgacgttactcggactaccccgatgcatacaccacatgaaacatcctatcatctgtaggctcattcatttctctaacagcagtaatattaataattttcatgatttgagaagccttcgcttcgaagcgaaaagtcctaatagtagaagaaccctccataaacctggagtgactatatggatgccccccaccctaccacacattcgaagaacccgtatacataaaatctagacaaaaaaggaaggaatcgaaccccccaaagctggtttcaagccaaccccatggcctccatgactttttcaaaaaggtattagaaaaaccatttcataactttgtcaaagttaaattataggctaaatcctatatatcttaatggcacatgcagcgcaagtaggtctacaagacgctacttcccctatcatagaagagcttatcacctttcatgatcacgccctcataatcattttccttatctgcttcctagtcctgtatgcccttttcctaacactcacaacaaaactaactaatactaacatctcagacgctcaggaaatagaaaccgtctgaactatcctgcccgccatcatcctagtcctcatcgccctcccatccctacgcatcctttacataacagacgaggtcaacgatccctcccttaccatcaaatcaattggccaccaatggtactgaacctacgagtacaccgactacggcggactaatcttcaactcctacatacttcccccattattcctagaaccaggcgacctgcgactccttgacgttgacaatcgagtagtactcccgattgaagcccccattcgtataataattacatcacaagacgtcttgcactcatgagctgtccccacattaggcttaaaaacagatgcaattcccggacgtctaaaccaaaccactttcaccgctacacgaccgggggtatactacggtcaatgctctgaaatctgtggagcaaaccacagtttcatgcccatcgtcctagaattaattcccctaaaaatctttgaaatagggcccgtatttaccctatagcaccccctctaccccctctagagcccactgtaaagctaacttagcattaaccttttaagttaaagattaagagaaccaacacctctttacagtgaaatgccccaactaaatactaccgtatggcccaccataattacccccatactccttacactattcctcatcacccaactaaaaatattaaacacaaactaccacctacctccctcaccaaagcccataaaaataaaaaattataacaaaccctgagaaccaaaatgaacgaaaatctgttcgcttcattcattgcccccacaatcctaggcctacccgccgcagtactgatcattctatttccccctctattgatccccacctccaaatatctcatcaacaaccgactaatcaccacccaacaatgactaatcaaactaacctcaaaacaaatgataaccatacacaacactaaaggacgaacctgatctcttatactagtatccttaatcatttttattgccacaactaacctcctcggactcctgcctcactcatttacaccaaccacccaactatctataaacctagccatggccatccccttatgagcgggcgcagtgattataggctttcgctctaagattaaaaatgccctagcccacttcttaccacaaggcacacctacaccccttatccccatactagttattatcgaaaccatcagcctactcattcaaccaatagccctggccgtacgcctaaccgctaacattactgcaggccacctactcatgcacctaattggaagcgccaccctagcaatatcaaccattaaccttccctctacacttatcatcttcacaattctaattctactgactatcctagaaatcgctgtcgccttaatccaagcctacgttttcacacttctagtaagcctctacctgcacgacaacacataatgacccaccaatcacatgcctatcatatagtaaaacccagcccatgacccctaacaggggccctctcagccctcctaatgacctccggcctagccatgtgatttcacttccactccataacgctcctcatactaggcctactaaccaacacactaaccatataccaatgatggcgcgatgtaacacgagaaagcacataccaaggccaccacacaccacctgtccaaaaaggccttcgatacgggataatcctatttattacctcagaagtttttttcttcgcaggatttttctgagccttttaccactccagcctagcccctaccccccaattaggagggcactggcccccaacaggcatcaccccgctaaatcccctagaagtcccactcctaaacacatccgtattactcgcatcaggagtatcaatcacctgagctcaccatagtctaatagaaaacaaccgaaaccaaataattcaagcactgcttattacaattttactgggtctctattttaccctcctacaagcctcagagtacttcgagtctcccttcaccatttccgacggcatctacggctcaacattttttgtagccacaggcttccacggacttcacgtcattattggctcaactttcctcactatctgcttcatccgccaactaatatttcactttacatccaaacatcactttggcttcgaagccgccgcctgatactggcattttgtagatgtggtttgactatttctgtatgtctccatctattgatgagggtcttactcttttagtataaatagtaccgttaacttccaattaactagttttgacaacattcaaaaaagagtaataaacttcgccttaattttaataatcaacaccctcctagccttactactaataattattacattttgactaccacaactcaacggctacatagaaaaatccaccccttacgagtgcggcttcgaccctatatcccccgcccgcgtccctttctccataaaattcttcttagtagctattaccttcttattatttgatctagaaattgccctccttttacccctaccatgagccctacaaacaactaacctgccactaatagttatgtcatccctcttattaatcatcatcctagccctaagtctggcctatgagtgactacaaaaaggattagactgaaccgaattggtatatagtttaaacaaaacgaatgatttcgactcattaaattatgataatcatatttaccaaatgcccctcatttacataaatattatactagcatttaccatctcacttctaggaatactagtatatcgctcacacctcatatcctccctactatgcctagaaggaataatactatcgctgttcattatagctactctcataaccctcaacacccactccctcttagccaatattgtgcctattgccatactagtctttgccgcctgcgaagcagcggtgggcctagccctactagtctcaatctccaacacatatggcctagactacgtacataacctaaacctactccaatgctaaaactaatcgtcccaacaattatattactaccactgacatgactttccaaaaaacacataatttgaatcaacacaaccacccacagcctaattattagcatcatccctctactattttttaaccaaatcaacaacaacctatttagctgttccccaaccttttcctccgaccccctaacaacccccctcctaatactaactacctgactcctacccctcacaatcatggcaagccaacgccacttatccagtgaaccactatcacgaaaaaaactctacctctctatactaatctccctacaaatctccttaattataacattcacagccacagaactaatcatattttatatcttcttcgaaaccacacttatccccaccttggctatcatcacccgatgaggcaaccagccagaacgcctgaacgcaggcacatacttcctattctacaccctagtaggctcccttcccctactcatcgcactaatttacactcacaacaccctaggctcactaaacattctactactcactctcactgcccaagaactatcaaactcctgagccaacaacttaatatgactagcttacacaatagcttttatagtaaagatacctctttacggactccacttatgactccctaaagcccatgtcgaagcccccatcgctgggtcaatagtacttgccgcagtactcttaaaactaggcggctatggtataatacgcctcacactcattctcaaccccctgacaaaacacatagcctaccccttccttgtactatccctatgaggcataattataacaagctccatctgcctacgacaaacagacctaaaatcgctcattgcatactcttcaatcagccacatagccctcgtagtaacagccattctcatccaaaccccctgaagcttcaccggcgcagtcattctcataatcgcccacgggcttacatcctcattactattctgcctagcaaactcaaactacgaacgcactcacagtcgcatcataatcctctctcaaggacttcaaactctactcccactaatagctttttgatgacttctagcaagcctcgctaacctcgccttaccccccactattaacctactgggagaactctctgtgctagtaaccacgttctcctgatcaaatatcactctcctacttacaggactcaacatactagtcacagccctatactccctctacatatttaccacaacacaatggggctcactcacccaccacattaacaacataaaaccctcattcacacgagaaaacaccctcatgttcatacacctatcccccattctcctcctatccctcaaccccgacatcattaccgggttttcctcttgtaaatatagtttaaccaaaacatcagattgtgaatctgacaacagaggcttacgaccccttatttaccgagaaagctcacaagaactgctaactcatgcccccatgtctaacaacatggctttctcaacttttaaaggataacagctatccattggtcttaggccccaaaaattttggtgcaactccaaataaaagtaataaccatgcacactactataaccaccctaaccctgacttccctaattccccccatccttaccaccctcgttaaccctaacaaaaaaaactcatacccccattatgtaaaatccattgtcgcatccacctttattatcagtctcttccccacaacaatattcatgtgcctagaccaagaagttattatctcgaactgacactgagccacaacccaaacaacccagctctccctaagcttcaaactagactacttctccataatattcatccctgtagcattgttcgttacatggtccatcatagaattctcactgtgatatataaactcagacccaaacattaatcagttcttcaaatatctactcatcttcctaattaccatactaatcttagttaccgctaacaacctattccaactgttcatcggctgagagggcgtaggaattatatccttcttgctcatcagttgatgatacgcccgagcagatgccaacacagcagccattcaagcaatcctatacaaccgtatcggcgatatcggtttcatcctcgccttagcatgatttatcctacactccaactcatgagacccacaacaaatagcccttctaaacgctaatccaagcctcaccccactactaggcctcctcctagcagcagcaggcaaatcagcccaattaggtctccacccctgactcccctcagccatagaaggccccaccccagtctcagccctactccactcaagcactatagttgtagcaggaatcttcttactcatccgcttccaccccctagcagaaaatagcccactaatccaaactctaacactatgcttaggcgctatcaccactctgttcgcagcagtctgcgcccttacacaaaatgacatcaaaaaaatcgtagccttctccacttcaagtcaactaggactcataatagttacaatcggcatcaaccaaccacacctagcattcctgcacatctgtacccacgccttcttcaaagccatactatttatgtgctccgggtccatcatccacaaccttaacaatgaacaagatattcgaaaaataggaggactactcaaaaccatacctctcacttcaacctccctcaccattggcagcctagcattagcaggaatacctttcctcacaggtttctactccaaagaccacatcatcgaaaccgcaaacatatcatacacaaacgcctgagccctatctattactctcatcgctacctccctgacaagcgcctatagcactcgaataattcttctcaccctaacaggtcaacctcgcttccccacccttactaacattaacgaaaataaccccaccctactaaaccccattaaacgcctggcagccggaagcctattcgcaggatttctcattactaacaacatttcccccgcatcccccttccaaacaacaatccccctctacctaaaactcacagccctcgctgtcactttcctaggacttctaacagccctagacctcaactacctaaccaacaaacttaaaataaaatccccactatgcacattttatttctccaacatactcggattctaccctagcatcacacaccgcacaatcccctatctaggccttcttacgagccaaaacctgcccctactcctcctagacctaacctgactagaaaagctattacctaaaacaatttcacagcaccaaatctccacctccatcatcacctcaacccaaaaaggcataattaaactttacttcctctctttcttcttcccactcatcctaaccctactcctaatcacataacctattcccccgagcaatctcaattacaatatatacaccaacaaacaatgttcaaccagtaactactactaatcaacgcccataatcatacaaagcccccgcaccaataggatcctcccgaatcaaccctgacccctctccttcataaattattcagcttcctacactattaaagtttaccacaaccaccaccccatcatactctttcacccacagcaccaatcctacctccatcgctaaccccactaaaacactcaccaagacctcaacccctgacccccatgcctcaggatactcctcaatagccatcgctgtagtatatccaaagacaaccatcattccccctaaataaattaaaaaaactattaaacccatataacctcccccaaaattcagaataataacacacccgaccacaccgctaacaatcaatactaaacccccataaataggagaaggcttagaagaaaaccccacaaaccccattactaaacccacactcaacagaaacaaagcatacatcattattctcgcacggactacaaccacgaccaatgatatgaaaaaccatcgttgtatttcaactacaagaacaccaatgaccccaatacgcaaaactaaccccctaataaaattaattaaccactcattcatcgacctccccaccccatccaacatctccgcatgatgaaacttcggctcactccttggcgcctgcctgatcctccaaatcaccacaggactattcctagccatgcactactcaccagacgcctcaaccgccttttcatcaatcgcccacatcactcgagacgtaaattatggctgaatcatccgctaccttcacgccaatggcgcctcaatattctttatctgcctcttcctacacatcgggcgaggcctatattacggatcatttctctactcagaaacctgaaacatcggcattatcctcctgcttgcaactatagcaacagccttcataggctatgtcctcccgtgaggccaaatatcattctgaggggccacagtaattacaaacttactatccgccatcccatacattgggacagacctagttcaatgaatctgaggaggctactcagtagacagtcccaccctcacacgattctttacctttcacttcatcttgcccttcattatcgcagccctagcagcactccacctcctattcttgcacgaaacgggatcaaacaaccccctaggaatcacctcccattccgataaaatcaccttccacccttactacacaatcaaagacgccctcggcttacttctcttccttctctccttaatgacattaacactattctcaccagacctcctaggcgacccagacaattataccctagccaaccccttaaacacccctccccacatcaagcccgaatgatatttcctattcgcctacacaattctccgatccgtccctaacaaactaggaggcgtccttgccctattactatccatcctcatcctagcaataatccccatcctccatatatccaaacaacaaagcataatatttcgcccactaagccaatcactttattgactcctagccgcagacctcctcattctaacctgaatcggaggacaaccagtaagctacccttttaccatcattggacaagtagcatccgtactatacttcacaacaatcctaatcctaataccaactatctccctaattgaaaacaaaatactcaaatgggcctgtccttgtagtataaactaatacaccagtcttgtaaaccggagatgaaaacctttttccaaggacaaatcagagaaaaagtctttaactccaccattagcacccaaagctaagattctaatttaaactattctctgttctttcatggggaagcagatttgggtaccacccaagtattgactcacccatcaacaaccgctatgtatttcgtacattactgccagccaccatgaatattgtacggtaccataaatacttgaccacctgtagtacataaaaacccaatccacatcaaaaccccctccccatgcttacaagcaagtacagcaatcaaccctcaactatcacacattaactgcaactccaaagccacccctcacccactaggataccaacaaacctacccacccttaacagtacatagtacataaagccatttaccgtacatagcacattacagtcaaatcccttctcgtccccatggatgacccccctcagataggggtcccttgaccaccatcctccgtgaaatcaatatcccgcacaagagtgctactctcctcgctccgggcccataacacttgggggtagctaaagtgaactgtatccgacatctggttcctacttcagggccataaagcctaaatagcccacacgttccccttaaataagacatcacgatg

SEQ ID NO: 10 - DNA, 16573 bp, Homo sapiens mitochondrial
  3111: "n" refers to a nucleotide at position 3107 of the Cambridge Reference Sequence (CRS, Anderson et al. 1981 Nature 290:457-465), later determined to be absent from the human mtDNA sequence according to the revised CRS (rCRS, Andrews et al. 1999 Nature Genetics 23:147); "n" therefore represents a single nucleotide deletion at a position corresponding to nucleotide 3107 of SEQ ID NO:1 as provided herein.
gatcacaggtctatcaccctattaaccactcacgggagctctccatgcatttggtattttcgtctggggggtgtgcacgcgatagcattgcgagacgctggagccggagcaccctatgtcgcagtatctgtctttgattcctgccccatcctattatttatcgcacctacgttcaatattacaggcgaacatacctactaaagtgtgttaattaattaatgcttgtaggacataataataacaattgaatgtctgcacagccgctttccacacagacatcataacaaaaaatttccaccaaaccccccctcccccccgcttctggccacagcacttaaacacatctctgccaaaccccaaaaacaaagaaccctaacaccagcctaaccagatttcaaattttatcttttggcggtatgcacttttaacagtcaccccccaactaacacattattttcccctcccactcccatactactaatctcatcaatacaacccccgcccatcctacccagcacacacacaccacgctgctaaccccataccccgaaccaaccaaaccccaaagacaccccccacagtttatgtagcttacctcctcaaagcaatacactgaaaatgtttagacgggctcacatcaccccataaacaaataggtttggtcctagcctttctattagctcttagtaagattacacatgcaagcatccccgttccagtgagttcaccctctaaatcaccacgatcaaaagggacaagcatcaagcacgcagcaatgcagctcaaaacgcttagcctagccacacccccacgggaaacagcagtgattaacctttagcaataaacgaaagtttaactaagctatactaaccccagggttggtcaatttcgtgccagccaccgcggtcacacgattaacccaagtcaatagaagccggcgtaaagagtgttttagatcaccccctccccaataaagctaaaactcacctgagttgtaaaaaactccagttgacacaaaatagactacgaaagtggctttaacatatctgaacacacaatagctaagacccaaactgggattagataccccactatgcttagccctaaacctcaacagttaaatcaacaaaactgctcgccagaacactacgagccacagcttaaaactcaaaggacctggcggtgcttcatacccctctagaggagcctgttctgtaatcgataaaccccgatcaacctcaccacctcttgctcagcctatataccgccatcttcagcaaaccctgatgaaggctacaaagtaagcgcaagtacccacgtaaagacgttaggtcaaggtgtagcccatgaggtggcaagaaatgggctacattttctaccccagaaaactacgatagcccttatgaaacttaagggtcgaaggtggatttagcagtaaactgagagtagagtgcttagttgaacagggccctgaagcgcgtacacaccgcccgtcaccctcctcaagtatacttcaaaggacatttaactaaaacccctacgcatttatatagaggagacaagtcgtaacatggtaagtgtactggaaagtgcacttggacgaaccagagtgtagcttaacacaaagcacccaacttacacttaggagatttcaacttaacttgaccgctctgagctaaacctagccccaaacccactccaccttactaccagacaaccttagccaaaccatttacccaaataaagtataggcgatagaaattgaaacctggcgcaatagatatagtaccgcaagggaaagatgaaaaattatagccaagcataatatagcaaggactaacccctataccttctgcataatgaattaactagaaataactttgcaaggagagccaaagctaagacccccgaaaccagacgagctacctaagaacagctaaaagagcacacccgtctatgtagcaaaatagtgggaagatttataggtagaggcgacaaacctaccgagcctggtgatagctggttgtccaagatagaatcttagttcaactttaaatttgcccacagaaccctctaaatccccttgtaaatttaactgttagtccaaagaggaacagctctttggacactaggaaaaaaccttgtagagagagtaaaaaatttaacacccatagtaggcctaaaagcagccaccaattaagaaagcgttcaagctcaacacccactacctaaaaaatcccaaacatataactgaactcctcacacccaattggaccaatctatcaccctatagaagaactaatgttagtataagtaacatgaaaacattctcctccgcataagcctgcgtcagattaaaacactgaactgacaattaacagcccaatatctacaatcaaccaacaagtcattattaccctcactgtcaacccaacacaggcatgctcataaggaaaggttaaaaaaagtaaaaggaactcggcaaatcttaccccgcctgtttaccaaaaacatcacctctagcatcaccagtattagaggcaccgcctgcccagtgacacatgtttaacggccgcggtaccctaaccgtgcaaaggtagcataatcacttgttccttaaatagggacctgtatgaatggctccacgagggttcagctgtctcttacttttaaccagtgaaattgacctgcccgtgaagaggcgggcatgacacagcaagacgagaagaccctatggagctttaatttattaatgcaaacagtacctaacaaacccacaggtcctaaactaccaaacctgcattaaaaatttcggttggggcgacctcggagcagaacccaacctccgagcagtacatgctaagacttcaccagtcaaagcgaactactatactcaattgatccaataacttgaccaacggaacaagttaccctagggataacagcgcaatcctattctagagtccatatcaacaatagggtttacgacctcgatgttggatcaggacatcccgatggtgcagccgctattaaaggttcgtttgttcaacgattaaagtcctacgtgatctgagttcagaccggagtaatccaggtcggtttctatctacnttcaaattcctccctgtacgaaaggacaagagaaataaggcctacttcacaaagcgccttcccccgtaaatgatatcatctcaacttagtattatacccacacccacccaagaacagggtttgttaagatggcagagcccggtaatcgcataaaacttaaaactttacagtcagaggttcaattcctcttcttaacaacatacccatggccaacctcctactcctcattgtacccattctaatcgcaatggcattcctaatgcttaccgaacgaaaaattctaggctatatacaactacgcaaaggccccaacgttgtaggcccctacgggctactacaacccttcgctgacgccataaaactcttcaccaaggagcccctaaaacccgccacatctaccatcaccctctacatcaccgccccgaccttagctctcaccatcgctcttctactatgaacccccctccccatacccaaccccctggtcaacctcaacctaggcctcctatttattctagccacctctagcctagccgtttactcaatcctctgatcagggtgagcatcaaactcaaactacgccctgatcggcgcactgcgagcagtagcccaaacaatctcatatgaagtcaccctagccatcattctactatcaacattactaataagtggctcctttaacctctccacccttatcacaacacaagaacacctctgattactcctgccatcatgacccttggccataatatgatttatctccacactagcagagaccaaccgaacccccttcgaccttgccgaaggggagtccgaactagtctcaggcttcaacatcgaatacgccgcaggccccttcgccctattcttcatagccgaatacacaaacattattataataaacaccctcaccactacaatcttcctaggaacaacatatgacgcactctcccctgaactctacacaacatattttgtcaccaagaccctacttctaacctccctgttcttatgaattcgaacagcatacccccgattccgctacgaccaactcatacacctcctatgaaaaaacttcctaccactcaccctagcattacttatatgatatgtctccatacccattacaatctccagcattccccctcaaacctaagaaatatgtctgataaaagagttactttgatagagtaaataataggagcttaaacccccttatttctaggactatgagaatcgaacccatccctgagaatccaaaattctccgtgccacctatcacaccccatcctaaagtaaggtcagctaaataagctatcgggcccataccccgaaaatgttggttatacccttcccgtactaattaatcccctggcccaacccgtcatctactctaccatctttgcaggcacactcatcacagcgctaagctcgcactgattttttacctgagtaggcctagaaataaacatgctagcttttattccagttctaaccaaaaaaataaaccctcgttccacagaagctgccatcaagtatttcctcacgcaagcaaccgcatccataatccttctaatagctatcctcttcaacaatatactctccggacaatgaaccataaccaatactaccaatcaatactcatcattaataatcataatggctatagcaataaaactaggaatagccccctttcacttctgagtcccagaggttacccaaggcacccctctgacatccggcctgcttcttctcacatgacaaaaactagcccccatctcaatcatataccaaatctctccctcactaaacgtaagccttctcctcactctctcaatcttatccatcatagcaggcagttgaggtggattaaaccaaacccagctacgcaaaatcttagcatactcctcaattacccacataggatgaataatagcagttctaccgtacaaccctaacataaccattcttaatttaactatttatattatcctaactactaccgcattcctactactcaacttaaactccagcaccacgaccctactactatctcgcacctgaaacaagctaacatgactaacacccttaattccatccaccctcctctccctaggaggcctgcccccactaaccggctttttgcccaaatgggccattatcgaagaattcacaaaaaacaatagcctcatcatccccaccatcatagccaccatcaccctccttaacctctacttctacctacgcctaatctactccacctcaatcacactactccccatatctaacaacgtaaaaataaaatgacagtttgaacatacaaaacccaccccattcctccccacactcatcgcccttaccacgctactcctacctatctccccttttatactaataatcttatagaaatttaggttaaatacagaccaagagccttcaaagccctcagtaagttgcaatacttaatttctgtaacagctaaggactgcaaaaccccactctgcatcaactgaacgcaaatcagccactttaattaagctaagcccttactagaccaatgggacttaaacccacaaacacttagttaacagctaagcaccctaatcaactggcttcaatctacttctcccgccgccgggaaaaaaggcgggagaagccccggcaggtttgaagctgcttcttcgaatttgcaattcaatatgaaaatcacctcggagctggtaaaaagaggcctaacccctgtctttagatttacagtccaatgcttcactcagccattttacctcacccccactgatgttcgccaaccgttgactattctctacaaaccacaaagacattggaacactatacctattattcggcgcatgagctggagtcctaggcacagctctaagcctccttattcgagccgagctgggccagccaggcaaccttctaggtaacgaccacatctacaacgttatcgtcacagcccatgcatttgtaataatcttcttcatagtaatacccatcataatcggaggctttggcaactgactagttcccctaataatcggtgcccccgatatggcgtttccccgcataaacaacataagcttctgactcttacctccctctctcctactcctgctcgcatctgctatagtggaggccggagcaggaacaggttgaacagtctaccctcccttagcagggaactactcccaccctggagcctccgtagacctaaccatcttctccttacacctagcaggtgtctcctctatcttaggggccatcaatttcatcacaacaattatcaatataaaaccccctgccataacccaataccaaacgcccctcttcgtctgatccgtcctaatcacagcagtcctacttctcctatctctcccagtcctagctgctggcatcactatactactaacagaccgcaacctcaacaccaccttcttcgaccccgccggaggaggagaccccattctataccaacacctattctgatttttcggtcaccctgaagtttatattcttatcctaccaggcttcggaataatctcccatattgtaacttactactccggaaaaaaagaaccatttggatacataggtatggtctgagctatgatatcaattggcttcctagggtttatcgtgtgagcacaccatatatttacagtaggaatagacgtagacacacgagcatatttcacctccgctaccataatcatcgctattcccaccggcgtcaaagtatttagctgactcgccacactccacggaagcaatatgaaatgatctgctgcagtgctctgagccctaggattcatctttcttttcaccgtaggtggcctgactggcattgtattagcaaactcatcactagacatcgtactacacgacacgtactacgttgtagctcacttccactatgtcctatcaataggagctgtatttgccatcataggaggcttcattcactgatttcccctattctcaggctacaccctagaccaaacctacgccaaaatccatttcactatcatattcatcggcgtaaatctaactttcttcccacaacactttctcggcctatccggaatgccccgacgttactcggactaccccgatgcatacaccacatgaaacatcctatcatctgtaggctcattcatttctctaacagcagtaatattaataattttcatgatttgagaagccttcgcttcgaagcgaaaagtcctaatagtagaagaaccctccataaacctggagtgactatatggatgccccccaccctaccacacattcgaagaacccgtatacataaaatctagacaaaaaaggaaggaatcgaaccccccaaagctggtttcaagccaaccccatggcctccatgactttttcaaaaaggtattagaaaaaccatttcataactttgtcaaagttaaattataggctaaatcctatatatcttaatggcacatgcagcgcaagtaggtctacaagacgctacttcccctatcatagaagagcttatcacctttcatgatcacgccctcataatcattttccttatctgcttcctagtcctgtatgcccttttcctaacactcacaacaaaactaactaatactaacatctcagacgctcaggaaatagaaaccgtctgaactatcctgcccgccatcatcctagtcctcatcgccctcccatccctacgcatcctttacataacagacgaggtcaacgatccctcccttaccatcaaatcaattggccaccaatggtactgaacctacgagtacaccgactacggcggactaatcttcaactcctacatacttcccccattattcctagaaccaggcgacctgcgactccttgacgttgacaatcgagtagtactcccgattgaagcccccattcgtataataattacatcacaagacgtcttgcactcatgagctgtccccacattaggcttaaaaacagatgcaattcccggacgtctaaaccaaaccactttcaccgctacacgaccgggggtatactacggtcaatgctctgaaatctgtggagcaaaccacagtttcatgcccatcgtcctagaattaattcccctaaaaatctttgaaatagggcccgtatttaccctatagcaccccctctaccccctctagagcccactgtaaagctaacttagcattaaccttttaagttaaagattaagagaaccaacacctctttacagtgaaatgccccaactaaatactaccgtatggcccaccataattacccccatactccttacactattcctcatcacccaactaaaaatattaaacacaaactaccacctacctccctcaccaaagcccataaaaataaaaaattataacaaaccctgagaaccaaaatgaacgaaaatctgttcgcttcattcattgcccccacaatcctaggcctacccgccgcagtactgatcattctatttccccctctattgatccccacctccaaatatctcatcaacaaccgactaatcaccacccaacaatgactaatcaaactaacctcaaaacaaatgataaccatacacaacactaaaggacgaacctgatctcttatactagtatccttaatcatttttattgccacaactaacctcctcggactcctgcctcactcatttacaccaaccacccaactatctataaacctagccatggccatccccttatgagcgggcgcagtgattataggctttcgctctaagattaaaaatgccctagcccacttcttaccacaaggcacacctacaccccttatccccatactagttattatcgaaaccatcagcctactcattcaaccaatagccctggccgtacgcctaaccgctaacattactgcaggccacctactcatgcacctaattggaagcaccaccctagcaatatcaaccattaaccttccctctacacttatcatcttcacaattctaattctactgactatcctagaaatcgctgtcgccttaatccaagcctacgttttcacacttctagtaagcctctacctgcacgacaacacataatgacccaccaatcacatgcctatcatatagtaaaacccagcccatgacccctaacaggggccctctcagccctcctaatgacctccggcctagccatgtgatttcacttccactccataacgctcctcatactaggcctactaaccaacacactaaccatataccaatgatggcgcgatgtaacacgagaaagcacataccaaggccaccacacaccacctgtccaaaaaggccttcgatacgggataatcctatttattacctcagaagtttttttcttcgcaggatttttctgagccttttaccactccagcctagcccctaccccccaattaggagggcactggcccccaacaggcatcaccccgctaaatcccctagaagtcccactcctaaacacatccgtattactcgcatcaggagtatcaatcacctgagctcaccatagtctaatagaaaacaaccgaaaccaaataattcaagcactgctcattacaattttactgggtctctattttaccctcctacaagcctcagagtacttcgagtctcccttcaccatttccgacggcatctacggctcaacattttttgtagccacaggcttccacggacttcacgtcattattggctcaactttcctcactatctgcttcatccgccaactaatatttcactttacatccaaacatcactttggcttcgaagccgccgcctgatactggcattttgtagatgtggtttgactatttctgtatgtctccatctattgatgagggtcttactcttttagtataaatagtaccgttaacttccaattaactagttttgacaacattcaaaaaagagtaataaacttcgccttaattttaataatcaacaccctcctagccttactactaataattattacattttgactaccacaactcaacggctacatagagaaatccaccccttacgagtgcggcttcgaccctatatcccccgcccgcgtccctttctccataaaattcttcttagtagctattaccttcttattatttgatctagaaattgccctccttttacccctaccatgagccctacaaacaactaacctgccactaatagttatgtcatccctcttattaatcatcatcctagccctaagtctggcctatgagtgactacaaaaaggattagactgagccgaattggtatatagtttaaacaaaacgaatgatttcgactcattaaattatgataatcatatttaccaaatgcccctcatttacataaatattatactagcatttaccatctcacttctaggaatactagtatatcgctcacacctcatgtcctccctactatgcctagaaggaataatactatcgctgttcattatagctactctcataaccctcaacacccactccctcttagccaatattgtgcctattgccatactagtctttgccgcctgcgaagcagcggtgggcctagccctactagtctcaatctccaacacatatggcctagactacgtacataacctaaacctactccaatgctaaaactaatcgtcccaacaattatattactaccactgacatgactttccaaaaaacacataatttgaatcaacacaaccacccacagcctaattattagcatcatccctctactattttttaaccaaatcaacaacaacctatttagctgttccccaaccttttcctccgaccccctaacaacccccctcctaatactaactacctgactcctacccctcacaatcatggcaagccaacgccacttatccagtgaaccactatcacgaaaaaaactctacctctctatactaatctccctacaaatctccttaattataacattcacagccacagaactaatcatattttatatcttcttcgaaaccacacttatccccaccttggctatcatcacccgatgaggcaaccagccagaacgcctgaacgcaggcacatacttcctattctacaccctagtaggctcccttcccctactcatcgcactaatttacactcacaacaccctaggctcactaaacattctactactcaccctcactgcccaagaactatcaaactcctgagccaacaacttaatatgactagcttacacaatagcttttatagtaaagatacctctttacggactccacttatgactccctaaagcccatgtcgaagcccccatcgctgggtcaatagtacttgccgcagtactcttgaaactaggcggctatggtataatacgcctcacactcattctcaaccccctgacaaaacacatagcctaccccttccttgtactatccctatgaggcataattataacaagctccatctgcctacgacaaacagacctaaaatcgctcattgcatactcttcaatcagccacatagccctcgtagtaacagccattctcatccaaaccccctgaagcttcaccggcgcagtcattctcataatcgcccacggacttacatcctcattactattctgcctagcaaactcaaactacgaacgcactcacagtcgcatcataatcctctctcaaggacttcaaactctactcccactaatagctttttgatgacttctagcaagcctcgctaacctcgccttaccccccactattaacctactgggagaactctctgtgctagtaaccacgttctcctgatcaaatatcactctcctacttacaggactcaacatactagtcacagccctatactccctctacatatttaccacaacacaatggggctcactcacccaccacattaacaacataaaaccctcattcacacgagaaaacaccctcatgttcatacacctatcccccattctcctcctatccctcaaccccgacatcattaccgggttttcctcttgtaaatatagtttaaccaaaacatcagattgtgaatctgacaacagaggcttacgaccccttatttaccgagaaagctcacaagaactgctaactcatgcccccatgtctaacaacatggctttctcaacttttaaaggataacagctatccattggtcttaggccccaagaattttggtgcaactccaaataaaagtaataaccatgcacactactataaccaccctaaccctaacttccctaattccccccatccttaccaccctcgttaaccctaacaaaaaaaactcatacccccattatgtaaaatccattgtcgcatccacctttattatcagtctcttccccacaacaatattcatgtgcctagaccaagaagttattatctcgaactgacactgagccacaacccaaacaacccagctctccctaagcttcaaactagactacttctccataatattcatccctgtagcattgttcgttacatggtccatcatagaattctcactgtgatatataaactcagacccaaacattaatcagttcttcaaatatctactcatcttcctaattaccatactaatcttagttaccgcgaacaacctattccaactgttcatcggctgagagggcgtaggaattatatccttcttgctcatcagttgatgatacgcccgagcagatgccaacacagcagccattcaagcaatcctatacaaccgtatcggcgatatcggtttcatcctcgccttagcatgatttatcctacactccaactcatgagacccacaacaaatagcccttctaaacgctaatccaagcctcaccccactactaggcctcctcctagcagcagcaggcaaatcagcccaattaggtctccacccctgactcccctcagccatagaaggccccaccccagtctcagccctactccactcaagcactatagttgtagcaggaatcttcttactcatccgcttccaccccctagcagaaaatagcccactaatccaaactctaacactatgcttaggcgctatcaccactctgttcgcagcagtctgcgcccttacacaaaatgacatcaaaaaaatcgtagccttctccacttcaagtcaactaggactcataatagttacaatcggcatcaaccaaccacacctagcattcctgcacatctgtacccacgccttcttcaaagccatactatttatgtgctccgggtccatcatccacaaccttaacaatgaacaagatattcgaaaaataggaggactactcaaaaccatacctctcacttcaacctccctcaccattggcagcctagcattagcaggaatacctttcctcacaggtttctactccaaagaccacatcatcgaaaccgcaaacatatcatacacaaacgcctgagccctatctattactctcatcgctacctccctgacaagcgcctatagcactcgaataattcttctcaccctaacaggtcaacctcgcttccccacccttactaacattaacgaaaataaccccaccctactaaaccccattaaacgcctggcagccggaagcctattcgcaggatttctcattactaacaacatttcccccgcatcccccttccaaacaacaatccccctctacctaaaactcacagccctcgctgtcactttcctaggacttctaacagccctagacctcaactacctaaccaacaaacttaaaataaaatccccactatgcacattttatttctccaacatactcggattctaccctagcatcacacaccgcacaatcccctatctaggccttcttacgagccaaaacctgcccctactcctcctagacctaacctgactagaaaagctattacctaaaacaatttcacagcaccaaatctccacctccatcatcacctcaacccaaaaaggcataattaaactttacttcctctctttcttcttcccactcatcctaaccctactcctaatcacataacctattcccccgagcaatttcaattacaatatatacaccaacaaacaatgttcaaccagtaactactactaatcaacgcccataatcatacaaagcccccgcaccaataggatcctcccgaatcaaccctgacccctctccttcataaattattcagcttcctacactattaaagtttaccacaaccaccaccccatcatactctttcacccacagcaccaatcctacctccatcgctaaccccactaaaacactcaccaagacctcaacccctgacccccatgcctcaggatactcctcaatagccatcgctgtagtatatccaaagacaaccatcattccccctaaataaattaaaaaaactattaaacccatataacctcccccaaaattcagaataataacacacccgaccacaccgctaacaatcaatactaaacccccataaataggagaaggcttagaagaaaaccccacaaaccccattactaaacccacactcaacagaaacaaagcatacatcattattctcgcacggactacaaccacgaccaatgatatgaaaaaccatcgttgtatttcaactacaagaacaccaatgaccccaatacgcaaaattaaccccctaataaaattaattaaccactcactcatcgacctccccaccccatccaacatctccgcatgatgaaacttcggctcactccttggcgcctgcctgatcctccaaatcaccacaggactattcctagccatgcactactcaccagacgcctcaaccgccttttcatcaatcgcccacatcactcgagacgtaaattatggctgaatcatccgctaccttcacgccaatggcgcctcaatattctttatctgcctcttcctacacatcgggcgaggcctatattacggatcatttctctactcagaaacctgaaacatcggcattatcctcctgcttgcaactatagcaacagccttcataggctatgtcctcccgtgaggccaaatatcattctgaggggccacagtaattacaaacttactatccgccatcccatacattgggacagacctagttcaatgaatctgaggaggctactcagtagacagtcccaccctcacacgattctttacctttcacttcatcttacccttcattattgcagccctagcagcactccacctcctattcttgcacgaaacgggatcaaacaaccccctaggaatcacctcccattccgataaaatcaccttccacccttactacacaatcaaagacgccctcggcttacttctcttccttctctccttaatgacattaacactattctcaccagacctcctaggcgacccagacaattataccctagccaaccccttaaacacccctccccacatcaagcccgaatgatatttcctattcgcctacacaattctccgatccgtccctaacaaactaggaggcgtccttgccctattactatccatcctcatcctagcaataatccccatcctccatatatccaaacaacaaagcataatatttcgcccactaagccaatcactttattgactcctagccgcagacctcctcattctaacctgaatcggaggacaaccagtaagctacccttttaccatcattggacaagtagcatccgtactatacttcacaacaatcctaatcctaataccaactatctccctaattgaaaacaaaatactcaaatgggcctgtccttgtagtataaactaatacaccagtcttgtaaaccggagatgaaaacctttttccaaggacaaatcagagaaaaagtctttaactccaccattagcacccaaagctaagattctaatttaaactattctctgttctttcatggggaagcagatttgggtaccacccaagtattgactcacccatcaacaaccgctatgtatttcgtacattactgccagccaccatgaatattgtacggtaccataaatacttgaccacctgtagtacataaaaacccaatccacatcaaaaccccctccccatgcttacaagcaagtacagcaatcaacccccaactatcacacatcaactgcaactccaaagccacccctcacccactaggataccaacaaacctacccacccttaacagtacatagcacataaagccatttaccgtacatagcacattacagtcaaatcccttctcgtccccatggatgacccccctcagataggggtcccttgaccaccatcctccgtgaaatcaatatcccgcacaagagtgctactctcctcgctccgggcccataacacttgggggtagctaaagtgaactgtatccgacatctggttcctacttcagggccataaagcctaaatagcccacacgttccccttaaataagacatcacgatg

SEQ ID NO: 11 - DNA, 16569 bp, Homo sapiens mitochondrial
  3107: "n" refers to a nucleotide at position 3107 of the Cambridge Reference Sequence (CRS, Anderson et al. 1981 Nature 290:457-465), later determined to be absent from the human mtDNA sequence according to the revised CRS (rCRS, Andrews et al. 1999 Nature Genetics 23:147); "n" therefore represents a single nucleotide deletion at a position corresponding to nucleotide 3107 of SEQ ID NO:1 as provided herein.
gatcacaggtctatcaccctattaaccactcacgggagctctccatgcatttggtattttcgtctggggggtatgcacgcgatagcattgcgagacgctggagccggagcaccctatgtcgcagtatctgtctttgattcctgcctcatcctattatttatcgcacctacgttcaatattacaggcgaacatacttactaaagtgtgttaattaattaatgcttgtaggacataataataacaattgaatgtctgcacagccactttccacacagacatcataacaaaaaatttccaccaaaccccccctcccccgcttctggccacagcacttaaacacatctctgccaaaccccaaaaacaaagaaccctaacaccagcctaaccagatttcaaattttatcttttggcggtatgcacttttaacagtcaccccccaactaacacattattttcccctcccactcccatactactaatctcatcaatacaacccccgcccatcctacccagcacacacacaccgctgctaaccccataccccgaaccaaccaaaccccaaagacaccccccacagtttatgtagcttacctcctcaaagcaatacactgaaaatgtttagacgggctcacatcaccccataaacaaataggtttggtcctagcctttctattagctcttagtaagattacacatgcaagcatccccgttccagtgagttcaccctctaaatcaccacgatcaaaaggaacaagcatcaagcacgcagcaatgcagctcaaaacgcttagcctagccacacccccacgggaaacagcagtgattaacctttagcaataaacgaaagtttaactaagctatactaaccccagggttggtcaatttcgtgccagccaccgcggtcacacgattaacccaagtcaatagaagccggcgtaaagagtgttttagatcaccccctccccaataaagctaaaactcacctgagttgtaaaaaactccagttgacacaaaatagactacgaaagtggctttaacatatctgaacacacaatagctaagacccaaactgggattagataccccactatgcttagccctaaacctcaacagttaaatcaacaaaactgctcgccagaacactacgagccacagcttaaaactcaaaggacctggcggtgcttcatatccctctagaggagcctgttctgtaatcgataaaccccgatcaacctcaccacctcttgctcagcctatataccgccatcttcagcaaaccctgatgaaggctacaaagtaagcgcaagtacccacgtaaagacgttaggtcaaggtgtagcccatgaggtggcaagaaatgggctacattttctaccccagaaaactacgatagcccttatgaaacttaagggtcgaaggtggatttagcagtaaactgagagtagagtgcttagttgaacagggccctgaagcgcgtacacaccgcccgtcaccctcctcaagtatacttcaaaggacatttaactaaaacccctacgcatttatatagaggagacaagtcgtaacatggtaagtgtactggaaagtgcacttggacgaaccagagtgtagcttaacacaaagcacccaacttacacttaggagatttcaacttaacttgaccgctctgagctaaacctagccccaaacccactccaccttactaccagacaaccttagccaaaccatttacccaaataaagtataggcgatagaaattgaaacctggcgcaatagatatagtaccgcaagggaaagatgaaaaattataaccaagcataatatagcaaggactaacccctataccttctgcataatgaattaactagaaataactttgcaaggagagccaaagctaagacccccgaaaccagacgagctacctaagaacagctaaaagagcacacccgtctatgtagcaaaatagtgggaagatttataggtagaggcgacaaacctaccgagcctggtgatagctggttgtccaagatagaatcttagttcaactttaaatttgcccacagaaccctctaaatccccttgtaaatttaactgttagtccaaagaggaacagctctttggacactaggaaaaaaccttgtagagagagtaaaaaatttaacacccatagtaggcctaaaagcagccaccaattaagaaagcgttcaagctcaacacccactacctaaaaaatcccaaacatataactgaactcctcacacccaattggaccaatctatcaccctatagaagaactaatgttagtataagtaacatgaaaacattctcctccgcataagcctgcgtcagattaaaacactgaactgacaattaacagcccaatatctacaatcaaccaacaagtcattattaccctcactgtcaacccaacacaggcatgctcataaggaaaggttaaaaaaagtaaaaggaactcggcaaatcttaccccgcctgtttaccaaaaacatcacctctagcatcaccagtattagaggcaccgcctgcccagtgacacatgtttaacggccgcggtaccctaaccgtgcaaaggtagcataatcacttgttccttaaatagggacctgtatgaatggctccacgagggttcagctgtctcttacttttaaccagtgaaattgacctgcccgtgaagaggcgggcataacacagcaagacgagaagaccctatggagctttaatttattaatgcaaacagtacctaacaaacccacaggtcctaaactaccaaacctgcattaaaaatttcggttggggcgacctcggagcagaacccaacctccgagcagtacatgctaagacttcaccagtcaaagcgaactactatactcaattgatccaataacttgaccaacggaacaagttaccctagggataacagcgcaatcctattctagagtccatatcaacaatagggtttacgacctcgatgttggatcaggacatcccgatggtgcagccgctattaaaggttcgtttgttcaacgattaaagtcctacgtgatctgagttcagaccggagtaatccaggtcggtttctatctacnttcaaattcctccctgtacgaaaggacaagagaaataaggcctacttcacaaagcgccttcccccgtaaatgatatcatctcaacttagtattatacccacacccacccaagaacagggtttgttaagatggcagagcccggtaatcgcataaaacttaaaactttacagtcagaggttcaattcctcttcttaacaacatacccatggccaacctcctactcctcattgtacccattctaatcgcaatggcattcctaatgcttaccgaacgaaaaattctaggctatatacaactacgcaaaggccccaacgttgtaggcccctacgggctactacaacccttcgctgacgccataaaactcttcaccaaagagcccctaaaacccgccacatctaccatcaccctctacatcaccgccccgaccttagctctcaccatcgctcttctactatgaacccccctccccatacccaaccccctggtcaacctcaacctaggcctcctatttattctagccacctctagcctagccgtttactcaatcctctgatcagggtgagcatcaaactcaaactacgccctgatcggcgcactgcgagcagtagcccaaacaatctcatatgaagtcaccctagccatcattctactatcaacattactaataagtggctcctttaacctctccacccttatcacaacacaagaacacctctgattactcctgccatcatgacccttggccataatatgatttatctccacactagcagagaccaaccgaacccccttcgaccttgccgaaggggagtccgaactagtctcaggcttcaacatcgaatacgccgcaggccccttcgccctattcttcatagccgaatacacaaacattattataataaacaccctcaccactacaatcttcctaggaacaacatatgacgcactctcccctgaactctacacaacatattttgtcaccaagaccctacttctaacctccctgttcttatgaattcgaacagcatacccccgattccgctacgaccaactcatacacctcctatgaaaaaacttcctaccactcaccctagcattacttatatgatatgtctccatacccattacaatctccagcattccccctcaaacctaagaaatatgtctgataaaagagttactttgatagagtaaataataggagcttaaacccccttatttctaggaccatgagaatcgaacccatccctgagaatccaaaattctccgtgccacctatcacaccccatcctaaagtaaggtcagctaaataagctatcgggcccataccccgaaaatgttggttatacccttcccgtactaattaatcccctggcccaacccgtcatctactctaccatctttgcaggcacactcatcacagcgctaagctcgcactgattttttacctgagtaggcctagaaataaacatgctagcttttattccagttctaaccaaaaaaataaaccctcgttccacagaagctgccatcaagtatttcctcacgcaagcaaccgcatccataatccttctaatagctatcctcttcaacaatatactctccggacaatgaaccataaccaatactaccaatcaatactcatcattaataatcataatggctatagcaataaaactaggaatagccccctttcacttctgagtcccagaggttacccaaggcacccctctgacatccggcctgcttcttctcacatgacaaaaactagcccccatctcaatcatataccaaatctctccctcactaaacgtaagccttctcctcactctctcaatcttatccatcatagcaggcagttgaggtggattaaaccaaacccagctacgcaaaatcttagcatactcctcaattacccacataggatgaataatagcagttctaccgtacaaccctaacataaccattcttaatttaactatttatattatcctaactactaccgcattcctactactcaacttaaactccagcaccacgaccctactactatctcgcacctgaaacaagctaacatgactaacacccttaattccatccaccctcctctccctaggaggcctgcccccgctaaccggctttttgcccaaatgggccattatcgaagaattcacaaaaaacaatagcctcatcatccccaccatcatagccaccatcaccctccttaacctctacttctacctacgcctaatctactccacctcaatcacactactccccatatctaacaacgtaaaaataaaatgacagtttgaacatacaaaacccaccccattcctccccacactcatcgcccttaccacgctactcctacctatctccccttttatactaataatcttatagaaatttaggttaaatacagaccaagagccttcaaagccctcagtaagttgcaatacttaatttctgtaacagctaaggactgcaaaaccccactctgcatcaactgaacgcaaatcagccactttaattaagctaagcccttactagaccaatgggacttaaacccacaaacacttagttaacagctaagcaccctaatcaactggcttcaatctacttctcccgccgccgggaaaaaaggcgggagaagccccggcaggtttgaagctgcttcttcgaatttgcaattcaatatgaaaatcacctcggagctggtaaaaagaggcctaacccctgtctttagatttacagtccaatgcttcactcagccattttacctcacccccactgatgttcgccgaccgttgactattctctacaaaccacaaagacattggaacactatacctattattcggcgcatgagctggagtcctaggcacagctctaagcctccttattcgagccgagctgggccagccaggcaaccttctaggtaacgaccacatctacaacgttatcgtcacagcccatgcatttgtaataatcttcttcatagtaatacccatcataatcggaggctttggcaactgactagttcccctaataatcggtgcccccgatatggcgtttccccgcataaacaacataagcttctgactcttacctccctctctcctactcctgctcgcatctgctatagtggaggccggagcaggaacaggttgaacagtctaccctcccttagcagggaactactcccaccctggagcctccgtagacctaaccatcttctccttacacctagcaggtgtctcctctatcttaggggccatcaatttcatcacaacaattatcaatataaaaccccctgccataacccaataccaaacgcccctcttcgtctgatccgtcctaatcacagcagtcctacttctcctatctctcccagtcctagctgctggcatcactatactactaacagaccgcaacctcaacaccaccttcttcgaccccgccggaggaggagaccccattctataccaacacctattctgatttttcggtcaccctgaagtttatattcttatcctaccaggcttcggaataatctcccatattgtaacttactactccggaaaaaaagaaccatttggatacataggtatggtctgagctatgatatcaattggcttcctagggtttatcgtgtgagcacaccatatatttacagtaggaatagacgtagacacacgagcatatttcacctccgctaccataatcatcgctatccccaccggcgtcaaagtatttagctgactcgccacactccacggaagcaatatgaaatgatctgctgcagtgctctgagccctaggattcatctttcttttcaccgtaggtggcctgactggcattgtattagcaaactcatcactagacatcgtactacacgacacgtactacgttgtagcccacttccactatgtcctatcaataggagctgtatttgccatcataggaggcttcattcactgatttcccctattctcaggctacaccctagaccaaacctacgccaaaatccatttcactatcatattcatcggcgtaaatctaactttcttcccacaacactttctcggcctatccggaatgccccgacgttactcggactaccccgatgcatacaccacatgaaacatcctatcatctgtaggctcattcatttctctaacagcagtaatattaataattttcatgatttgagaagccttcgcttcgaagcgaaaagtcctaatagtagaagaaccctccataaacctggagtgactatatggatgccccccaccctaccacacattcgaagaacccgtatacataaaatctagacaaaaaaggaaggaatcgaaccccccaaagctggtttcaagccaaccccatggcctccatgactttttcaaaaaggtattagaaaaaccatttcataactttgtcaaagttaaattataggctaaatcctatatatcttaatggcacatgcagcgcaagtaggtctacaagacgctacttcccctatcatagaagagcttatcacctttcatgatcacgccctcataatcattttccttatctgcttcctagtcctgtatgcccttttcctaacactcacaacaaaactaactaatactaacatctcagacgctcaggaaatagaaaccgtctgaactatcctgcccgccatcatcctagtcctcatcgccctcccatccctacgcatcctttacataacagacgaggtcaacgatccctcccttaccatcaaatcaattggccaccaatggtactgaacctacgagtacaccgactacggcggactaatcttcaactcctacatacttcccccattattcctagaaccaggcgacctgcgactccttgacgttgacaatcgagtagtactcccgattgaagcccccattcgtataataattacatcacaagacgtcttgcactcatgagctgtccccacattaggcttaaaaacagatgcaattcccggacgtctaaaccaaaccactttcaccgctacacgaccgggggtatactacggtcaatgctctgaaatctgtggagcaaaccacagtttcatgcccatcgtcctagaattaattcccctaaaaatctttgaaatagggcccgtatttaccctatagcaccccctctaccccctctagagcccactgtaaagctaacttagcattaaccttttaagttaaagattaagagaaccaacacctctttacagtgaaatgccccaactaaatactaccgtatggcccaccataattacccccatactccttacactattcctcatcacccaactaaaaatattaaacacaaactaccacctacctccctcaccaaagcccataaaaataaaaaattataacaaaccctgagaaccaaaatgaacgaaaatctgttcgcttcattcattgcccccacaatcctaggcctacccgccgcagtactgatcattctatttccccctctattgatccccacctccaaatatctcatcaacaaccgactaatcaccacccaacaatgactaatcaaactaacctcaaaacaaatgataaccatacacaacactaaaggacgaacctgatctcttatactagtatccttaatcatttttattgccacaactaacctcctcggactcctgcctcactcatttacaccaaccacccaactatctataaacctagccatggccatccccttatgagcgggcgcagtgattataggctttcgctctaagattaaaaatgccctagcccacttcttaccacaaggcacacctacaccccttatccccatactagttattatcgaaaccatcagcctactcattcaaccaatagccctggccgtacgcctaaccgctaacattactgcaggccacctactcatgcacctaattggaagcgccaccctagcaatatcaaccattaaccttccctctacacttatcatcttcacaattctaattctactgactatcctagaaatcgctgtcgccttaatccaagcctacgttttcacacttctagtaagcctctacctgcacgacaacacataatgacccaccaatcacatgcctatcatatagtaaaacccagcccatgacccctaacaggggccctctcagccctcctaatgacctccggcctagccatgtgatttcacttccactccataacgctcctcatactaggcctactaaccaacacactaaccatataccaatgatggcgcgatgtaacacgagaaagcacataccaaggccaccacacaccacctgtccaaaaaggccttcgatacgggataatcctatttattacctcagaagtttttttcttcgcaggatttttctgagccttttaccactccagcctagcccctaccccccaattaggagggcactggcccccaacaggcatcaccccgctaaatcccctagaagtcccactcctaaacacatccgtattactcgcatcaggagtatcaatcacctgagctcaccatagtctaatagaaaacaaccgaaaccaaataattcaagcactgcttattacaattttactgggtctctattttaccctcctacaagcctcagagtacttcgagtctcccttcaccatttccgacggcatctacggctcaacattttttgtagccacaggcttccacggacttcacgtcattattggctcaactttcctcactatctgcttcatccgccaactaatatttcactttacatccaaacatcactttggcttcgaagccgccgcctgatactggcattttgtagatgtggtttgactatttctgtatgtctccatctattgatgagggtcttactcttttagtataaatagtaccgttaacttccaattaactagttttgacaacattcaaaaaagagtaataaacttcgccttaattttaataatcaacaccctcctagccttactactaataattattacattttgactaccacaactcaacggctacatagaaaaatccaccccttacgagtgcggcttcgaccctatatcccccgcccgcgtccctttctccataaaattcttcttagtagctattaccttcttattatttgatctagaaattgccctccttttacccctaccatgagccctacaaacaactaacctgccactaatagttatgtcatccctcttattaatcatcatcctagccctaagtctggcctatgagtgactacaaaaaggattagactgaaccgaattggtatatagtttaaacaaaacgaatgatttcgactcattaaattatgataatcatatttaccaaatgcccctcatttacataaatattatactagcatttaccatctcacttctaggaatactagtatatcgctcacacctcatatcctccctactatgcctagaaggaataatactatcgctgttcattatagctactctcataaccctcaacacccactccctcttagccaatattgtgcctattgccatactagtctttgccgcctgcgaagcagcggtgggcctagccctactagtctcaatctccaacacatatggcctagactacgtacataacctaaacctactccaatgctaaaactaatcgtcccaacaattatattactaccactgacatgactttccaaaaaacacataatttgaatcaacacaaccacccacagcctaattattagcatcatccctctactattttttaaccaaatcaacaacaacctatttagctgttccccaaccttttcctccgaccccctaacaacccccctcctaatactaactacctgactcctacccctcacaatcatggcaagccaacgccacttatccagtgaaccactatcacgaaaaaaactctacctctctatactaatctccctacaaatctccttaattataacattcacagccacagaactaatcatattttatatcttcttcgaaaccacacttatccccaccttggctatcatcacccgatgaggcaaccagccagaacgcctgaacgcaggcacatacttcctattctacaccctagtaggctcccttcccctactcatcgcactaatttacactcacaacaccctaggctcactaaacattctactactcactctcactgcccaagaactatcaaactcctgagccaacaacttaatatgactagcttacacaatagcttttatagtaaagatacctctttacggactccacttatgactccctaaagcccatgtcgaagcccccatcgctgggtcaatagtacttgccgcagtactcttaaaactaggcggctatggtataatacgcctcacactcattctcaaccccctgacaaaacacatagcctaccccttccttgtactatccctatgaggcataattataacaagctccatctgcctacgacaaacagacctaaaatcgctcattgcatactcttcaatcagccacatagccctcgtagtaacagccattctcatccaaaccccctgaagcttcaccggcgcagtcattctcataatcgcccacgggcttacatcctcattactattctgcctagcaaactcaaactacgaacgcactcacagtcgcatcataatcctctctcaaggacttcaaactctactcccactaatagctttttgatgacttctagcaagcctcgctaacctcgccttaccccccactattaacctactgggagaactctctgtgctagtaaccacgttctcctgatcaaatatcactctcctacttacaggactcaacatactagtcacagccctatactccctctacatatttaccacaacacaatggggctcactcacccaccacattaacaacataaaaccctcattcacacgagaaaacaccctcatgttcatacacctatcccccattctcctcctatccctcaaccccgacatcattaccgggttttcctcttgtaaatatagtttaaccaaaacatcagattgtgaatctgacaacagaggcttacgaccccttatttaccgagaaagctcacaagaactgctaactcatgcccccatgtctaacaacatggctttctcaacttttaaaggataacagctatccattggtcttaggccccaaaaattttggtgcaactccaaataaaagtaataaccatgcacactactataaccaccctaaccctgacttccctaattccccccatccttaccaccctcgttaaccctaacaaaaaaaactcatacccccattatgtaaaatccattgtcgcatccacctttattatcagtctcttccccacaacaatattcatgtgcctagaccaagaagttattatctcgaactgacactgagccacaacccaaacaacccagctctccctaagcttcaaactagactacttctccataatattcatccctgtagcattgttcgttacatggtccatcatagaattctcactgtgatatataaactcagacccaaacattaatcagttcttcaaatatctactcatcttcctaattaccatactaatcttagttaccgctaacaacctattccaactgttcatcggctgagagggcgtaggaattatatccttcttgctcatcagttgatgatacgcccgagcagatgccaacacagcagccattcaagcaatcctatacaaccgtatcggcgatatcggtttcatcctcgccttagcatgatttatcctacactccaactcatgagacccacaacaaatagcccttctaaacgctaatccaagcctcaccccactactaggcctcctcctagcagcagcaggcaaatcagcccaattaggtctccacccctgactcccctcagccatagaaggccccaccccagtctcagccctactccactcaagcactatagttgtagcaggaatcttcttactcatccgcttccaccccctagcagaaaatagcccactaatccaaactctaacactatgcttaggcgctatcaccactctgttcgcagcagtctgcgcccttacacaaaatgacatcaaaaaaatcgtagccttctccacttcaagtcaactaggactcataatagttacaatcggcatcaaccaaccacacctagcattcctgcacatctgtacccacgccttcttcaaagccatactatttatgtgctccgggtccatcatccacaaccttaacaatgaacaagatattcgaaaaataggaggactactcaaaaccatacctctcacttcaacctccctcaccattggcagcctagcattagcaggaatacctttcctcacaggtttctactccaaagaccacatcatcgaaaccgcaaacatatcatacacaaacgcctgagccctatctattactctcatcgctacctccctgacaagcgcctatagcactcgaataattcttctcaccctaacaggtcaacctcgcttccccacccttactaacattaacgaaaataaccccaccctactaaaccccattaaacgcctggcagccggaagcctattcgcaggatttctcattactaacaacatttcccccgcatcccccttccaaacaacaatccccctctacctaaaactcacagccctcgctgtcactttcctaggacttctaacagccctagacctcaactacctaaccaacaaacttaaaataaaatccccactatgcacattttatttctccaacatactcggattctaccctagcatcacacaccgcacaatcccctatctaggccttcttacgagccaaaacctgcccctactcctcctagacctaacctgactagaaaagctattacctaaaacaatttcacagcaccaaatctccacctccatcatcacctcaacccaaaaaggcataattaaactttacttcctctctttcttcttcccactcatcctaaccctactcctaatcacataacctattcccccgagcaatctcaattacaatatatacaccaacaaacaatgttcaaccagtaactactactaatcaacgcccataatcatacaaagcccccgcaccaataggatcctcccgaatcaaccctgacccctctccttcataaattattcagcttcctacactattaaagtttaccacaaccaccaccccatcatactctttcacccacagcaccaatcctacctccatcgctaaccccactaaaacactcaccaagacctcaacccctgacccccatgcctcaggatactcctcaatagccatcgctgtagtatatccaaagacaaccatcattccccctaaataaattaaaaaaactattaaacccatataacctcccccaaaattcagaataataacacacccgaccacaccgctaacaatcaatactaaacccccataaataggagaaggcttagaagaaaaccccacaaaccccattactaaacccacactcaacagaaacaaagcatacatcattattctcgcacggactacaaccacgaccaatgatatgaaaaaccatcgttgtatttcaactacaagaacaccaatgaccccaatacgcaaaactaaccccctaataaaattaattaaccactcattcatcgacctccccaccccatccaacatctccgcatgatgaaacttcggctcactccttggcgcctgcctgatcctccaaatcaccacaggactattcctagccatgcactactcaccagacgcctcaaccgccttttcatcaatcgcccacatcactcgagacgtaaattatggctgaatcatccgctaccttcacgccaatggcgcctcaatattctttatctgcctcttcctacacatcgggcgaggcctatattacggatcatttctctactcagaaacctgaaacatcggcattatcctcctgcttgcaactatagcaacagccttcataggctatgtcctcccgtgaggccaaatatcattctgaggggccacagtaattacaaacttactatccgccatcccatacattgggacagacctagttcaatgaatctgaggaggctactcagtagacagtcccaccctcacacgattctttacctttcacttcatcttgcccttcattattgcagccctagcaacactccacctcctattcttgcacgaaacgggatcaaacaaccccctaggaatcacctcccattccgataaaatcaccttccacccttactacacaatcaaagacgccctcggcttacttctcttccttctctccttaatgacattaacactattctcaccagacctcctaggcgacccagacaattataccctagccaaccccttaaacacccctccccacatcaagcccgaatgatatttcctattcgcctacacaattctccgatccgtccctaacaaactaggaggcgtccttgccctattactatccatcctcatcctagcaataatccccatcctccatatatccaaacaacaaagcataatatttcgcccactaagccaatcactttattgactcctagccgcagacctcctcattctaacctgaatcggaggacaaccagtaagctacccttttaccatcattggacaagtagcatccgtactatacttcacaacaatcctaatcctaataccaactatctccctaattgaaaacaaaatactcaaatgggcctgtccttgtagtataaactaatacaccagtcttgtaaaccggagatgaaaacctttttccaaggacaaatcagagaaaaagtctttaactccaccattagcacccaaagctaagattctaatttaaactattctctgttctttcatggggaagcagatttgggtaccacccaagtattgactcacccatcaacaaccgctatgtatttcgtacattactgccagccaccatgaatattgtacggtaccataaatacttgaccacctgtagtacataaaaacccaatccacatcaaaaccccctccccatgcttacaagcaagtacagcaatcaaccctcaactatcacacatcaactgcaactccaaagccacccctcacccactaggataccaacaaacctacccacccttaacagtacatagtacataaagccatttaccgtacatagcacattacagtcaaatcccttctcgtccccatggatgacccccctcagataggggtcccttgaccaccatcctccgtgaaatcaatatcccgcacaagagtgctactctcctcgctccgggcccataacacttgggggtagctaaagtgaactgtatccgacatctggttcctacttcagggtcataaagcctaaatagcccacacgttccccttaaataagacatcacgatg

SEQ ID NO: 12 - DNA, 16571 bp, Homo sapiens mitochondrial
  3109: "n" refers to a nucleotide at position 3107 of the Cambridge Reference Sequence (CRS, Anderson et al. 1981 Nature 290:457-465), later determined to be absent from the human mtDNA sequence according to the revised CRS (rCRS, Andrews et al. 1999 Nature Genetics 23:147); "n" therefore represents a single nucleotide deletion at a position corresponding to nucleotide 3107 of SEQ ID NO:1 as provided herein.
gatcacaggtctatcaccctattaaccactcacgggagctctccatgcatttggtattttcgtctggggggtgtgcacgcgatagcattgcgagacgctggagccggagcaccctatgtcgcagtatctgtctttgattcctgcctcatcctattatttatcgcacctacgttcaatattacaggcgaacatacctactaaagtgtgttaattaattaatgcttgtaggacataataataacaattgaatgtctgcacagccgctttccacacagacatcataacaaaaaatttccaccaaaccccccctcccccccgcttctggccacagcacttaaacacatctctgccaaaccccaaaaacaaagaaccctaacaccagcctaaccagatttcaaattttatcttttggcggtatgcacttttaacagtcaccccccaactaacacattattttcccctcccactcccatactactaatctcatcaatacaaccctcgcccatcctacccagcacacacacaccgctgctaaccccataccccgaaccaaccaaaccccaaagacaccccccacagtttatgtagcttaccccctcaaagcaatacactgaaaatgtttagacgggctcacatcaccccataaacaaataggtttggtcctagcctttctattagctcttagtaagattacacatgcaagcatccccgttccagtgagttcaccctctaaatcaccacgatcaaaagggacaagcatcaagcacgcagcaatgcagctcaaaacgcttagcctagccacacccccacgggaaacagcagtgattaacctttagcaataaacgaaagtttaactaagctatactaaccccagggttggtcaatttcgtgccagccaccgcggtcacacgattaacccaagtcaatagaagccggcgtaaagagtgttttagatcaccccctccccaataaagctaaaactcacctgagttgtaaaaaactccagttgacacaaaatagactacgaaagtggctttaacatatctgaacacacaatagctaagacccaaactgggattagataccccactatgcttagccctaaacctcaacagttaaatcaacaaaactgctcgccagaacactacgagccacagcttaaaactcaaaggacctggcggtgcttcatacccctctagaggagcctgttctgtaatcgataaaccccgatcaacctcaccacctcttgctcagcctatataccgccatcttcagcaaaccctgatgaaggctacaaagtaagcgcaagtacccacgtaaagacgttaggtcaaggtgtagcccatgaggtggcaagaaatgggctacattttctaccccagaaaactacgatagcccttatgaaacttaagggtcgaaggtggatttagcagtaaactgagagtagagtgcttagttgaacagggccctgaagcgcgtacacaccgcccgtcaccctcctcaagtatacttcaaaggacatttaactaaaacccctacgcatttatatagaggagacaagtcgtaacatggtaagtgtactggaaagtgcacttggacgaaccagagtgtagcttaacacaaagcacccaacttacacttaggagatttcaacttaacttgaccgctctgagctaaacctagccccaaacccactccaccttactaccagacaaccttagccaaaccatttacccaaataaagtataggcgatagaaattgaaacctggcgcaatagatatagtaccgcaagggaaagatgaaaaattatagccaagcataatatagcaaggactaacccctataccttctgcataatgaattaactagaaataactttgcaaggagagccaaagctaagacccccgaaaccagacgagctacctaagaacagctaaaagagcacacccgtctatgtagcaaaatagtgggaagatttataggtagaggcgacaaacctaccgagcctggtgatagctggttgtccaagatagaatcttagttcaactttaaatttgcccacagaaccctctaaatccccttgtaaatttaactgttagtccaaagaggaacagctctttggacactaggaaaaaaccttgtagagagagtaaaaaatttaacacccatagtaggcctaaaagcagccaccaattaagaaagcgttcaagctcaacacccactacctaaaaaatcccaaacatataactgaactcctcacacccaattggaccaatctatcaccctatagaagaactaatgttagtataagtaacatgaaaacattctcctccgcataagcctgcgtcagattaaaacactgaactgacaattaacagcccaatatctacaatcaaccaacaagtcattattaccctcactgtcaacccaacacaggcatgctcataaggaaaggttaaaaaaagtaaaaggaactcggcaaaccttaccccgcctgtttaccaaaaacatcacctctagcatcaccagtattagaggcaccgcctgcccagtgacacatgtttaacggccgcggtaccctaaccgtgcaaaggtagcataatcacttgttccttaaatagggacctgtatgaatggctccacgagggttcagctgtctcttacttttaaccagtgaaattgacctgcccgtgaagaggcgggcatgacacagcaagacgagaagaccctatggagctttaatttattaatgcaaacagtacctaacaaacccacaggtcctaaactaccaaacctgcattaaaaatttcggttggggcgacctcggagcagaacccaacctccgagcagtacatgctaagacttcaccagtcaaagcgaactactatactcaattgatccaataacttgaccaacggaacaagttaccctagggataacagcgcaatcctattctagagtccatatcaacaatagggtttacgacctcgatgttggatcaggacatcccgatggtgcagccgctattaaaggttcgtttgttcaacgattaaagtcctacgtgatctgagttcagaccggagtaatccaggtcggtttctatctacnttcaaattcctccctgtacgaaaggacaagagaaataaggcctacttcacaaagcgccttcccccgtaaatgatatcatctcaacttagtattatacccacacccacccaagaacagggtttgttaagatggcagagcccggtaatcgcataaaacttaaaactttacagtcagaggttcaattcctcttcttaacaacatacccatggccaacctcctactcctcattgtacccattctaatcgcaatggcattcctaatgcttaccgaacgaaaaattctaggctatatacaactacgcaaaggccccaacgttgtaggcccctacgggctactacaacccttcgctgacgccataaaactcttcaccaaggagcccctaaaacccgccacatctaccatcaccctctacatcaccgccccgaccttagctctcaccatcgctcttctactatgaacccccctccccatacccaaccccctggtcaacctcaacctaggcctcctatttattctagccacctctagcctagccgtttactcaatcctctgatcagggtgagcatcaaactcaaactacgccctgatcggcgcactgcgagcagtagcccaaacaatctcatatgaagtcaccctagccatcattctactatcaacattactaataagtggctcctttaacctctccacccttatcacaacacaagaacacctctgattactcctgccatcatgacccttggccataatatgatttatctccacactagcagagaccaaccgaacccccttcgaccttgccgaaggggagtccgaactagtctcaggcttcaacatcgaatacgccgcaggccccttcgccctattcttcatagccgaatacacaaacattattataataaacaccctcaccactacaatcttcctaggaacaacatatgacgcactctcccctgaactctacacaacatattttgtcaccaagaccctacttctaacctccctgttcttatgaattcgaacagcatacccccgattccgctacgaccaactcatacacctcctatgaaaaaacttcctaccactcaccctagcattacttatatgatatgtctccatacccattacaatctccagcattccccctcaaacctaagaaatatgtctgataaaagagttactttgatagagtaaataataggagcttaaacccccttatttctaggactatgagaatcgaacccatccctgagaatccaaaattctccgtgccacctatcacaccccatcctaaagtaaggtcagctaaataagctatcgggcccataccccgaaaatgttggttatacccttcccgtactaattaatcccctggcccaacccgtcatctactctaccatctttgcaggcacactcatcacagcgctaagctcgcactgattttttacctgagtaggcctagaaataaacatgctagcttttattccagttctaaccaaaaaaataaaccctcgttccacagaagctgccatcaagtatttcctcacgcaagcaaccgcatccataatccttctaatagctatcctcttcaacaatatactctccggacaatgaaccataaccaatactaccaatcaatactcatcattaataatcataatggctatagcaataaaactaggaatagccccctttcacttctgagtcccagaggttacccaaggcacccctctgacatccggcctgcttcttctcacatgacaaaaactagcccccatctcaatcatataccaaatctctccctcactaaacgtaagccttctcctcactctctcaatcttatccatcatagcaggcagttgaggtggattaaaccaaacccagctacgcaaaatcttagcatactcctcaattacccacataggatgaataatagcagttctaccgtacaaccctaacataaccattcttaatttaactatttatattatcctaactactaccgcattcctactactcaacttaaactccagcaccacgaccctactactatctcgcacctgaaacaagctaacatgactaacacccttaattccatccaccctcctctccctaggaggcctgcccccgctaaccggctttttgcccaaatgggccattatcgaagaattcacaaaaaacaatagcctcatcatccccaccatcatagccaccatcaccctccttaacctctacttctacctacgcctaatctactccacctcaatcacactactccccatatctaacaacgtaaaaataaaatgacagtttgaacatacaaaacccaccccattcctccccacactcatcgcccttaccacgctactcctacctatctccccttttatactaataatcttatagaaatttaggttaaatacagaccaagagccttcaaagccctcagtaagttgcaatacttaatttctgtaacagctaaggactgcaaaaccccactctgcatcaactgaacgcaaatcagccactttaattaagctaagcccttactagaccaatgggacttaaacccacaaacacttagttaacagctaagcaccctaatcaactggcttcaatctacttctcccgccgccgggaaaaaaggcgggagaagccccggcaggtttgaagctgcttcttcgaatttgcaattcaatatgaaaatcacctcggagctggtaaaaagaggcctaacccctgtctttagatttacagtccaatgcttcactcagccattttacctcacccccactgatgttcgccgaccgttgactattctctacaaaccacaaagacattggaacactatacctattattcggcgcatgagctggagtcctaggcacagctctaagcctccttattcgagccgagctgggccagccaggcaaccttctaggtaacgaccacatctacaacgttatcgtcacagcccatgcatttgtaataatcttcttcatagtaatacccatcataatcggaggctttggcaactgactagttcccctaataatcggtgcccccgatatggcgtttccccgcataaacaacataagcttctgactcttacctccctctctcctactcctgctcgcatctgctatagtggaggccggagcaggaacaggttgaacagtctaccctcccttagcagggaactactcccaccctggagcctccgtagacctaaccatcttctccttacacctagcaggtgtctcctctatcttaggggccatcaatttcatcacaacaattatcaatataaaaccccctgccataacccaataccaaacgcccctcttcgtctgatccgtcctaatcacagcagtcctacttctcctatctctcccagtcctagctgctggcatcactatactactaacagaccgcaacctcaacaccaccttcttcgaccccgccggaggaggagaccccattctataccaacacctattctgatttttcggtcaccctgaagtttatattcttatcctaccaggcttcggaataatctcccatattgtaacttactactccggaaaaaaagaaccatttggatacataggtatggtctgagctatgatatcaattggcttcctagggtttatcgtgtgagcacaccatatatttacagtaggaatagacgtagacacacgagcatatttcacctccgctaccataatcatcgctatccccaccggcgtcaaagtatttagctgactcgccacactccacggaagcaatatgaaatgatctgctgcagtgctctgagccctaggattcatctttcttttcaccgtaggtggcctgactggcattgtattagcaaactcatcactagacatcgtactacacgacacgtactacgttgtagctcacttccactatgtcctatcaataggagctgtatttgccatcataggaggcttcattcactgatttcccctattctcaggctacaccctagaccaaacctacgccaaaatccatttcactatcatattcatcggcgtaaatctaactttcttcccacaacactttctcggcctatccggaatgccccgacgttactcggactaccccgatgcatacaccacatgaaacatcctatcatctgtaggctcattcatttctctaacagcagtaatattaataattttcatgatttgagaagccttcgcttcgaagcgaaaagtcctaatagtagaagaaccctccataaacctggagtgactatatggatgccccccaccctaccacacattcgaagaacccgtatacataaaatctagacaaaaaaggaaggaatcgaaccccccaaagctggtttcaagccaaccccatggcctccatgactttttcaaaaaggtattagaaaaaccatttcataactttgtcaaagttaaattataggctaaatcctatatatcttaatggcacatgcagcgcaagtaggtctacaagacgctacttcccctatcatagaagagcttatcacctttcatgatcacgccctcataatcattttccttatctgcttcctagtcctgtatgcccttttcctaacactcacaacaaaactaactaatactaacatctcagacgctcaggaaatagaaaccgtctgaactatcctgcccgccatcatcctagtcctcatcgccctcccatccctacgcatcctttacataacagacgaggtcaacgatccctcccttaccatcaaatcaattggccaccaatggtactgaacctacgagtacaccgactacggcggactaatcttcaactcctacatacttcccccattattcctagaaccaggcgacctgcgactccttgacgttgacaatcgagtagtactcccgattgaagcccccattcgtataataattacatcacaagacgtcttgcactcatgagctgtccccacattaggcttaaaaacagatgcaattcccggacgtctaaaccaaaccactttcaccgctacacgaccgggggtatactacggtcaatgctctgaaatctgtggagcaaaccacagtttcatgcccatcgtcctagaattaattcccctaaaaatctttgaaatagggcccgtatttaccctatagcaccccctctaccccctctagagcccactgtaaagctaacttagcattaaccttttaagttaaagattaagagaaccaacacctctttacagtgaaatgccccaactaaatactaccgtatggcccaccataattacccccatactccttacactattcctcatcacccaactaaaaatattaaacacaaactaccacctacctccctcaccaaagcccataaaaataaaaaattataacaaaccctgagaaccaaaatgaacgaaaatctgttcgcttcattcattgcccccacaatcctaggcctacccgccgcagtactgatcattctatttccccctctattgatccccacctccaaatatctcatcaacaaccgactaatcaccacccaacaatgactaatcaaactaacctcaaaacaaatgataaccatacacaacactaaaggacgaacctgatctcttatactagtatccttaatcatttttattgccacaactaacctcctcggactcctgcctcactcatttacaccaaccacccaactatctataaacctagccatggccatccccttatgagcgggcgcagtgattataggctttcgctctaagattaaaaatgccctagcccacttcttaccacaaggcacacctacaccccttatccccatactagttattatcgaaaccatcagcctactcattcaaccaatagccctggccgtacgcctaaccgctaacattactgcaggccacctactcatgcacctaattggaagcaccaccctagcaatatcaaccattaaccttccctctacacttatcatcttcacaattctaattctactgactatcctagaaatcgctgtcgccttaatccaagcctacgttttcacacttctagtaagcctctacctgcacgacaacacataatgacccaccaatcacatgcctatcatatagtaaaacccagcccatgacccctaacaggggccctctcagccctcctaatgacctccggcctagccatgtgatttcacttccactccataacgctcctcatactaggcctactaaccaacacactaaccatataccaatgatggcgcgatgtaacacgagaaagcacataccaaggccaccacacaccacctgtccaaaaaggccttcgatacgggataatcctatttattacctcagaagtttttttcttcgcaggatttttctgagccttttaccactccagcctagcccctaccccccaattaggagggcactggcccccaacaggcatcaccccgctaaatcccctagaagtcccactcctaaacacatccgtattactcgcatcaggagtatcaatcacctgagctcaccatagtctaatagaaaacaaccgaaaccaaataattcaagcactgctcattacaattttactgggtctctattttaccctcctacaagcctcagagtacttcgagtctcccttcaccatttccgacggcatctacggctcaacattttttgtagccacaggcttccacggacttcacgtcattattggctcaactttcctcactatctgcttcatccgccaactaatatttcactttacatccaaacatcactttggcttcgaagccgccgcctgatactggcattttgtagatgtggtttgactatttctgtatgtctccatctattgatgagggtcttactcttttagtataaatagtaccgttaacttccaattaactagttttgacaacattcaaaaaagagtaataaacttcgccttaattttaataatcaacaccctcctagccttactactaataattattacattttgactaccacaactcaacggctacatagaaaaatccaccccttacgagtgcggcttcgaccctatatcccccgcccgcgtccctttctccataaaattcttcttagtagctattaccttcttattatttgatctagaaattgccctccttttacccctaccatgagccctacaaacaactaacctgccactaatagttatgtcatccctcttattaatcatcatcctagccctaagtctggcctatgagtgactacaaaaaggattagactgagccgaattggtatatagtttaaacaaaacgaatgatttcgactcattaaattatgataatcatatttaccaaatgcccctcatttacataaatattatactagcatttaccatctcacttctaggaatactagtatatcgctcacacctcatgtcctccctactatgcctagaaggaataatactatcgctgttcattatagctactctcataaccctcaacacccactccctcttagccaatattgtgcctattgccatactagtctttgccgcctgcgaagcagcggtgggcctagccctactagtctcaatctccaacacatatggcctagactacgtacataacctaaacctactccaatgctaaaactaatcgtcccaacaattatattactaccactgacatgactttccaaaaaacacataatttgaatcaacacaaccacccacagcctaattattagcatcatccctctactattttttaaccaaatcaacaacaacctatttagctgttccccaaccttttcctccgaccccctaacaacccccctcctaatactaactacctgactcctacccctcacaatcatggcaagccaacgccacttatccagtgaaccactatcacgaaaaaaactctacctctctatactaatctccctacaaatctccttaattataacattcacagccacagaactaatcatattttatatcttcttcgaaaccacacttatccccaccttggctatcatcacccgatgaggcaaccagccagaacgcctgaacgcaggcacatacttcctattctacaccctagtaggctcccttcccctactcatcgcactaatttacactcacaacaccctaggctcactaaacattctactactcaccctcactgcccaagaactatcaaactcctgagccaacaacttaatatgactagcttacacaatagcttttatagtaaagatacctctttacggactccacttatgactccctaaagcccatgtcgaagcccccatcgctgggtcaatagtacttgccgcagtactcttgaagctaggcggctatggtataatacgcctcacactcattctcaaccccctgacaaaacacatagcctaccccttccttgtactatccctatgaggcataattataacaagctccatctgcctacgacaaacagacctaaaatcgctcattgcatactcttcaatcagccacatagccctcgtagtaacagccattctcatccaaaccccctgaagcttcaccggcgcagtcattctcataatcgcccacggacttacatcctcattactattctgcctagcaaactcaaactacgaacgcactcacagtcgcatcataatcctctctcaaggacttcaaactctactcccactaatagctttttgatgacttctagcaagcctcgctaacctcgccttaccccccactattaacctactgggagaactctctgtgctagtaaccacattctcctgatcaaatatcactctcctacttacaggactcaacatactagtcacagccctatactccctctacatatttaccacaacacaatggggctcactcacccaccacattaacaacataaaaccctcattcacacgagaaaacaccctcatgttcatacacctatcccccattctcctcctatccctcaaccccgacatcattaccgggttttcctcttgtaaatatagtttaaccaaaacatcagattgtgaatctgacaacagaggcttacgaccccttatttaccgagaaagctcacaagaactgctaactcatgcccccatgtctaacaacatggctttctcaacttttaaaggataacagctatccattggtcttaggccccaagaattttggtgcaactccaaataaaagtaataaccatgcacactactataaccaccctaaccctaacttccctaattccccccatccttaccaccctcgttaaccctaacaaaaaaaactcatacccccattatgtaaaatccattgtcgcatccacctttattatcagtctcttccccacaacaatattcatgtgcctagaccaagaagttattatctcgaactgacactgagccacaacccaaacaacccagctctccctaagcttcaaactagactacttctccataatattcatccctgtagcattgttcgttacatggtccatcatagaattctcactgtgatatataaactcagacccaaacattaatcagttcttcaaatatctactcatcttcctaattaccatactaatcttagttaccgctaacaacctattccaactgttcatcggctgagagggcgtaggaattatatccttcttgctcatcagttgatgatacgcccgagcagatgccaacacagcagccattcaagcaatcctatacaaccgtatcggcgatatcggtttcatcctcgccttagcatgatttatcctacactccaactcatgagacccacaacaaatagcccttctaaacgctaatccaagcctcaccccactactaggcctcctcctagcagcagcaggcaaatcagcccaattaggtctccacccctgactcccctcagccatagaaggccccaccccagtctcagccctactccactcaagcactatagttgtagcaggaatcttcttactcatccgcttccaccccctagcagaaaatagcccactaatccaaactctaacactatgcttaggcgctatcaccactctgttcgcagcagtctgcgcccttacacaaaatgacatcaaaaaaatcgtagccttctccacttcaagtcaactaggactcataatagttacaatcggcatcaaccaaccacacctagcattcctgcacatctgtacccacgccttcttcaaagccatactatttatgtgctccgggtccatcatccacaaccttaacaatgaacaagatattcgaaaaataggaggactactcaaaaccatacctctcacttcaacctccctcaccattggcagcctagcattagcaggaatacctttcctcacaggtttctactccaaagaccacatcatcgaaaccgcaaacatatcatacacaaacgcctgagccctatctattactctcatcgctacctccctgacaagcgcctatagcactcgaataattcttctcaccctaacaggtcaacctcgcttccccacccttactaacattaacgaaaataaccccaccctactaaaccccattaaacgcctggcagccggaagcctattcgcaggatttctcattactaacaacatttcccccgcatcccccttccaaacaacaatccccctctacctaaaactcacagccctcgctgtcactttcctaggacttctaacagccctagacctcaattacctaaccaacaaacttaaaataaaatccccactatgcacattttatttctccaacatactcggattctaccctagcatcacacaccgcacaatcccctatctaggccttcttacgagccaaaacctgcccctactcctcctagacctaacctgactagaaaagctattacctaaaacaatttcacagcaccaaatctccacctccatcatcacctcaacccaaaaaggcataattaaactttacttcctctctttcttcttcccactcatcctaaccctactcctaatcacataacctattcccccgagcaatttcaattacaatatatacaccaacaaacaatgttcaaccagtaactactactaatcaacgcccataatcatacaaagcccccgcaccaataggatcctcccgaatcaaccctgacccctctccttcataaattattcagcttcctacactattaaagtttaccacaaccaccaccccatcatactctttcacccacagcaccaatcctacctccatcgctaaccccactaaaacactcaccaagacctcaacccctgacccccatgcctcaggatactcctcaatagccatcgctgtagtatatccaaagacaaccatcattccccctaaataaattaaaaaaactattaaacccatataacctcccccaaaattcagaataataacacacccgaccacaccgctaacaatcaatactaaacccccataaataggagaaggcttagaagaaaaccccacaaaccccattactaaacccacactcaacagaaacaaagcatacatcattattctcgcacggactacaaccacgaccaatgatatgaaaaaccatcgttgtatttcaactacaagaacaccaatgaccccaatacgcaaaattaaccccctaataaaattaattaaccactcactcatcgacctccccaccccatccaacatctccgcatgatgaaacttcggctcactccttggcgcctgcctgatcctccaaatcaccacaggactattcctagccatgcactactcaccagacgcctcaaccgccttttcatcaatcgcccacatcactcgagacgtaaattatggctgaatcatccgctaccttcacgccaatggcgcctcaatattctttatctgcctcttcctacacatcgggcgaggcctatattacggatcatttctctactcagaaacctgaaacatcggcattatcctcctgcttgcaactatagcaacagccttcataggctatgtcctcccgtgaggccaaatatcattctgaggggccacagtaattacaaacttactatccgccatcccatacattgggacagacctagttcaatgaatctgaggaggctactcagtagacagtcccaccctcacacgattctttacctttcacttcatcttgcccttcattattgcagccctagcagcactccacctcctattcttgcacgaaacgggatcaaacaaccccctaggaatcacctcccattccgataaaatcaccttccacccttactacacaatcaaagacgccctcggcttacttctcttccttctctccttaatgacattaacactattctcaccagacctcctaggcgacccagacaattataccctagccaaccccttaaacacccctccccacatcaagcccgaatgatatttcctattcgcctacacaattctccgatccgtccctaacaaactaggaggcgtccttgccctattactatccatcctcatcctagcaataatccccatcctccatatatccaaacaacaaagcataatatttcgcccactaagccaatcactttattgactcctagccgcagacctcctcattctaacctgaatcggaggacaaccagtaagctacccttttaccatcattggacaagtagcatccgtactatacttcacaacaatcctaatcctaataccaactatctccctaattgaaaacaaaatactcaaatgggcctgtccttgtagtataaactaatacaccagtcttgtaagccggagatgaaaacctttttccaaggacaaatcagagaaaaagtctttaactccaccattagcacccaaagctaagattctaatttaaactattctctgttctttcatggggaagcagatttgggtaccacccaagtattgactcacccatcaacaaccgctatgtatctcgtacattactgccagccaccatgaatattgtacggtaccataaatacttgaccacctgtagtacataaaaacccaatccacatcaaaaccccctccccatgcttacaagcaagtacagcaatcaacccccaactatcacacatcaactgcaactccaaagccacccctcacccactaggataccaacaaacctacccacccttaacagtacatagcacataaagccatttaccgtacatagcacattacagtcaaatcccttctcgtccccatggatgacccccctcagataggggtcccttgaccaccatcctccgtgaaatcaatatcccgcacaagagtgctactctcctcgctccgggcccataacacttgggggtagctaaagtgaactgtatccgacatctggttcctacttcagggccataaagcctaaatagcccacacgttccccttaaataagacatcacgatg

SEQ ID NO: 13 - DNA, 16570 bp, Homo sapiens mitochondrial
  3108: "n" refers to a nucleotide at position 3107 of the Cambridge Reference Sequence (CRS, Anderson et al. 1981 Nature 290:457-465), later determined to be absent from the human mtDNA sequence according to the revised CRS (rCRS, Andrews et al. 1999 Nature Genetics 23:147); "n" therefore represents a single nucleotide deletion at a position corresponding to nucleotide 3107 of SEQ ID NO:1 as provided herein.
gatcacaggtctatcaccctattaaccactcacgggagctctccatgcatttggtattttcgtttggggggtgtgcacgcgatagcattgcgagacgctggagccggagcaccctatgtcgcagtatctgtctttgattcctgcctcatcctattatttatcgcacctacgttcaatattacaggcgaacatacttactaaagtgtgttaattaattaatgcttgtaggacatagtaataacaattgaatgtctgcacagccgctttccacacagacatcataacaaaaaatttccaccaaaccccccctcccccgccttctggccacagcacttaaacacatctctgccaaaccccaaaaacaaagaaccctaacaccagcctaaccagatttcaaattttatcttttggcggtatgcacttttaacagtcaccccccaactaacacattattttcccctcccactcccatactactaatctcatcaatacaacccccgcccatcctacccagcacacacacaccgctgctaaccccataccccgaaccaaccaaaccccaaagacaccccccacagtttatgtagcttacctcctcaaagcaatacactgaaaatgtttagacgggctcacatcaccccataaacaaataggtttggtcctggcctttctattagctcttagtaagattacacatgcaagcatccccgttccagtgagttcaccctctaaatcaccacgatcaaaagggacaagcatcaagcacgcagcaatgcagctcaaaacgcttagcctagccacacccccacgggaaacagcagtgattaacctttagcaataaacgaaagtttaactaagctatactaaccccagggttggtcaatttcgtgccagccaccgcggtcacacgattaacccaagtcaatagaagccggcgtaaagagtgttttagatcaccccctccccaataaagctaaaactcacctgagttgtaaaaaactccagttgacacaaaatagactacgaaagtggctttaacatatctgaacacacaatagctaagacccaaactgggattagataccccactatgcttagccctaaacctcaacagttaaatcaacaaaactgctcgccagaacactacgagccacagcttaaaactcaaaggacctggcggtgcttcatatccctctagaggagcctgttctgtaatcgataaaccccgatcaacctcaccacctcttgctcagcctatataccgccatcttcagcaaaccctgatgaaggctacaaagtaagcgcaagtacccacgtaaagacgttaggtcaaggtgtagcccatgaggtggcaagaaatgggctacattttctaccccagaaaactacgatagcccttatgaaacttaagggtcgaaggtggatttagcagtaaactgagagtagagtgcttagttgaacagggccctgaagcgcgtacacaccgcccgtcaccctcctcaagtatacttcaaaggacatttaactaaaacccctacgcatttatatagaggagacaagtcgtaacatggtaagtgtactggaaagtgcacttggacgaaccagagtgtagcttaacacaaagcacccaacttacacttaggagatttcaacttaacttgaccgctctgagctaaacctagccccaaacccactccaccttactaccagacaaccttagccaaaccatttacccagataaagtataggcgatagaaattgaaacctggcgcaatagatatagtaccgcaagggaaagatgaaaaattataaccaagcataatatagcaaggactaacccctataccttctgcataatgaattaactagaaataactttgcaaggagagccaaagctaagacccccgaaaccagacgagctacctaagaacagctaaaagagcacacccgtctatgtagcaaaatagtgggaagatttataggtagaggcgacaaacctaccgagcctggtgatagctggttgtccaagatagaatcttagttcaactttaaatttgcccacagaaccctctaaatccccttgtaaatttaactgttagtccaaagaggaacagctctttggacactaggaaaaaaccttgtagagagagtaaaaaatttaacacccatagtaggcctaaaagcagccaccaattaagaaagcgttcaagctcaacacccactacctaaaaaatcccaaacatataactgaactcctcacacccaattggaccaatctatcaccctatagaagaactaatgttagtataagtaacatgaaaacattctcctccgcataagcctgcgtcagattaaaacactgaactgacaattaacagcccaatatctacaatcaaccaacaagtcattattaccctcactgtcaacccaacacaggcatgctcataaggaaaggttaaaaaaagtaaaaggaactcggcaaatcttaccccgcctgtttaccaaaaacatcacctctagcatcaccagtattagaggcaccgcctgcccagtgacacatgtttaacggccgcggtaccctaaccgtgcaaaggtagcataatcacttgttccttaaatagggacctgtatgaatggccccacgagggttcagctgtctcttacttttaaccagtgaaattgacctgcccgtgaagaggcgggcatgacacagcaagacgagaagaccctatggagctttaatttattaatgcaaacagtacctaacaaacccacaggtcctaaactaccaaacctgcattaaaaatttcggttggggcgacctcggagcagaacccaacctccgagcagtacatgctaagacttcaccagtcaaagcgaactactatactcaattgatccaataacttgaccaacggaacaagttaccctagggataacagcgcaatcctattctagagtccatatcaacaatagggtttacgacctcgatgttggatcaggacatcccgatggtgcagccgctattaaaggttcgtttgttcaacgattaaagtcctacgtgatctgagttcagaccggagtaatccaggtcggtttctatctacnttcaaattcctccctgtacgaaaggacaagagaaataaggcctacttcacaaagcgccttcccccgtaaatgatatcatctcaacttagtattatacccacacccacccaagaacagggtttgttaagatggcagagcccggtaatcgcataaaacttaaaactttacagtcagaggttcaattcctcttcttaacaacatacccatgaccaacctcctactcctcattgtacccattctaatcgcaatggcattcctaatgcttaccgaacgaaaaattctaggctatatacaactacgcaaaggccccaacgttgtaggcccctacgggctactacaacccttcgctgacgccataaaactcttcaccaaagagcccctaaaacccgccacatctaccatcaccctctacatcaccgccccgaccttagctctcaccatcgctcttctactatgaacccccctccccatacccaaccccctggtcaacctcaacctaggcctcctatttattctagccacctctagcctagccgtttactcaatcctctgatcagggtgagcatcaaactcaaactacgccctgatcggcgcactgcgagcagtagcccaaacaatctcatatgaagtcaccctagccatcattctactatcaacattactaataagtggctcctttaacctctccacccttatcacaacacaagaacacctctgattactcctgccatcatgacccttggccataatatgatttatctccacactagcagagaccaaccgaacccccttcgaccttgccgaaggggagtccgaactagtctcaggcttcaacatcgaatacgccgcaggccccttcgccctattcttcatagccgaatacacaaacattattataataaacaccctcaccactacaatcttcctaggaacaacatatgacgcactctcccctgaactctacacaacatattttgtcaccaagaccctacttctaacctccctgttcttatgaattcgaacagcatacccccgattccgctacgaccaactcatacacctcctatgaaaaaacttcctaccactcaccctagcattacttatatgatatgtctccatacccattacaatctccagcatcccccctcaaacctaagaaatatgtctgataaaagagttactttgatagagtaaataataggagcttaaacccccttatttctaggactatgagaatcgaacccatccctgagaatccaaaattctccgtgccacctatcacaccccatcctaaagtaaggtcagctaaataagctatcgggcccataccccgaaaatgttggttatacccttcccgtactaattaatcccctggcccaacccgtcatctactctaccatctttgcaggcacactcatcacagcgctaagctcgcactgattttttacctgagtaggcctagaaataaacatgctagcttttattccagttctaaccaaaaaaataaaccctcgttccacagaagctgccatcaagtatttcctcacgcaagcaaccgcatccataatccttctaatagctatcctcttcaacaatatactctccggacaatgaaccataaccaatactaccaatcaatactcatcattaataatcataatggctatagcaataaaactaggaatagccccctttcacttctgagtcccagaggttgcccaaggcacccctctgacatccggcctgcttcttctcacatgacaaaaactagcccccatctcaatcatataccaaatctctccctcactaaacgtaagccttctcctcactctctcaatcttatccatcatagcaggcagttgaggtggattaaaccaaacccagctacgcaaaatcttagcatactcctcaattacccacataggatgaataatagcagttctaccgtacaaccctaacataaccattcttaatttaactatttatattatcctaactactaccgcattcctactactcaacttaaactccagcaccacgaccctactactatctcgcacctgaaacaagctaacatgactaacacccttaattccatccaccctcctctccctaggaggcctgcccccgctaaccggctttttgcccaaatgggccattatcgaagaattcacaaaaaacaatagcctcatcatccccaccatcatagccaccatcaccctccttaacctctacttctacctacgcctaatctactccacctcaatcacactactccccatatctaacaacgtaaaaataaaatgacagtttgaacatacaaaacccaccccattcctccccacactcatcgcccttaccacgctactcctacctatctccccttttatactaataatcttatagaaatttaggttaaatacagaccaagagccttcaaagccctcagtaagttgcaatacttaatttctgtaacagctaaggactgcaaaaccccactctgcatcaactgaacgcaaatcagccactttaattaagctaagcccttactagaccaatgggacttaaacccacaaacacttagttaacagctaagcaccctaatcaactggcttcaatctacttctcccgccgccgggaaaaaaggcgggagaagccccggcaggtttgaagctgcttcttcgaatttgcaattcaatatgaaaatcacctcggagctggtaaaaagaggcctaacccctgtctttagatttacagtccaatgcttcactcagccattttacctcacccccactgatgttcgccgaccgttgactattctctacaaaccacaaagacattggaacactatacctattattcggcgcatgagctggagtcctaggcacagctctaagcctccttattcgagccgagctgggccagccaggcaaccttctaggtaacgaccacatctacaacgttatcgtcacagcccatgcatttgtaataatcttcttcatagtaatacccatcataatcggaggctttggcaactgactagttcccctaataatcggtgcccccgatatggcgtttccccgcataaacaacataagcttctgactcttacctccctctctcctactcctgctcgcatctgctatagtggaggccggagcaggaacaggttgaacagtctaccctcccttagcagggaactactcccaccctggagcctccgtagacctaaccatcttctccttacacctagcaggtgtctcctctatcttaggggccatcaatttcatcacaacaattatcaatataaaaccccctgccataacccaataccaaacgcccctcttcgtctgatccgtcctaatcacagcagtcctacttctcctatctctcccagtcctagctgctggcatcactatactactaacagaccgcaacctcaacaccaccttcttcgaccccgccggaggaggagaccccattctataccaacacctattctgatttttcggtcaccctgaagtttatattcttatcctaccaggcttcggaataatctcccatattgtaacttactactccggaaaaaaagaaccatttggatacataggtatggtctgagctatgatatcaattggcttcctagggtttatcgtgtgagcacaccatatatttacagtaggaatagacgtagacacacgagcatatttcacctccgctaccataatcatcgctatccccaccggcgtcaaagtatttagctgactcgccacactccacggaagcaatatgaaatgatctgctgcagtgctctgagccctaggattcatctttcttttcaccgtaggtggcctgactggcattgtattagcaaactcatcactagacatcgtactacacgacacgtactacgttgtagctcacttccactatgtcctatcaataggagctgtatttgccatcataggaggcttcattcactgatttcccctattctcaggctacaccctagaccaaacctacgccaaaatccatttcactatcatattcatcggcgtaaatctaactttcttcccacaacactttctcggcctatccggaatgccccgacgttactcggactaccccgatgcatacaccacatgaaacatcctatcatctgtaggctcattcatttctctaacagcagtaatattaataattttcatgatttgagaagccttcgcttcgaagcgaaaagtcctaatagtagaagaaccctccataaacctggagtgactatatggatgccccccaccctaccacacattcgaagaacccgtatacataaaatctagacaaaaaaggaaggaatcgaaccccccaaagctggtttcaagccaaccccatggcctccatgactttttcaaaaaggtattagaaaaaccatttcataactttgtcaaagttaaattataggctaaatcctatatatcttaatggcacatgcagcgcaagtaggtctacaagacgctacttcccctatcatagaagagcttatcacctttcatgatcacgccctcataatcattttccttatctgcttcctagtcctgtatgcccttttcctaacactcacaacaaaactaactaatactaacatctcagacgctcaggaaatagaaaccgtctgaactatcctgcccgccatcatcctagtcctcatcgccctcccatccctacgcatcctttacataacagacgaggtcaacgatccctcccttaccatcaaatcaattggccaccaatgatactgaacctacgagtacaccgactacggcggactaatcttcaactcctacatacttcccccattattcctagaaccaggcgacctgcgactccttgacgttgacaatcgagtagtactcccgattgaaacccccattcgtataataattacatcacaagacgtcttgcactcatgagctgtccccacattaggcttaaaaacagatgcaattcccggacgtctaaaccaaaccactttcaccgctacacgaccgggggtatactacggtcaatgctctgaaatctgtggagcaaaccacagtttcatgcccatcgtcctagaattaattcccctaaaaatctttgaaatagggcccgtatttaccctatagcaccccctctaccccctctagagcccactgtaaagctaacttagcattaaccttttaagttaaagattaagagaaccaacacctctttacagtgaaatgccccaactaaatactaccgtatggcccaccataattacccccatactccttacactattcctcatcacccaactaaaaatattaaacacaaactaccacctacctccctcaccaaagcccataaaaataaaaaattataacaaaccctgagaaccaaaatgaacgaaaatctgttcgcttcattcattgcccccacaatcctaggcctacccgccgcagtactgatcattctatttccccctctattgatccccacctccaaatatctcatcaacaaccgactaatcaccacccaacaatgactaatcaaactaacctcaaaacaaatgataaccatacacaacactaaaggacgaacctgatctcttatactagtatccttaatcatttttattgccacaactaacctcctcggactcctgccttactcatttacaccaaccacccaactatctataaacctagccatggccatccccttatgagcgggcgcagtgattataggctttcgctctaagattaaaaatgccctagcccacttcttaccacaaggcacacctacaccccttatccccatactagttattatcgaaaccatcagcctactcattcaaccaatagccctggccgtacgcctaaccgctaacattactgcaggccacctactcatgcacctaattggaagcgccaccctagcaatatcaaccattaaccttccctctacacttatcatcttcacaattctaattctactgactatcctagaaatcgctgtcgccttaatccaagcctacgttttcacacttctagtaagcctctacctgcacgacaacacataatgacccaccaatcacatgcctatcatatagtaaaacccagcccatgacccctaacaggggccctctcagccctcctaatgacctccggcctagccatgtgatttcacttccactccataacgctcctcatactaggcctactaaccaacacactaaccatataccaatgatggcgcgatgtaacacgagaaagcacataccaaggccaccacacaccacctgtccaaaaaggccttcgatacgggataatcctatttattacctcagaagtttttttcttcgcaggatttttctgagccttttaccactccagcctagcccctaccccccaattaggagggcactggcccccaacaggcatcaccccgctaaatcccctagaagtcccactcctaaacacatccgtattactcgcatcaggagtatcaatcacctgagctcaccatagtctaatagaaaacaaccgaaaccaaataattcaagcactgcttattacaattttactgggtctctattttaccctcctacaagcctcagagtacttcgagtctcccttcaccatttccgacggcatctacggctcaacattttttgtagccacaggcttccacggacttcacgtcattattggctcaactttcctcactatctgcttcatccgccaactaatatttcactttacatccaaacatcactttggcttcgaagccgccgcctgatactggcattttgtagatgtggtttgactatttctgtatgtctccatctattgatgagggtcttactcttttagtataaatagtaccgttaacttccaattaactagttttgacaacattcaaaaaagagtaataaacttcgccttaattttaataatcaacaccctcctagccttactactaataattattacattttgactaccacaactcaacggctacatagaaaaatccaccccttacgagtgcggcttcgaccctatatcccccgcccgcgtccctttctccataaaattcttcttagtagctattaccttcttattatttgatctagaaattgccctccttttacccctaccatgagccctacaaacaactaacctgccactaatagttatgtcatccctcttattaatcatcatcctagccctaagtctggcctatgagtgactacaaaaaggattagactgaaccgaattggtatatagtttaaacaaaacgaatgatttcgactcattaaattatgataatcatatttaccaaatgcccctcatttacataaatattatactagcatttaccatctcacttctaggaatactagtatatcgctcacacctcatatcctccctactatgcctagaaggaataatactatcgctgttcattatagctactctcataaccctcaacacccactccctcttagccaatattgtgcctattgccatactagtctttgccgcctgcgaagcagcggtgggcctagccctactagtctcaatctccaacacatatggcctagactacgtacataacctaaacctactccaatgctaaaactaatcgtcccaacaattatattactaccactgacatgactttccaaaaaacacataatttgaatcaacacaaccacccacagcctaattattagcatcatccctctactattttttaaccaaatcaacaacaacctatttagctgttccccaaccttttcctccgaccccctaacaacccccctcctaatactaactacctgactcctacccctcacaatcatggcaagccaacgccacttatccagtgaaccactatcacgaaaaaaactctacctctctatactaatctccctacaaatctccttaattataacattcacagccacagaactaatcatattttatatcttcttcgaaaccacacttatccccaccttggctatcatcacccgatgaggcaaccagccagaacgcctgaacgcaggcacatacttcctattctacaccctagtaggctcccttcccctactcatcgcactaatttacactcacaacaccctaggctcactaaacattctactactcactctcactgcccaagaactatcaaactcctgagccaacaacttaatatgactagcttacacaatagcttttatagtaaagatacctctttacggactccacttatgactccctaaagcccatgtcgaagcccccatcgctgggtcaatagtacttgccgcagtactcttaaaactaggcggctatggtataatacgcctcacactcattctcaaccccctgacaaaacacatagcctaccccttccttgtactatccctatgaggcataattataacaagctccatctgcctacgacaaacagacctaaaatcgctcattgcatactcttcaatcagccacatagccctcgtagtaacagccattctcatccaaaccccctgaagcttcaccggcgcagtcattctcataatcgcccacggacttacatcctcattactattctgcctagcaaactcaaactacgaacgcactcacagtcgcatcataatcctctctcaaggacttcaaactctactcccactaatagctttttgatgacttctagcaagcctcgctaacctcgccttaccccccactattaacctactgggagaactctctgtgctagtaaccacgttctcctgatcaaatatcactctcctacttacaggactcaacatactagtcacagccctatactccctctacatatttaccacaacacaatgaggctcactcacccaccacattaacaacataaaaccctcattcacacgagaaaacaccctcatgttcatacacctatcccccattctcctcctatccctcaaccccgacatcattaccgggttttcctcttgtaaatatagtttaaccaaaacatcagattgtgaatctgacaacagaggcttacgaccccttatttaccgagaaagctcacaagaactgctaactcatgcccccatgtctaacaacatggctttctcaacttttaaaggataacagctatccattggtcttaggccccaaaaattttggtgcaactccaaataaaagtaataaccatgcacactactataaccaccctaaccctgacttccctaattccccccatccttaccaccctcgttaaccctaacaaaaaaaactcatacccccattatgtaaaatccattgtcgcatccacctttattatcagtctcttccccacaacaatattcatgtgcctagaccaagaagttattatctcgaactgacactgagccacaacccaaacaacccagctctccctaagcttcaaactagactacttctccataatattcatccctgtagcattgttcgttacatggtccatcatagaattctcactgtgatatataaactcagacccaaacattaatcagttcttcaaatatctactcattttcctaattaccatactaatcttagttaccgctaacaacctattccaactgttcatcggctgagagggcgtaggaattatatccttcttgctcatcagttgatgatacgcccgagcagatgccaacacagcagccattcaagcaatcctatacaaccgtatcggcgatatcggtttcatcctcgccttagcatgatttatcctacactccaactcatgagacccacaacaaataacccttctaaacgctaatccaagcctcaccccactactaggcctcctcctagcagcagcaggcaaatcagcccaattaggtctccacccctgactcccctcagccatagaaggccccaccccagtctcagccctactccactcaagcactatagttgtagcaggaatcttcttactcatccgcttccaccccctagcagaaaatagcccactaatccaaactctaacactatgcttaggcgctatcaccactctgttcgcagcagtctgcgcccttacacaaaatgacatcaaaaaaatcgtagccttctccacttcaagtcaactaggactcataatagttacaatcggcatcaaccaaccacacctagcattcctgcacatctgtacccacgccttcttcaaagccatactatttatgtgctccgggtccatcatccacaaccttaacaatgaacaagatattcgaaaaataggaggactactcaaaaccatacctctcacttcaacctccctcaccattggcagcctagcattagcaggaatacctttcctcacaggtttctactccaaagaccacatcatcgaaaccgcaaacatatcatacacaaacgcctgagccctatctattactctcatcgctacctccctgacaagcgcctatagcactcgaataattcttctcaccctaacaggtcaacctcgcttccccacccttactaacattaacgaaaataaccccaccctactaaaccccattaaacgcctggcagccggaagcctattcgcaggatttctcattactaacaacatttcccccgcatcccccttccaaacaacaatccccctctacctaaaactcacagccctcgctgtcactttcctaggacttctaacagccctagacctcaactacctaaccaacaaacttaaaataaaatccccactatgcacattttatttctccaacatactcggattctaccctagcatcacacaccgcacaatcccctatctaggccttcttacgagccaaaacctgcccctactcctcctagacctaacctgactagaaaagctattacctaaaacaatttcacagcaccaaatctccacctccatcatcacctcaacccaaaaaggcataattaaactttacttcctctctttcttcttcccactcatcctaaccctactcctaatcacataacctattcccccgagcaatctcaattacaatatatacaccaacaaacaatgttcaaccagtaactactactaatcaacgcccataatcatacaaagcccccgcaccaataggatcctcccgaatcaaccctgacccctctccttcataaattattcagcttcctacactattaaagtttaccacaaccaccaccccatcatactctttcacccacagcaccaatcctacctccatcgctaaccccactaaaacactcaccaagacctcaacccctgacccccatgcctcaggatactcctcaatagccatcgctgtagtatatccaaagacaaccatcattccccctaaataaattaaaaaaactattaaacccatataacctcccccaaaattcagaataataacacacccgaccacaccgctaacaatcaatactaaacccccataaataggagaaggcttagaagaaaaccccacaaaccccattactaaacccacactcaacagaaacaaagcatacatcattattctcgcacggactacaaccacgaccaatgatatgaaaaaccatcgttgtatttcaactacaagaacaccaatgaccccaatacgcaaaattaaccccctaataaaattaattaaccactcattcatcgacctccccaccccatccaacatctccgcatgatgaaacttcggctcactccttggcgcctgcctgatcctccaaatcaccacaggactattcctagccatgcactactcaccagacgcctcaaccgccttttcatcaatcgcccacatcactcgagacgtaaattatggctgaatcatccgctaccttcacgccaatggcgcctcaatattctttatctgcctcttcctacacatcgggcgaggcctatattacggatcatttctctactcagaaacctgaaacatcggcattatcctcctgcttgcaactatagcaacagccttcataggctatgtcctcccgtgaggccaaatatcattctgaggggccacagtaattacaaacttactatccgccatcccatacattgggacagacctagttcaatgaatctgaggaggctactcagtagacagtcccaccctcacacgattctttacctttcacttcatcttgcccttcattattgcagccctagcagcactccacctcctattcttgcacgaaacgggatcaaacaaccccctaggaatcacctcccattccgataaaatcaccttccacccttactacacaatcaaagacgccctcggcttacttctcttccttctctccttaatgacattaacactattctcaccagacctcctaggcgacccagacaattataccctagccaaccccttaaacacccctccccacatcaagcccgaatgatatttcctattcgcctacacaattctccgatccgtccctaacaaactaggaggcgtccttgccctattactatccatcctcatcctagcaataatccccatcctccacatatccaaacaacaaagcataatatttcgcccactaagccaatcactttattgactcctagccgcagacctcctcattctaacctgaatcggaggacaaccagtaagctacccttttaccatcattggacaagtagcatccgtactatacttcacaacaatcctaatcctaataccaactatctccctaattgaaaacaaaatactcaaatgggcctgtccttgtagtataaactaatacaccagtcttgtaaaccggagatgaaaacctttttccaaggacaaatcagagaaaaagtctttaactccaccattagcacccaaagctaagattctaatttaaactattctctgttctttcatggggaagcagatttgggtaccacccaagtattgactcacccatcaacaaccgctatgtatttcgtacattactgccagtcaccatgaatattgtacggtaccataaatacttgaccacctgtagtacataaaaacccaatccacatcaaaaccccctcctcatgcttacaagcaagtacagcaatcaaccttcaactatcacacatcaactgcaactccaaagccacccctcacccactaggataccaacaaacctatccacccttaacagtacatagtacataaaaccatttaccgtacatagcacattacagtcaaatcccttctcgcccccatggatgacccccctcagataggggtcccttgaccaccatcctccgtgaaatcaatatcccgcacaagagtgctactctcctcgctccgggcccataacacttgggggtagctaaagtgaactgtatccgacatctggttcctacttcagggtcataaagcctaaatagcccacacgttccccttaaataagacatcacgatg

SEQ ID NO: 14 - DNA, 16572 bp, Homo sapiens mitochondrial
  3110: "n" refers to a nucleotide at position 3107 of the Cambridge Reference Sequence (CRS, Anderson et al. 1981 Nature 290:457-465), later determined to be absent from the human mtDNA sequence according to the revised CRS (rCRS, Andrews et al. 1999 Nature Genetics 23:147); "n" therefore represents a single nucleotide deletion at a position corresponding to nucleotide 3107 of SEQ ID NO:1 as provided herein.
gatcacaggtctatcaccctattaaccactcacgggagctctccatgcatttggtattttcgtctggggggtatgcacgcgatagcattgcgagacgctggagccggagcaccctatgtcgcagtatctgtctttgattcctgcctcatcctattatttatcgcacctacgttcaatattacaggcgaacatacttactaaagtgtgttaattaattaatgcttgtaggacataataataacaattgaatgtctgcgcagccgctttccacacagacatcataacaaaaaatttccaccaaaccccccctccccccccgcttctggccacagcacttaaacacatctctgccaaaccccaaaaacaaagaaccctaacaccagcctaaccagatttcaaattttatcttttggcggtatgcacttttaacagtcaccccccaactaacacattattttcccctcccactcccatactaccaatctcatcaatacaacccccgcccatcctacccagcacacacacaccgctgctaaccccataccccgaaccaaccaaaccccaaagacaccccccacagtttatgtagcttacctcctcaaagcaatacactgaaaatgtttagacgggctcacatcaccccataaacaaataggtttggtcctagcctttctattagctcttagtaagattacacatgcaagcatccccgttccagtgagttcaccctctaaatcaccacgatcaaaagggacaagcatcaagcacgcagcaatgcagctcaaaacgcttagcctagccacacccccacgggaaacagcagtgattaacctttagcaataaacgaaagtttaactaagctatactaaccccagggttggtcaatttcgtgccagccaccgcggtcacacgattaacccaagtcaatagaagccggcgtaaagagtgttttagatcaccccctccccaataaagctaaaactcacctgagttgtaaaaaactccagttgacacaaaatagactacgaaagtggctttaacatatctgaacacacaatagctaagacccaaactgggattagataccccactatgcttagccctaaacctcaacagttaaatcaacaaaactgctcgccagaacactacgagccacagcttaaaactcaaaggacctggcggtgcttcatatccctctagaggagcctgttctgtaatcgataaaccccgatcaacctcaccacctcttgctcagcctatataccgccatcttcagcaaaccctgatgaaggctacaaagtaagcgcaagtacccacgtaaagacgttaggtcaaggtgtagcccatgaggtggcaagaaatgggctacattttctaccccagaaaactacgatagcccttatgaaacttaagggtcgaaggtggatttagcagtaaactgagagtagagtgcttagttgaacagggccctgaagcgcgtacacaccgcccgtcaccctcctcaagtatacttcaaaggacatttaactaaaacccctacgcatttatatagaggagacaagtcgtaacatggtaagtgtactggaaagtgcacttggacgaaccagagtgtagcttaacacaaagcacccaacttacacttaggagatttcaacttaacttgaccgctctgagctaaacctagccccaaacccactccaccttactaccagacaaccttagccaaaccatttacccaaataaagtataggcgatagaaattgaaacctggcgcaatagatatagtaccgcaagggaaagatgaaaaattataaccaagcataatatagcaaggactaacccctataccttctgcataatgaattaactagaaataactttgcaaggagagccaaagctaagacccccgaaaccagacgagctacctaagaacagctaaaagagcacacccgtctatgtagcaaaatagtgggaagatttataggtagaggcgacaaacctaccgagcctggtgatagctggttgtccaagatagaatcttagttcaactttaaatttgcccacagaaccctctaaatccccttgtaaatttaactgttagtccaaagaggaacagctctttggacactaggaaaaaaccttgtagagagagtaaaaaatttaacacccatagtaggcctaaaagcagccaccaattaagaaagcgttcaagctcaacacccactacctaaaaaatcccaaacatataactgaactcctcacacccaattggaccaatctatcaccctatagaagaactaatgttagtataagtaacatgaaaacattctcctccgcataagcctgcgtcagattaaaacactgaactgacaattaacagcccaatatctacaatcaaccaacaagtcattattaccctcactgtcaacccaacacaggcatgctcataaggaaaggttaaaaaaagtaaaaggaactcggcaaatcttaccccgcctgtttaccaaaaacatcacctctagcatcaccagtattagaggcaccgcctgcccagtgacacatgtttaacggccgcggtaccctaaccgtgcaaaggtagcataatcacttgttccttaaatagggacctgtatgaatggctccacgagggttcagctgtctcttacttttaaccagtgaaattgacctgcccgtgaagaggcgggcataacacagcaagacgagaagaccctatggagctttaatttattaatgcaaacagtacctaacaaacccacaggtcctaaactaccaaacctgcattaaaaatttcggttggggcgacctcggagcagaacccaacctccgagcagtacatgctaagacttcaccagtcaaagcgaactactatactcaattgatccaataacttgaccaacggaacaagttaccctagggataacagcgcaatcctattctagagtccatatcaacaatagggtttacgacctcgatgttggatcaggacatcccaatggtgcagccgctattaaaggttcgtttgttcaacgattaaagtcctacgtgatctgagttcagaccggagtaatccaggtcggtttctatctacnttcaaattcctccctgtacgaaaggacaagagaaataaggcctacttcacaaagcgccttcccccgtaaatgatatcatctcaacttagtattatacccacacccacccaagaacagggtttgttaagatggcagagcccggtaatcgcataaaacttaaaactttacagtcagaggttcaattcctcttcttaacaacatacccatggccaacctcctactcctcattgtacccattctaatcgcaatggcattcctaatgcttaccgaacgaaaaattctaggctatatacaactacgcaaaggccccaacgttgtaggcccctacgggctactacaacccttcgctgacgccataaaactcttcaccaaagagcccctaaaacccgccacatctaccatcaccctctacatcaccgccccgaccttagctctcaccatcgctcttctactatgaacccccctccccatacccaaccccctggtcaacctcaacctaggcctcctatttattctagccacctctagcctagccgtttactcaatcctctgatcagggtgagcatcaaactcaaactacgccctgatcggcgcactgcgagcagtagcccaaacaatctcatatgaagtcaccctagccatcattctactatcaacattactaataagtggctcctttaacctctccaccctcatcacaacacaagaacacctctgattactcctgccatcatgacccttggccataatatgatttatctccacactagcagagaccaaccgaacccccttcgaccttgccgaaggggagtccgaactagtctcaggcttcaacatcgaatacgccgcaggccccttcgccctattcttcatagccgaatacacaaacattattataataaacaccctcaccactacaatcttcctaggaacaacatatgacgcactctcccctgaactctacacaacatattttgtcaccaagaccctacttctaacctccctgttcttatgaattcgaacagcatacccccgattccgctacgaccaactcatacacctcctatgaaaaaacttcctaccactcaccctagcattacttatatgatatgtctccatacccattacaatctccagcattccccctcaaacctaagaaatatgtctgataaaagagttactttgatagagtaaataataggagcttaaacccccttatttctaggactatgagaatcgaacccatccctgagaatccaaaattctccgtgccacctatcacaccccatcctaaagtaaggtcagctaaataagctatcgggcccataccccgaaaatgttggttatacccttcccgtactaattaatcccctggcccaacccgtcatctactctaccatctttgcaggcacactcatcacagcgctaagctcgcactgattttttacctgagtaggcctagaaataaacatgctagcttttattccagttctaaccaaaaaaataaaccctcgttccacagaagctgccatcaagtatttcctcacgcaagcaaccgcatccataatccttctaatagctatcctcttcaacaatatactctccggacaatgaaccataaccaatactaccaatcaatactcatcattaataatcataatggctatagcaataaaactaggaatagccccctttcacttctgagtcccagaggttacccaaggcacccctctgacatccggcctgcttcttctcacatgacaaaaactagcccccatctcaatcatataccaaatctctccctcactaaacgtaagccttctcctcactctctcaatcttatccatcatagcaggcagttgaggtggattaaaccaaacccagctacgcaaaatcttagcatactcctcaattacccacataggatgaataatagcagttctaccgtacaaccctaacataaccattcttaatttaactatttatattatcctaactactaccgcattcctactactcaacttaaactccagcaccacgaccctactactatctcgcacctgaaacaagctaacatgactaacacccttaattccatccaccctcctctccctaggaggcctgcccccgctaaccggctttttgcccaaatgggccattatcgaagaattcacaaaaaacaatagcctcatcatccccaccatcatagccaccatcaccctccttaacctctacttctacctacgcctaatctactccacctcaatcacactactccccatatctaacaacgtaaaaataaaatgacagtttgaacatacaaaacccaccccattcctccccacactcatcgcccttaccacgctactcctacctatctccccttttatactaataatcttatagaaatttaggttaaatacagaccaagagccttcaaagccctcagtaagttgcaatacttaatttctgtaacagctaaggactgcaaaaccccactctgcatcaactgaacgcaaatcagccactttaattaagctaagcccttactagaccaatgggacttaaacccacaaacacttagttaacagctaagcaccctaatcaactggcttcaatctacttctcccgccgccgggaaaaaaggcgggagaagccccggcaggtttgaagctgcttcttcgaatttgcaattcaatatgaaaatcacctcggagctggtaaaaagaggcctaacccctgtctttagatttacagtccaatgcttcactcagccattttacctcacccccactgatgttcgccgaccgttgactattctctacaaaccacaaagacattggaacactatacctattattcggcgcatgagctggagtcctaggcacagctctaagcctccttattcgagccgagctgggccagccaggcaaccttctaggtaacgaccacatctacaacgttatcgtcacagcccatgcatttgtaataatcttcttcatagtaatacccatcataatcggaggctttggcaactgactagttcccctaataatcggtgcccccgatatggcgtttccccgcataaacaacataagcttctgactcttacctccctctctcctactcctgctcgcatctgctatagtggaggccggagcaggaacaggttgaacagtctaccctcccttagcagggaactactcccaccctggagcctccgtagacctaaccatcttctccttacacctagcaggtgtctcctctatcttaggggccatcaatttcatcacaacaattatcaatataaaaccccctgccataacccaataccaaacgcccctcttcgtctgatccgtcctaatcacagcagtcctacttctcctatctctcccagtcctagctgctggcatcactatactactaacagaccgcaacctcaacaccaccttcttcgaccccgccggaggaggagaccccattctataccaacacctattctgatttttcggtcaccctgaagtttatattcttatcctaccaggcttcggaataatctcccatattgtaacttactactccggaaaaaaagaaccatttggatacataggtatggtctgagctatgatatcaattggcttcctagggtttatcgtgtgagcacaccatatatttacagtaggaatagacgtagacacacgagcatatttcacctccgctaccataatcatcgctatccccaccggcgtcaaagtatttagctgactcgccacactccacggaagcaatatgaaatgatctgctgcagtgctctgagccctaggattcatctttcttttcaccgtaggtggcctgactggcattgtattagcaaactcatcactagacatcgtactacacgacacgtactacgttgtagcccacttccactatgtcctatcaataggagctgtatttgccatcataggaggcttcattcactgatttcccctattctcaggctacaccctagaccaaacctacgccaaaatccatttcactatcatattcatcggcgtaaatctaactttcttcccacaacactttctcggcctatccggaatgccccgacgttactcggactaccccgatgcatacaccacatgaaacatcctatcatctgtaggctcattcatttctctaacagcagtaatattaataattttcatgatttgagaagccttcgcttcgaagcgaaaagtcctaatagtagaagaaccctccataaacctggagtgactatatggatgccccccaccctaccacacattcgaagaacccgtatacataaaatctagacaaaaaaggaaggaatcgaaccccccaaagctggtttcaagccaaccccatggcctccatgactttttcaaaaaggtattagaaaaaccatttcataactttgtcaaagttaaattataggctaaatcctatatatcttaatggcacatgcagcgcaagtaggtctacaagacgctacttcccctatcatagaagagcttatcacctttcatgatcacgccctcataatcattttccttatctgcttcctagtcctgtatgcccttttcctaacactcacaacaaaactaactaatactaacatctcagacgctcaggaaatagaaaccgtctgaactatcctgcccgccatcatcctagtcctcatcgccctcccatccctacgcatcctttacataacagacgaggtcaacgatccctcccttaccatcaaatcaattggccaccaatggtactgaacctacgagtacaccgactacggcggactaatcttcaactcctacatacttcccccattattcctagaaccaggcgacctgcgactccttgacgttgacaatcgagtagtactcccgattgaagcccccattcgtataataattacatcacaagacgtcttgcactcatgagctgtccccacattaggcttaaaaacagatgcaattcccggacgtctaaaccaaaccactttcaccgctacacgaccgggggtatactacggtcaatgctctgaaatctgtggagcaaaccacagtttcatgcccatcgtcctagaattaattcccctaaaaatctttgaaatagggcccgtatttaccctatagcaccccctctaccccctctagagcccactgtaaagctaacttagcattaaccttttaagttaaagattaagagaaccaacacctctttacagtgaaatgccccaactaaatactaccgtatggcccaccataattacccccatactccttacactattcctcatcacccaactaaaaatattaaacacaaactaccacctacccccctcaccaaagcccataaaaataaaaaattataacaaaccctgagaaccaaaatgaacgaaaatctgttcgcttcattcattgcccccacaatcctaggcctacccgccgcagtactgatcattctatttccccctctattgatccccacctccaaatatctcatcaacaaccgactaatcaccacccaacaatgactaatcaaactaacctcaaaacaaatgataaccatacacaacactaaaggacgaacctgatctcttatactagtatccttaatcatttttattgccacaactaacctcctcggactcctgcctcactcatttacaccaaccacccaactatctataaacctagccatggccatccccttatgagcgggcgcagtgattataggctttcgctctaagattaaaaatgccctagcccacttcttaccacaaggcacacctacaccccttatccccatactagttattatcgaaaccatcagcctactcattcaaccaatagccctggccgtacgcctaaccgctaacattactgcaggccacctactcatgcacctaattggaagcgccaccctagcaatatcaaccattaaccttccctctacacttatcatcttcacaattctaattctactgactatcctagaaatcgctgtcgccttaatccaagcctacgttttcacacttctagtaagcctctacctgcacgacaacacataatgacccaccaatcacatgcctatcatatagtaaaacccagcccatgacccctaacaggggccctctcagccctcctaatgacctccggcctagccatgtgatttcacttccactccataacgctcctcatactaggcctactaaccaacacactaaccatataccaatgatggcgcgatgtaacacgagaaagcacataccaaggccaccacacaccacctgtccaaaaaggccttcgatacgggataatcctatttattacctcagaagtttttttcttcgcaggatttttctgagccttttaccactccagcctagcccctaccccccaattaggagggcactggcccccaacaggcatcaccccgctaaatcccctagaagtcccactcctaaacacatccgtattactcgcatcaggagtatcaatcacctgagctcaccatagtctaatagaaaacaaccgaaaccaaataattcaagcactgcttattacaattttactgggtctctattttaccctcctacaagcctcagagtacttcgagtctcccttcaccatttccgacggcatctacggctcaacattttttgtagccacaggcttccacggacttcacgtcattattggctcaactttcctcactatctgcttcatccgccaactaatatttcactttacatccaaacatcactttggcttcgaagccgccgcctgatactggcattttgtagatgtggtttgactatttctgtatgtctccatctattgatgagggtcttactcttttagtataaatagtaccgttaacttccaattaactagttttgacaacattcaaaaaagagtaataaacttcgccttaattttaataatcaacaccctcctagccttactactaataattattacattttgactaccacaactcaacggctacatagaaaaatccaccccttacgagtgcggcttcgaccctatatcccccgcccgcgtccctttctccataaaattcttcttagtagctattaccttcttattatttgatctagaaattgccctccttttacccctaccatgagccctacaaacaactaacctgccactaatagttatgtcatccctcttattaatcatcatcctagccctaagtctggcctatgagtgactacaaaaaggattagactgaaccgaattggtatatagtttaaacaaaacgaatgatttcgactcattaaattatgataatcatatttaccaaatgcccctcatttacataaatattatactagcatttaccatctcacttctaggaatactagtatatcgctcacacctcatatcctccctactatgcctagaaggaataatactatcgctgttcattatagctactctcataaccctcaacacccactccctcttagccaatattgtgcctattgccatactagtctttgccgcctgcgaagcagcggtgggcctagccctactagtctcaatctccaacacatatggcctagactacgtacataacctaaacctactccaatgctaaaactaatcgtcccaacaattatattactaccactgacatgactttccaaaaaacacataatttgaatcaacacaaccacccacagcctaattattagcatcatccctctactattttttaaccaaatcaacaacaacctatttagctgttccccaaccttttcctccgaccccctaacaacccccctcctaatactaactacctgactcctacccctcacaatcatggcaagccaacgccacttatccagtgaaccactatcacgaaaaaaactctacctctctatactaatctccctacaaatctccttaattataacattcacagccacagaactaatcatattttatatcttcttcgaaaccacacttatccccaccttggctatcatcacccgatgaggcaaccagccagaacgcctgaacgcaggcacatacttcctattctacaccctagtaggctcccttcccctactcatcgcactaatttacactcacaacaccctaggctcactaaacattctactactcactctcactgcccaagaactatcaaactcctgagccaacaacttaatatgactagcttacacaatagcttttatagtaaagatacctctttacggactccacttatgactccctaaagcccatgtcgaagcccccatcgctgggtcaatagtacttgccgcagtactcttaaaactaggcggctatggtataatacgcctcacactcattctcaaccccctgacaaaacacatagcctaccccttccttgtactatccctatgaggcataattataacaagctccatctgcctacgacaaacagacctaaaatcgctcattgcatactcttcaatcagccacatagccctcgtagtaacagccattctcatccaaaccccctgaagcttcaccggcgcagtcattctcataatcgcccacgggcttacatcctcattactattctgcctagcaaactcaaactacgaacgcactcacagtcgcatcataatcctctctcaaggacttcaaactctactcccactaatagctttttgatgacttctagcaagcctcgctaacctcgccttaccccccactattaacctactgggagaactctctgtgctagtaaccacgttctcctgatcaaatatcactctcctacttacaggactcaacatactagtcacagccctatactccctctacatatttaccacaacacaatggggctcactcacccaccacattaacaacataaaaccctcattcacacgagaaaacaccctcatgttcatacacctatcccccattctcctcctatccctcaaccccgacatcattaccgggttttcctcttgtaaatatagtttaaccaaaacatcagattgtgaatctgacaacagaggcttacgaccccttatttaccgagaaagctcacaagaactgctaactcatgcccccatgtctaacaacatggctttctcaacttttaaaggataacagctatccattggtcttaggccccaaaaattttggtgcaactccaaataaaagtaataaccatgcacactactataaccaccctaaccctgacttccctaattccccccatccttaccaccctcgttaaccctaacaaaaaaaactcatacccccattatgtaaaatccattgtcgcatccacctttattatcagtctcttccccacaacaatattcatgtgcctagaccaagaagttattatctcgaactgacactgagccacaacccaaacaacccagctctccctaagcttcaaactagactacttctccataatattcatccctgtagcattgttcgttacatggtccatcatagaattctcactgtgatatataaactcagacccaaacattaatcagttcttcaaatatctactcatcttcctaattaccatactaatcttagttaccgctaacaacctattccaactgttcatcggctgagagggcgtaggaattatatccttcttgctcatcagttgatgatacgcccgagcagatgccaacacagcagccattcaagcaatcctatacaaccgtatcggcgatatcggtttcatcctcgccttagcatgatttatcctacactccaactcatgagacccacaacaaatagcccttctaaacgctaatccaagcctcaccccactactaggcctcctcctagcagcagcaggcaaatcagcccaattaggtctccacccctgactcccctcagccatagaaggccccaccccagtctcagccctactccactcaagcactatagttgtagcaggaatcttcttactcatccgcttccaccccctagcagaaaatagcccactaatccaaactctaacactatgcttaggcgctatcaccactctgttcgcagcagtctgcgcccttacacaaaatgacatcaaaaaaatcgtagccttctccacttcaagtcaactaggactcataatagttacaatcggcatcaaccaaccacacctagcattcctgcacatctgtacccacgccttcttcaaagccatactatttatgtgctccgggtccatcatccacaaccttaacaatgaacaagatattcgaaaaataggaggactactcaaaaccatacctctcacttcaacctccctcaccattggcagcctagcattagcaggaatacctttcctcacaggtttctactccaaagaccacatcatcgaaaccgcaaacatatcatacacaaacgcctgagccctatctattactctcatcgctacctccctgacaagcgcctatagcactcgaataattcttctcaccctaacaggtcaacctcgcttccccacccttactaacattaacgaaaataaccccaccctactaaaccccattaaacgcctggcagccggaagcctattcgcaggatttctcattactaacaacatttcccccgcatcccccttccaaacaacaatccccctctacctaaaactcacagccctcgctgtcactttcctaggacttctaacagccctagacctcaactacctaaccaacaaacttaaaataaaatccccactatgcacattttatttctccaacatactcggattctaccctagcatcacacaccgcacaatcccctatctaggccttcttacgagccaaaacctgcccctactcctcctagacctaacctgactagaaaagctattacctaaaacaatttcacagcaccaaatctccacctccatcatcacctcaacccaaaaaggcataattaaactttacttcctctctttcttcttcccactcatcctaaccctactcctaatcacataacctattcccccgagcaatctcaattacaatatatacaccaacaaacaatgttcaaccagtaactactactaatcaacgcccataatcatacaaagcccccgcaccaataggatcctcccgaatcaaccctgacccctctccttcataaattattcagcttcctacactattaaagtttaccacaaccaccaccccatcatactctttcacccacagcaccaatcctacctccatcgctaaccccactaaaacactcaccaagacctcaacccctgacccccatgcctcaggatactcctcaatagccatcgctgtagtatatccaaagacaaccatcattccccctaaataaattaaaaaaactattaaacccatataacctcccccaaaattcagaataataacacacccgaccacaccgctaacaatcaatactaaacccccataaataggagaaggcttagaagaaaaccccacaaaccccattactaaacccacactcaacagaaacaaagcatacatcattattctcgcacggactacaaccacgaccaatgatatgaaaaaccatcgttgtatttcaactacaagaacaccaatgaccccaatacgcaaaactaaccccctaataaaattaattaaccactcattcatcgacctccccaccccatccaacatctccgcatgatgaaacttcggctcactccttggcgcctgcctgatcctccaaatcaccacaggactattcctagccatgcactactcaccagacgcctcaaccgccttttcatcaatcgcccacatcactcgagacgtaaattatggctgaatcatccgctaccttcacgccaatggcgcctcaatattctttatctgcctcttcctacacatcgggcgaggcctatattacggatcatttctctactcagaaacctgaaacatcggcattatcctcctgcttgcaactatagcaacagccttcataggctatgtcctcccgtgaggccaaatatcattctgaggggccacagtaattacaaacttactatccgccatcccatacattgggacagacctagttcaatgaatctgaggaggctactcagtagacagtcccaccctcacacgattctttacctttcacttcatcttgcccttcattattgcagccctagcagcactccacctcctattcttgcacgaaacgggatcaaacaaccccctaggaatcacctcccattccgataaaatcaccttccacccttactacacaatcaaagacgccctcggcttacttctcttccttctctccttaatgacattaacactattctcaccagacctcctaggcgacccagacaattataccctagccaaccccttaaacacccctccccacatcaagcccgaatgatatttcctattcgcctacacaattctccgatccgtccctaacaaactaggaggcgtccttgccctattactatccatcctcatcctagcaataatccccatcctccatatatccaaacaacaaagcataatatttcgcccactaagccaatcactttattgactcctagccgcagacctcctcattctaacctgaatcggaggacaaccagtaagctacccttttaccatcattggacaagtagcatccgtactatacttcacaacaatcctaatcctaataccaactatctccctaattgaaaacaaaatactcaaatgggcctgtccttgtagtataaactaatacaccagtcttgtaaaccggagatgaaaacctttttccaaggacaaatcagagaaaaagtctttaactccaccattagcacccaaagctaagattctaatttaaactattctctgttctttcatggggaagcagatttgggtaccacccaagtattgactcacccatcaacaaccgctatgtatttcgtacattactgccagccaccatgaatattgtacggtaccataaatacttgaccacctgtagtacataaaaacccaatccacatcaaaaccccctccccatgcttacaagcaagtacagcaatcaaccctcaactatcacacatcaactgcaactccaaagccacccctcacccactaggataccaacaaacctacccacccttaacagtacatagtacataaagccatttaccgtacatagcacattacagtcaaatcccttctcgtccccatggatgacccccctcagataggggtcccttgaccaccatcctccgtgaaatcaatatcccgcacaagagtgctactctcctcgctccgggcccataacacttgggggtagctaaagtgaactgtatccgacatctggttcctacttcagggccataaagcctaaatagcccacacgttccccttaaataagacatcacgatg

SEQ ID NO: 15 - DNA, 16571 bp, Homo sapiens mitochondrial
  3109: "n" refers to a nucleotide at position 3107 of the Cambridge Reference Sequence (CRS, Anderson et al. 1981 Nature 290:457-465), later determined to be absent from the human mtDNA sequence according to the revised CRS (rCRS, Andrews et al. 1999 Nature Genetics 23:147); "n" therefore represents a single nucleotide deletion at a position corresponding to nucleotide 3107 of SEQ ID NO:1 as provided herein.
gatcacaggtctatcaccctattaaccactcacgggagctctccatgcatttggtattttcgtctggggggtatgcacgcgatagcattgcgagacgctggagccggagcaccctatgtcgcagtatctgtctttgattcctgcctcatcctattatttatcgcacctacgttcaatattacaggcgaacatacttactaaagtgtgttaattaattaatgcttgtaggacataataataacaattgaatgtctgcacagccgctttccacacagacatcataacaaaaaatttccaccaaaccccccctcctccccgcttctggccacagcacttaaacacatctctgccaaaccccaaaaacaaagaaccctaacaccagcctaaccagatttcaaattttatcttttggcggtatgcacttttaacagtcaccccccaactaacacattattttcccctcccactcccatactactaatctcatcaatacaacccccgcccatcctacccagcacacacacaccgctgctaaccccataccccgaaccaaccaaaccccaaagacaccccccacagtttatgtagcttacctcctcaaagcaatacactgaaaatgtttagacgggctcacatcaccccataaacaaataggtttggtcctagcctttctattagctcttagtaagattacacatgcaagcatccccgttccagtgagttcaccctctaaatcaccacgatcaaaagggacaagcatcaagcacgcagcaatgcagctcaaaacgcttagcctagccacacccccacgggaaacagcagtgattaacctttagcaataaacgaaagtttaactaagctatactaaccccagggttggtcaatttcgtgccagccaccgcggtcacacgattaacccaagtcaatagaagccggcgtaaagagtgttttagatcaccccctccccaataaagctaaaactcacctgagttgtaaaaaactccagttgacacaaaatagactacgaaagtggctttaacatatctgaacacacaatagctaagacccaaactgggattagataccccactatgcttagccctaaacctcaacagttaaatcaacaaaactgctcgccagaacactacgagccacagcttaaaactcaaaggacctggcggtgcttcatatccctctagaggagcctgttctgtaatcgataaaccccgatcaacctcaccacctcttgctcagcctatataccgccatcttcagcaaaccctgatgaaggctacaaagtaagcgcaagtacccacgtaaagacgttaggtcaaggtgtagcccatgaggtggcaagaaatgggctacattttctaccccagaaaactacgatagcccttatgaaacttaagggtcgaaggtggatttagcagtaaactgagagtagagtgcttagttgaacagggccctgaagcgcgtacacaccgcccgtcaccctcctcaagtatacttcaaaggacatttaactaaaacccctacgcatttatatagaggagacaagtcgtaacatggtaagtgtactggaaagtgcacttggacgaaccagagtgtagcttaacacaaagcacccaacttacacttaggagatttcaacttaacttgaccgctctgagctaaacctagccccaaacccactccaccttactaccagacaaccttagccaaaccatttacccaaataaagtataggcgatagaaattgaaacctggcgcaatagatatagtaccgcaagggaaagatgaaaaattataaccaagcataatatagcaaggactaacccctataccttctgcataatgaattaactagaaataactttgcaaggagagccaaagctaagacccccgaaaccagacgagctacctaagaacagctaaaagagcacacccgtctatgtagcaaaatagtgggaagatttataggtagaggcgacaaacctaccgagcctggtgatagctggttgtccaagatagaatcttagttcaactttaaatttgcccacagaaccctctaaatccccttgtaaatttaactgttagtccaaagaggaacagctctttggacactaggaaaaaaccttgtagagagagtaaaaaatttaacacccatagtaggcctaaaagcagccaccaattaagaaagcgttcaagctcaacacccactacctaaaaaatcccaaacatataactgaactcctcacacccaattggaccaatctatcaccctatagaagaactaatgttagtataagtaacatgaaaacattctcctccgcataagcctgcgtcagattaaaacactgaactgacaattaacagcccaatatctacaatcaaccaacaagtcattattaccctcactgtcaacccaacacaggcatgctcataaggaaaggttaaaaaaagtaaaaggaactcggcaaatcttaccccgcctgtttaccaaaaacatcacctctagcatcaccagtattagaggcaccgcctgcccagtgacacatgtttaacggccgcggtaccctaaccgtgcaaaggtagcataatcacttgttccttaaatagggacctgtatgaatggctccacgagggttcagctgtctcttacttttaaccagtgaaattgacctgcccgtgaagaggcgggcataacacagcaagacgagaagaccctatggagctttaatttattaatgcaaacagtacctaacaaacccacaggtcctaaactaccaaacctgcattaaaaatttcggttggggcgacctcggagcagaacccaacctccgagcagtacatgctaagacttcaccagtcaaagcgaactactatactcaattgatccaataacttgaccaacggaacaagttaccctagggataacagcgcaatcctattctagagtccatatcaacaatagggtttacgacctcgatgttggatcaggacatcccaatggtgcagccgctattaaaggttcgtttgttcaacgattaaagtcctacgtgatctgagttcagaccggagtaatccaggtcggtttctatctacnttcaaattcctccctgtacgaaaggacaagagaaataaggcctacttcacaaagcgccttcccccgtaaatgatatcatctcaacttagtattatacccacacccacccaagaacagggtttgttaagatggcagagcccggtaatcgcataaaacttaaaactttacagtcagaggttcaattcctcttcttaacaacatacccatggccaacctcctactcctcattgtacccattctaatcgcaatggcattcctaatgcttaccgaacgaaaaattctaggctatatacaactacgcaaaggccccaacgttgtaggcccctacgggctactacaacccttcgctgacgccataaaactcttcaccaaagagcccctaaaacccgccacatctaccatcaccctctacatcaccgccccgaccttagctctcaccatcgctcttctactatgaacccccctccccatacccaaccccctggtcaacctcaacctaggcctcctatttattctagccacctctagcctagccgtttactcaatcctctgatcagggtgagcatcaaactcaaactacgccctgatcggcgcactgcgagcagtagcccaaacaatctcatatgaagtcaccctagccatcattctactatcaacattactaataagtggctcctttaacctctccacccttatcacaacacaagaacacctctgattactcctgccatcatgacccttggccataatatgatttatctccacactagcagagaccaaccgaacccccttcgaccttgccgaaggggagtccgaactagtctcaggcttcaacatcgaatacgccgcaggccccttcgccctattcttcatagccgaatacacaaacattattataataaacaccctcaccactacaatcttcctaggaacaacatatgacgcactctcccctgaactctacacaacatattttgtcaccaagaccctacttctaacctccctgttcttatgaattcgaacagcatacccccgattccgctacgaccaactcatacacctcctatgaaaaaacttcctaccactcaccctagcattacttatatgatatgtctccatacccattacaatctccagcattccccctcaaacctaagaaatatgtctgataaaagagttactttgatagagtaaataataggagcttaaacccccttatttctaggactatgagaatcgaacccatccctgagaatccaaaattctccgtgccacctatcacaccccatcctaaagtaaggtcagctaaataagctatcgggcccataccccgaaaatgttggttatacccttcccgtactaattaatcccctggcccaacccgtcatctactctaccatctttgcaggcacactcatcacagcgctaagctcgcactgattttttacctgagtaggcctagaaataaacatgctagcttttattccagttctaaccaaaaaaataaaccctcgttccacagaagctgccatcaagtatttcctcacgcaagcaaccgcatccataatccttctaatagctatcctcttcaacaatatactctccggacaatgaaccataaccaatactaccaatcaatactcatcattaataatcataatggctatagcaataaaactaggaatagccccctttcacttctgagtcccagaggttacccaaggcacccctctgacatccggcctgcttcttctcacatgacaaaaactagcccccatctcaatcatataccaaatctctccctcactaaacgtaagccttctcctcactctctcaatcttatccatcatagcaggcagttgaggtggattaaaccaaacccagctacgcaaaatcttagcatactcctcaattacccacataggatgaataatagcagttctaccgtacaaccctaacataaccattcttaatttaactatttatattatcctaactactaccgcattcctactactcaacttaaactccagcaccacgaccctactactatctcgcacctgaaacaagctaacatgactaacacccttaattccatccaccctcctctccctaggaggcctgcccccgctaaccggctttttgcccaaatgggccattatcgaagaattcacaaaaaacaatagcctcatcatccccaccatcatagccaccatcaccctccttaacctctacttctacctacgcctaatctactccacctcaatcacactactccccatatctaacaacgtaaaaataaaatgacagtttgaacatacaaaacccaccccattcctccccacactcatcgcccttaccacgctactcctacctatctccccttttatactaataatcttatagaaatttaggttaaatacagaccaagagccttcaaagccctcagtaagttgcaatacttaatttctgtaacagctaaggactgcaaaaccccactctgcatcaactgaacgcaaatcagccactttaattaagctaagcccttactagaccaatgggacttaaacccacaaacacttagttaacagctaagcaccctaatcaactggcttcaatctacttctcccgccgccgggaaaaaaggcgggagaagccccggcaggtttgaagctgcttcttcgaatttgcaattcaatatgaaaatcacctcggagctggtaaaaagaggcctaacccctgtctttagatttacagtccaatgcttcactcagccattttacctcacccccactgatgttcgccgaccgttgactattctctacaaaccacaaagacattggaacactatacctattattcggcgcatgagctggagtcctaggcacagctctaagcctccttattcgagccgagctgggccagccaggcaaccttctaggtaacgaccacatctacaacgttatcgtcacagcccatgcatttgtaataatcttcttcatagtaatacccatcataatcggaggctttggcaactgactagttcccctaataatcggtgcccccgatatggcgtttccccgcataaacaacataagcttctgactcttacctccctctctcctactcctgctcgcatctgctatagtggaggccggagcaggaacaggttgaacagtctaccctcccttagcagggaactactcccaccctggagcctccgtagacctaaccatcttctccttacacctagcaggtgtctcctctatcttaggggccatcaatttcatcacaacaattatcaatataaaaccccctgccataacccaataccaaacgcccctcttcatctgatccgtcctaatcacagcagtcctacttctcctatctctcccagtcctagctgctggcatcactatactactaacagaccgcaacctcaacaccaccttcttcgaccccgccggaggaggagaccccattctataccaacacctattctgatttttcggtcaccctgaagtttatattcttatcctaccaggcttcggaataatctcccatattgtaacttactactccggaaaaaaagaaccatttggatacataggtatggtctgagctatgatatcaattggcttcctagggtttatcgtgtgagcacaccatatatttacagtaggaatagacgtagacacacgagcatatttcacctccgctaccataatcatcgctatccccaccggcgtcaaagtatttagctgactcgccacactccacggaagcaatatgaaatgatctgctgcagtgctctgagccctaggattcatctttcttttcaccgtaggtggcctgactggcattgtattagcaaactcatcactagacatcgtactacacgacacgtactacgttgtagcccacttccactatgtcctatcaataggagctgtatttgccatcataggaggcttcattcactgatttcccctattctcaggctacaccctagaccaaacctacgccaaaatccatttcactatcatattcatcggcgtaaatctaactttcttcccacaacactttctcggcctatccggaatgccccgacgttactcggactaccccgatgcatacaccacatgaaacatcctatcatctgtaggctcattcatttctctaacagcagtaatattaataattttcatgatttgagaagccttcgcttcgaagcgaaaagtcctaatagtagaagaaccctccataaacctggagtgactatatggatgccccccaccctaccacacattcgaagaacccgtatacataaaatctagacaaaaaaggaaggaatcgaaccccccaaagctggtttcaagccaaccccatggcctccatgactttttcaaaaaggtattagaaaaaccatttcataactttgtcaaagttaaattataggctaaatcctatatatcttaatggcacatgcagcgcaagtaggtctacaagacgctacttcccctatcatagaagagcttatcacctttcatgatcacgccctcataatcattttccttatctgcttcctagtcctgtatgcccttttcctaacactcacaacaaaactaactaatactaacatctcagacgctcaggaaatagaaaccgtctgaactatcctgcccgccatcatcctagtcctcatcgccctcccatccctacgcatcctttacataacagacgaggtcaacgatccctcccttaccatcaaatcaattggccaccaatggtactgaacctacgagtacaccgactacggcggactaatcttcaactcctacatacttcccccattattcctagaaccaggcgacctgcgactccttgacgttgacaatcgagtagtactcccgattgaagcccccattcgtataataattacatcacaagacgtcttgcactcatgagctgtccccacattaggcttaaaaacagatgcaattcccggacgtctaaaccaaaccactttcaccgctacacgaccgggggtatactacggtcaatgctctgaaatctgtggagcaaaccacagtttcatgcccatcgtcctagaattaattcccctaaaaatctttgaaatagggcccgtatttaccctatagcaccccctctaccccctctagagcccactgtaaagctaacttagcattaaccttttaagttaaagattaagagaaccaacacctctttacagtgaaatgccccaactaaatactaccgtatggcccaccataattacccccatactccttacactattcctcatcacccaactaaaaatattaaacacaaactaccacctacctccctcaccaaagcccataaaaataaaaaattataacaaaccctgagaaccaaaatgaacgaaaatctgttcgcttcattcattgcccccacaatcctaggcctacccgccgcagtactgatcattctatttccccctctattgatccccacctccaaatatctcatcaacaaccgactaatcaccacccaacaatgactaatcaaactaacctcaaaacaaatgataaccatacacaacactaaaggacgaacctgatctcttatactagtatccttaatcatttttattgccacaactaacctcctcggactcctgcctcactcatttacaccaaccacccaactatctataaacctagccatggccatccccttatgagcgggcgcagtgattataggctttcgctctaagattaaaaatgccctagcccacttcttaccacaaggcacacctacaccccttatccccatactagttattatcgaaaccatcagcctactcattcaaccaatagccctggccgtacgcctaaccgctaacattactgcaggccacctactcatgcacctaattggaagcgccaccctagcaatatcaaccattaaccttccctctacacttatcatcttcacaattctaattctactgactatcctagaaatcgctgtcgccttaatccaagcctacgttttcacacttctagtaagcctctacctgcacgacaacacataatgacccaccaatcacatgcctatcatatagtaaaacccagcccatgacccctaacaggggccctctcagccctcctaatgacctccggcctagccatgtgatttcacttccactccataacgctcctcatactaggcctactaaccaacacactaaccatataccaatgatggcgcgatgtaacacgagaaagcacataccaaggccaccacacaccacctgtccaaaaaggccttcgatacgggataatcctatttattacctcagaagtttttttcttcgcaggatttttctgagccttttaccactccagcctagcccctaccccccaattaggagggcactggcccccaacaggcatcaccccgctaaatcccctagaagtcccactcctaaacacatccgtattactcgcatcaggagtatcaatcacctgagctcaccatagtctaatagaaaacaaccgaaaccaaataattcaagcactgcttattacaattttactgggtctctattttaccctcctacaagcctcagagtacttcgagtctcccttcaccatttccgacggcatctacggctcaacattttttgtagccacaggcttccacggacttcacgtcattattggctcaactttcctcactatctgcttcatccgccaactaatatttcactttacatccaaacatcactttggcttcgaagccgccgcctgatactggcattttgtagatgtggtttgactatttctgtatgtctccatctattgatgagggtcttactcttttagtataaatagtaccgttaacttccaattaactagttttgacaacattcaaaaaagagtaataaacttcgccttaattttaataatcaacaccctcctagccttactactaataattattacattttgactaccacaactcaacggctacatagaaaaatccaccccttacgagtgcggcttcgaccctatatcccccgcccgcgtccctttctccataaaattcttcttagtagctattaccttcttattatttgatctagaaattgccctccttttacccctaccatgagccctacaaacaactaacctgccactaatagttatgtcatccctcttattaatcatcatcctagccctaagtctggcctatgagtgactacaaaaaggattagactgaaccgaattggtatatagtttaaacaaaacgaatgatttcgactcattaaattatgataatcatatttaccaaatgcccctcatttacataaatattatactagcatttaccatctcacttctaggaatactagtatatcgctcacacctcatatcctccctactatgcctagaaggaataatactatcgctgttcattatagctactctcataaccctcaacacccactccctcttagccaatattgtgcctattgccatactagtctttgccgcctgcgaagcagcggtgggcctagccctactagtctcaatctccaacacatatggcctagactacgtacataacctaaacctactccaatgctaaaactaatcgtcccaacaattatattactaccactgacatgactttccaaaaaacacataatttgaatcaacacaaccacccacagcctaattattagcatcatccctctactattttttaaccaaatcaacaacaacctatttagctgttccccaaccttttcctccgaccccctaacaacccccctcctaatactaactacctgactcctacccctcacaatcatggcaagccaacgccacttatccagtgaaccactatcacgaaaaaaactctacctctctatactaatctccctacaaatctccttaattataacattcacagccacagaactaatcatattttatatcttcttcgaaaccacacttatccccaccttggctatcatcacccgatgaggcaaccagccagaacgcctgaacgcaggcacatacttcctattctacaccctagtaggctcccttcccctactcatcgcactaatttacactcacaacaccctaggctcactaaacattctactactcactctcactgcccaagaactatcaaactcctgagccaacaacttaatatgactagcttacacaatagcttttatagtaaagatacctctttacggactccacttatgactccctaaagcccatgtcgaagcccccatcgctgggtcaatagtacttgccgcagtactcttaaaactaggcggctatggtataatacgcctcacactcattctcaaccccctgacaaaacacatagcctaccccttccttgtactatccctatgaggcataattataacaagctccatctgcctacgacaaacagacctaaaatcgctcattgcatactcttcaatcagccacatagccctcgtagtaacagccattctcatccaaaccccctgaagcttcaccggcgcagtcattctcataatcgcccacgggcttacatcctcattactattctgcctagcaaactcaaactacgaacgcactcacagtcgcatcataatcctctctcaaggacttcaaactctactcccactaatagctttttgatgacttctagcaagcctcgctaacctcgccttaccccccactattaacctactgggagaactctctgtgctagtaaccacgttctcctgatcaaatatcactctcctacttacaggactcaacatactagtcacagccctatactccctctacatatttaccacaacacaatggggctcactcacccaccacattaacaacataaaaccctcattcacacgagaaaacaccctcatgttcatacacctatcccccattctcctcctatccctcaaccccgacatcattaccgggttttcctcttgtaaatatagtttaaccaaaacatcagattgtgaatctgacaacagaggcttacgaccccttatttaccgagaaagctcacaagaactgctaactcatgcccccatgtctaacaacatggctttctcaacttttaaaggataacagctatccattggtcttaggccccaaaaattttggtgcaactccaaataaaagtaataaccatgcacactactataaccaccctaaccctgacttccctaattccccccatccttaccaccctcgttaaccctaacaaaaaaaactcatacccccattatgtaaaatccattgtcgcatccacctttattatcagtctcttccccacaacaatattcatgtgcctagaccaagaagttattatctcgaactgacactgagccacaacccaaacaacccagctctccctaagcttcaaactagactacttctccataatattcatccctgtagcattgttcgttacatggtccatcatagaattctcactgtgatatataaactcagacccaaacattaatcagttcttcaaatatctactcatcttcctaattaccatactaatcttagttaccgctaacaacctattccaactgttcatcggctgagagggcgtaggaattatatccttcttgctcatcagttgatgatacgcccgagcagatgccaacacagcagccattcaagcaatcctatacaaccgtatcggcgatatcggtttcatcctcgccttagcatgatttatcctacactccaactcatgagacccacaacaaatagcccttctaaacgctaatccaagcctcaccccactactaggcctcctcctagcagcagcaggcaaatcagcccaattaggtctccacccctgactcccctcagccatagaaggccccaccccagtctcagccctactccactcaagcactatagttgtagcaggaatcttcttactcatccgcttccaccccctagcagaaaatagcccactaatccaaactctaacactatgcttaggcgctatcaccactctgttcgcagcagtctgcgcccttacacaaaatgacatcaaaaaaatcgtagccttctccacttcaagtcaactaggactcataatagttacaatcggcatcaaccaaccacacctagcattcctgcacatctgtacccacgccttcttcaaagccatactatttatgtgctccgggtccatcatccacaaccttaacaatgaacaagatattcgaaaaataggaggactactcaaaaccatacctctcacttcaacctccctcaccattggcagcctagcattagcaggaatacctttcctcacaggtttctactccaaagaccacatcatcgaaaccgcaaacatatcatacacaaacgcctgagccctatctattactctcatcgctacctccctgacaagcgcctatagcactcgaataattcttctcaccctaacaggtcaacctcgcttccccacccttactaacattaacgaaaataaccccaccctactaaaccccattaaacgcctggcagccggaagcctattcgcaggatttctcattactaacaacatttcccccgcatcccccttccaaacaacaatccccctctacctaaaactcacagccctcgctgtcactttcctaggacttctaacagccctagacctcaactacctaaccaacaaacttaaaataaaatccccactatgcacattttatttctccaacatactcggattctaccctagcatcacacaccgcacaatcccctatctaggccttcttacgagccaaaacctgcccctactcctcctagacctaacctgactagaaaagctattacctaaaacaatttcacagcaccaaatctccacctccatcatcacctcaacccaaaaaggcataattaaactttacttcctctctttcttcttcccactcatcctaaccctactcctaatcacataacctattcccccgagcaatctcaattacaatatatacaccaacaaacaatgttcaaccagtaactactactaatcaacgcccataatcatacaaagcccccgcaccaataggatcctcccgaatcaaccctgacccctctccttcataaattattcagcttcctacactattaaagtttaccacaaccaccaccccatcatactctttcacccacagcaccaatcctacctccatcgctaaccccactaaaacactcaccaagacctcaacccctgacccccatgcctcaggatactcctcaatagccatcgctgtagtatatccaaagacaaccatcattccccctaaataaattaaaaaaactattaaacccatataacctcccccaaaattcagaataataacacacccgaccacaccgctaacaatcaatactaaacccccataaataggagaaggcttagaagaaaaccccacaaaccccattactaaacccacactcaacagaaacaaagcatacatcattattctcgcacggactacaaccacgaccaatgatatgaaaaaccatcgttgtatttcaactacaagaacaccaatgaccccaatacgcaaaactaaccccctaataaaattaattaaccactcattcatcgacctccccaccccatccaacatctccgcatgatgaaacttcggctcactccttggcgcctgcctgatcctccaaatcaccacaggactattcctagccatgcactactcaccagacgcctcaaccgccttttcatcaatcgcccacatcactcgagacgtaaattatggctgaatcatccgctaccttcacgccaatggcgcctcaatattctttatctgcctcttcctacacatcgggcgaggcctatattacggatcatttctctactcagaaacctgaaacatcggcattatcctcctgcttgcaactatagcaacagccttcataggctatgtcctcccgtgaggccaaatatcattctgaggggccacagtaattacaaacttactatccgccatcccatacattgggacagacctagttcaatgaatctgaggaggctactcagtagacagtcccaccctcacacgattctttacctttcacttcatcttgcccttcattattgcagccctagcagcactccacctcctattcttgcacgaaacgggatcaaacaaccccctaggaatcacctcccattccgataaaatcaccttccacccttactacacaatcaaagacgccctcggcttacttctcttccttctctccttaatgacattaacactattctcaccagacctcctaggcgacccagacaattataccctagccaaccccttaaacacccctccccacatcaagcccgaatgatatttcctattcgcctacacaattctccgatccgtccctaacaaactaggaggcgtccttgccctattactatccatcctcatcctagcaataatccccatcctccatatatccaaacaacaaagcataatatttcgcccactaagccaatcactttattgactcctagccgcagacctcctcattctaacctgaatcggaggacaaccagtaagctacccttttaccatcattggacaagtagcatccgtactatacttcacaacaatcctaatcctaataccaactatctccctaattgaaaacaaaatactcaaatgggcctgtccttgtagtataaactaatacaccagtcttgtaaaccggagatgaaaacctttttccaaggacaaatcagagaaaaagtctttaactccaccattagcacccaaagctaagattctaatttaaactattctctgttctttcatggggaagcagatttgggtaccacccaagtattgactcacccatcaacaaccgctatgtatttcgtacattactgccagccaccatgaatattgtacagtaccataaatacttgaccacctgtagtacataaaaacccaatccacatcaaaaccccctccccatgcttacaagcaagtacagcaatcaaccctcaactatcacacatcaactgcaactccaaagccacccctcacccactaggataccaacaaacctacccacccttaacagtacatagtacataaagccatttaccgtacatagcacattacagtcaaatcccttctcgtccccatggatgacccccctcagataggggtcccttgaccaccatcctccgtgaaatcaatatcccgcacaagagtgctactctcctcgctccgggcccataacacttgggggtagctaaagtgaactgtatccgacatctggttcctacttcagggccataaagcctaaatagcccacacgttccccttaaataagacatcacgatg

SEQ ID NO: 16 - DNA, 16572 bp, Homo sapiens mitochondrial
  3110: "n" refers to a nucleotide at position 3107 of the Cambridge Reference Sequence (CRS, Anderson et al. 1981 Nature 290:457-465), later determined to be absent from the human mtDNA sequence according to the revised CRS (rCRS, Andrews et al. 1999 Nature Genetics 23:147); "n" therefore represents a single nucleotide deletion at a position corresponding to nucleotide 3107 of SEQ ID NO:1 as provided herein.
gatcacaggtctatcaccctattaaccactcacgggagctctccatgcatttggtattttcgtctggggggtatgcacgcgatagcattgcgagacgctggagccggagcaccctatgtcgcagtatctgtctttgattcctgcctcatcctattatttatcgcacctacgttcaatattacaggcgaacatacttactaaagtgtgttaattaattaatgcttgtaggacataataataacaattgaatgtctgcacagccactttccacacagacatcataacaaaaaatttccaccaaaccccccctccccccccgcttctggccacagcacttaaacacatctctgccaaaccccaaaaacaaagaaccctaacaccagcctaaccagatttcaaattttatcttttggcggtatgcacttttaacagtcaccccccaactaacacattattttcccctcccactcccatactactaatctcatcaatacaacccccgcccatcctacccagcacacacacaccgctgctaaccccataccccgaaccaaccaaaccccaaagacaccccccacagtttatgtagcttacctcctcaaagcaatacactgaaaatgtttagacgggctcacatcaccccataaacaaataggtttggtcctagcctttctattagctcttagtaagattacacatgcaagcatccccgttccagtgagttcaccctctaaatcaccacgatcaaaaggaacaagcatcaagcacgcagcaatgcagctcaaaacgcttagcctagccacacccccacgggaaacagcagtgattaacctttagcaataaacgaaagtttaactaagctatactaaccccagggttggtcaatttcgtgccagccaccgcggtcacacgattaacccaagtcaatagaagccggcgtaaagagtgttttagatcaccccctccccaataaagctaaaactcacctgagttgtaaaaaactccagttgacacaaaatagactacgaaagtggctttaacatatctgaacacacaatagctaagacccaaactgggattagataccccactatgcttagccctaaacctcaacagttaaatcaacaaaactgctcgccagaacactacgagccacagcttaaaactcaaaggacctggcggtgcttcatatccctctagaggagcctgttctgtaatcgataaaccccgatcaacctcaccacctcttgctcagcctatataccgccatcttcagcaaaccctgatgaaggctacaaagtaagcgcaagtacccacgtaaagacgttaggtcaaggtgtagcccatgaggtggcaagaaatgggctacattttctaccccagaaaactacgatagcccttatgaaacttaagggtcgaaggtggatttagcagtaaactaagagtagagtgcttagttgaacagggccctgaagcgcgtacacaccgcccgtcaccctcctcaagtatacttcaaaggacatttaactaaaacccctacgcatttatatagaggagacaagtcgtaacatggtaagtgtactggaaagtgcacttggacgaaccagagtgtagcttaacacaaagcacccaacttacacttaggagatttcaacttaacttgaccgctctgagctaaacctagccccaaacccactccaccttactaccagacaaccttagccaaaccatttacccaaataaagtataggcgatagaaattgaaacctggcgcaatagatatagtaccgcaagggaaagatgaaaaattataaccaagcataatatagcaaggactaacccctataccttctgcataatgaattaactagaaataactttgcaaggagagccaaagctaagacccccgaaaccagacgagctacctaagaacagctaaaagagcacacccgtctatgtagcaaaatagtgggaagatttataggtagaggcgacaaacctaccgagcctggtgatagctggttgtccaagatagaatcttagttcaactttaaatttgcccacagaaccctctaaatccccttgtaaatttaactgttagtccaaagaggaacagctctttggacactaggaaaaaaccttgtagagagagtaaaaaatttaacacccatagtaggcctaaaagcagccaccaattaagaaagcgttcaagctcaacacccactacctaaaaaatcccaaacatataactgaactcctcacacccaattggaccaatctatcaccctatagaagaactaatgttagtataagtaacatgaaaacattctcctccgcataagcctgcgtcagattaaaacactgaactgacaattaacagcccaatatctacaatcaaccaacaagtcattattaccctcactgtcaacccaacacaggcatgctcataaggaaaggttaaaaaaagtaaaaggaactcggcaaatcttaccccgcctgtttaccaaaaacatcacctctagcatcaccagtattagaggcaccgcctgcccagtgacacatgtttaacggccgcggtaccctaaccgtgcaaaggtagcataatcacttgttccttaaatagggacctgtatgaatggctccacgagggttcagctgtctcttacttttaaccagtgaaattgacctgcccgtgaagaggcgggcataacacagcaagacgagaagaccctatggagctttaatttattaatgcaaacagtacctaacaaacccacaggtcctaaactaccaaacctgcattaaaaatttcggttggggcgacctcggagcagaacccaacctccgagcagtacatgctaagacttcaccagtcaaagcgaactactatactcaattgatccaataacttgaccaacggaacaagttaccctagggataacagcgcaatcctattctagagtccatatcaacaatagggtttacgacctcgatgttggatcaggacatcccgatggtgcagccgctattaaaggttcgtttgttcaacgattaaagtcctacgtgatctgagttcagaccggagtaatccaggtcggtttctatctacnttcaaattcctccctgtacgaaaggacaagagaaataaggcctacttcacaaagcgccttcccccgtaaatgatatcatctcaacttagtattatacccacacccacccaagaacagggtttgttaagatggcagagcccggtaatcgcataaaacttaaaactttacagtcagaggttcaattcctcttcttaacaacatacccatggccaacctcctactcctcattgtacccattctaatcgcaatggcattcctaatgcttaccgaacgaaaaattctaggctatatacaactacgcaaaggccccaacgttgtaggcccctacgggctactacaacccttcgctgacgccataaaactcttcaccaaagagcccctaaaacccgccacatctaccatcaccctctacatcaccgccccgaccttagctctcaccatcgctcttctactatgaacccccctccccatacccaaccccctggtcaacctcaacctaggcctcctatttattctagccacctctagcctagccgtttactcaatcctctgatcagggtgagcatcaaactcaaactacgccctgatcggcgcactgcgagcagtagcccaaacaatctcatatgaagtcaccctagccatcattctactatcaacattactaataagtggctcctttaacctctccacccttatcacaacacaagaacacctctgattactcctgccatcatgacccttggccataatatgatttatctccacactagcagagaccaaccgaacccccttcgaccttgccgaaggggagtccgaactagtctcaggcttcaacatcgaatacgccgcaggccccttcgccctattcttcatagccgaatacacaaacattattataataaacaccctcaccactacaatcttcctaggaacaacatatgacgcactctcccctgaactctacacaacatattttgtcaccaagaccctacttctaacctccctgttcttatgaattcgaacagcatacccccgattccgctacgaccaactcatacacctcctatgaaaaaacttcctaccactcaccctagcattacttatatgatatgtctccatacccattacaatctccagcattccccctcaaacctaagaaatatgtctgataaaagagttactttgatagagtaaataataggagcttaaacccccttatttctaggactatgagaatcgaacccatccctgagaatccaaaattctccgtgccacctatcacaccccatcctaaagtaaggtcagctaaataagctatcgggcccataccccgaaaatgttggttatacccttcccgtactaattaatcccctggcccaacccgtcatctactctaccatctttgcaggcacactcatcacagcgctaagctcgcactgattttttacctgagtaggcctagaaataaacatgctagcttttattccagttctaaccaaaaaaataaaccctcgttccacagaagctgccatcaagtatttcctcacgcaagcaaccgcatccataatccttctaatagctatcctcttcaacaatatactctccggacaatgaaccataaccaatactaccaatcaatactcatcattaataatcataatagctatagcaataaaactaggaatagccccctttcacttctgagtcccagaggttacccaaggcacccctctgacatccggcctgcttcttctcacatgacaaaaactagcccccatctcaatcatataccaaatctctccctcactaaacgtaagccttctcctcactctctcaatcttatccatcatagcaggcagttgaggtggattaaaccaaacccagctacgcaaaatcttagcatactcctcaattacccacataggatgaataatagcagttctaccgtacaaccctaacataaccattcttaatttaactatttatattatcctaactactaccgcattcctactactcaacttaaactccagcaccacgaccctactactatctcgcacctgaaacaagctaacatgactaacacccttaattccatccaccctcctctccctaggaggcctgcccccgctaaccggctttttgcccaaatgggccattatcgaagaattcacaaaaaacaatagcctcatcatccccaccatcatagccaccatcaccctccttaacctctacttctacctacgcctaatctactccacctcaatcacactactccccatatctaacaacgtaaaaataaaatgacagtttgaacatacaaaacccaccccattcctccccacactcatcgcccttaccacgctactcctacctatctccccttttatactaataatcttatagaaatttaggttaaatacagaccaagagccttcaaagccctcagtaagttgcaatacttaatttctgtaacagctaaggactgcaaaaccccactctgcatcaactgaacgcaaatcagccactttaattaagctaagcccttactagaccaatgggacttaaacccacaaacacttagttaacagctaagcaccctaatcaactggcttcaatctacttctcccgccgccgggaaaaaaggcgggagaagccccggcaggtttgaagctgcttcttcgaatttgcaattcaatatgaaaatcacctcggagctggtaaaaagaggcctaacccctgtctttagatttacagtccaatgcttcactcagccattttacctcacccccactgatgttcgccgaccgttgactattctctacaaaccacaaagacattggaacactatacctattattcggcgcatgagctggagtcctaggcacagctctaagcctccttattcgagccgagctgggccagccaggcaaccttctaggtaacgaccacatctacaacgttatcgtcacagcccatgcatttgtaataatcttcttcatagtaatacccatcataatcggaggctttggcaactgactagttcccctaataatcggtgcccccgatatggcgtttccccgcataaacaacataagcttctgactcttacctccctctctcctactcctgctcgcatctgctatagtggaggccggagcaggaacaggttgaacagtctaccctcccttagcagggaactactcccaccctggagcctccgtagacctaaccatcttctccttacacctagcaggtgtctcctctatcttaggggccatcaatttcatcacaacaattatcaatataaaaccccctgccataacccaataccaaacgcccctcttcgtctgatccgtcctaatcacagcagtcctacttctcctatctctcccagtcctagctgctggcatcactatactactaacagaccgcaacctcaacaccaccttcttcgaccccgccggaggaggagaccccattctataccaacacctattctgatttttcggtcaccctgaagtttatattcttatcctaccaggcttcggaataatctcccatattgtaacttactactccggaaaaaaagaaccatttggatacataggtatggtctgagctatgatatcaattggcttcctagggtttatcgtgtgagcacaccatatatttacagtaggaatagacgtagacacacgagcatatttcacctccgctaccataatcatcgctatccccaccggcgtcaaagtatttagctgactcgccacactccacggaagcaatatgaaatgatctgctgcagtgctctgagccctaggattcatctttcttttcaccgtaggtggcctgactggcattgtattagcaaactcatcactagacatcgtactacacgacacgtactacgttgtagcccacttccactatgtcctatcaataggagctgtatttgccatcataggaggcttcattcactgatttcccctattctcaggctacaccctagaccaaacctacgccaaaatccatttcactatcatattcatcggcgtaaatctaactttcttcccacaacactttctcggcctatccggaatgccccgacgttactcggactaccccgatgcatacaccacatgaaacatcctatcatctgtaggctcattcatttctctaacagcagtaatattaataattttcatgatttgagaagccttcgcttcgaagcgaaaagtcctaatagtagaagaaccctccataaacctggagtgactatatggatgccccccaccctaccacacattcgaagaacccgtatacataaaatctagacaaaaaaggaaggaatcgaaccccccaaagctggtttcaagccaaccccatggcctccatgactttttcaaaaaggtattagaaaaaccatttcataactttgtcaaagttaaattataggctaaatcctatatatcttaatggcacatgcagcgcaagtaggtctacaagacgctacttcccctatcatagaagagcttatcacctttcatgatcacgccctcataatcattttccttatctgcttcctagtcctgtatgcccttttcctaacactcacaacaaaactaactaatactaacatctcagacgctcaggaaatagaaaccgtctgaactatcctgcccgccatcatcctagtcctcatcgccctcccatccctacgcatcctttacataacagacgaggtcaacgatccctcccttaccatcaaatcaattggccaccaatggtactgaacctacgagtacaccgactacggcggactaatcttcaactcctacatacttcccccattattcctagaaccaggcgacctgcgactccttgacgttgacaatcgagtagtactcccgattgaagcccccattcgtataataattacatcacaagacgtcttgcactcatgagctgtccccacattaggcttaaaaacagatgcaattcccggacgtctaaaccaaaccactttcaccgctacacgaccgggggtatactacggtcaatgctctgaaatttgtggagcaaaccacagtttcatgcccatcgtcctagaattaattcccctaaaaatctttgaaatagggcccgtatttaccctatagcaccccctctaccccctctagagcccactgtaaagctaacttagcattaaccttttaagttaaagattaagagaaccaacacctctttacagtgaaatgccccaactaaatactaccgtatggcccaccataattacccccatactccttacactattcctcatcacccaactaaaaatattaaacacaaactaccacctacctccctcaccaaagcccataaaaataaaaaattataacaaaccctgagaaccaaaatgaacgaaaatctgttcgcttcattcattgcccccacaatcctaggcctacccgccgcagtactgatcattctatttccccctctattgatccccacctccaaatatctcatcaacaaccgactaatcaccacccaacaatgactaatcaaactaacctcaaaacaaatgataaccatacacaacactaaaggacgaacctgatctcttatactagtatccttaatcatttttattgccacaactaacctcctcggactcctgcctcactcatttacaccaaccacccaactatctataaacctagccatggccatccccttatgagcgggcacagtgattataggctttcgctctaagattaaaaatgccctagcccacttcttaccacaaggcacacctacaccccttatccccatactagttattatcgaaaccatcagcctactcattcaaccaatagccctggccgtacgcctaaccgctaacattactgcaggccacctactcatgcacctaattggaagcgccaccctagcaatatcaaccattaaccttccctctacacttatcatcttcacaattctaattctactgactatcctagaaatcgctgtcgccttaatccaagcctacgttttcacacttctagtaagcctctacctgcacgacaacacataatgacccaccaatcacatgcctatcatatagtaaaacccagcccatgacccctaacaggggccctctcagccctcctaatgacctccggcctagccatgtgatttcacttccactccataacgctcctcatactaggcctactaaccaacacactaaccatataccaatgatggcgcgatgtaacacgagaaagcacataccaaggccaccacacaccacctgtccaaaaaggccttcgatacgggataatcctatttattacctcagaagtttttttcttcgcaggatttttctgagccttttaccactccagcctagcccctaccccccaattaggagggcactggcccccaacaggcatcaccccgctaaatcccctagaagtcccactcctaaacacatccgtattactcgcatcaggagtatcaatcacctgagctcaccatagtctaatagaaaacaaccgaaaccaaataattcaagcactgcttattacaattttactgggtctctattttaccctcctacaagcctcagagtacttcgagtctcccttcaccatttccgacggcatctacggctcaacattttttgtagccacaggcttccacggacttcacgtcattattggctcaactttcctcactatctgcttcatccgccaactaatatttcactttacatccaaacatcactttggcttcgaagccgccgcctgatactggcattttgtagatgtggtttgactatttctgtatgtctccatctattgatgagggtcttactcttttagtataaatagtaccgttaacttccaattaactagttttgacaacattcaaaaaagagtaataaacttcgccttaattttaataatcaacaccctcctagccttactactaataattattacattttgactaccacaactcaacggctacatagaaaaatccaccccttacgagtgcggcttcgaccctatatcccccgcccgcgtccctttctccataaaattcttcttagtagctattaccttcttattatttgatctagaaattgccctccttttacccctaccatgagccctacaaacaactaacctgccactaatagttatgtcatccctcttattaatcatcatcctagccctaagtctggcctatgagtgactacaaaaaggattagactgaaccgaattggtatatagtttaaacaaaacgaatgatttcgactcattaaattatgataatcatatttaccaaatgcccctcatttacataaatattatactagcatttaccatctcacttctaggaatactagtatatcgctcacacctcatatcctccctactatgcctagaaggaataatactatcgctgttcattatagctactctcataaccctcaacacccactccctcttagccaatattgtgcctattgccatactagtctttgccgcctgcgaagcagcggtgggcctagccctactagtctcaatctccaacacatatggcctagactacgtacataacctaaacctactccaatgctaaaactaatcgtcccaacaattatattactaccactgacatgactttccaaaaaacacataatttgaatcaacacaaccacccacagcctaattattagcatcatccctctactattttttaaccaaatcaacaacaacctatttagctgttccccaaccttttcctccgaccccctaacaacccccctcctaatactaactacctgactcctacccctcacaatcatggcaagccaacgccacttatccagtgaaccactatcacgaaaaaaactctacctctctatactaatctccctacaaatctccttaattataacattcacagccacagaactaatcatattttatatcttcttcgaaaccacacttatccccaccttggctatcatcacccgatgaggcaaccagccagaacgcctgaacgcaggcacatacttcctattctacaccctagtaggctcccttcccctactcatcgcactaatttacactcacaacaccctaggctcactaaacattctactactcactctcactgcccaagaactatcaaactcctgagccaacaacttaatatgactagcttacacaatagcttttatagtaaagatacctctttacggactccacttatgactccctaaagcccatgtcgaagcccccatcgctgggtcaatagtacttgccgcagtactcttaaaactaggcggctatggtataatacgcctcacactcattctcaaccccctgacaaaacacatagcctaccccttccttgtactatccctatgaggcataattataacaagctccatctgcctacgacaaacagacctaaaatcgctcattgcatactcttcaatcagccacatagccctcgtagtaacagccattctcatccaaaccccctgaagcttcaccggcgcagtcattctcataatcgcccacgggcttacatcctcattactattctgcctagcaaactcaaactacgaacgcactcacagtcgcatcataatcctctctcaaggacttcaaactctactcccactaatagctttttgatgacttctagcaagcctcgctaacctcgccttaccccccactattaacctactgggagaactctctgtgctagtaaccacgttctcctgatcaaatatcactctcctacttacaggactcaacatactagtcacagccctatactccctctacatatttaccacaacacaatggggctcactcacccaccacattaacaacataaaaccctcattcacacgagaaaacaccctcatgttcatacacctatcccccattctcctcctatccctcaaccccgacatcattaccgggttttcctcttgtaaatatagtttaaccaaaacatcagattgtgaatctgacaacagaggcttacgaccccttatttaccgagaaagctcacaagaactgctaactcatgcccccatgtctaacaacatggctttctcaacttttaaaggataacagctatccattggtcttaggccccaaaaattttggtgcaactccaaataaaagtaataaccatgcacactactataaccaccctaaccctgacttccctaattccccccatccttaccaccctcgttaaccctaacaaaaaaaactcatacccccattatgtaaaatccattgtcgcatccacctttattatcagtctcttccccacaacaatattcatgtgcctagaccaagaagttattatctcgaactgacactgagccacaacccaaacaacccagctctccctaagcttcaaactagactacttctccataatattcatccctgtagcattgttcgttacatggtccatcatagaattctcactgtgatatataaactcagacccaaacattaatcagttcttcaaatatctactcatcttcctaattaccatactaatcttagttaccgctaacaacctattccaactgttcatcggctgagagggcgtaggaattatatccttcttgctcatcagttgatgatacgcccgagcagatgccaacacagcagccattcaagcaatcctatacaaccgtatcggcgatatcggtttcatcctcgccttagcatgatttatcctacactccaactcatgagacccacaacaaatagcccttctaaacgctaatccaagcctcaccccactactaggcctcctcctagcagcagcaggcaaatcagcccaattaggtctccacccctgactcccctcagccatagaaggccccaccccagtctcagccctactccactcaagcactatagttgtagcaggaatcttcttactcatccgcttccaccccctagcagaaaatagcccactaatccaaactctaacactatgcttaggcgctatcaccactctgttcgcagcagtctgcgcccttacacaaaatgacatcaaaaaaatcgtagccttctccacttcaagtcaactaggactcataatagttacaatcggcatcaaccaaccacacctagcattcctgcacatctgtacccacgccttcttcaaagccatactatttatgtgctccgggtccatcatccacaaccttaacaatgaacaagatattcgaaaaataggaggactactcaaaaccatacctctcacttcaacctccctcaccattggcagcctagcattagcaggaatacctttcctcacaggtttctactccaaagaccacatcatcgaaaccgcaaacatatcatacacaaacgcctgagccctatctattactctcatcgctacctccctgacaagcgcctatagcactcgaataattcttctcaccctaacaggtcaacctcgcttccccacccttactaacattaacgaaaataaccccaccctactaaaccccattaaacgcctggcagccggaagcctattcgcaggatttctcattactaacaacatttcccccgcatcccccttccaaacaacaatccccctctacctaaaactcacagccctcgctgtcactttcctaggacttctaacagccctagacctcaactacctaaccaacaaacttaaaataaaatccccactatgcacattttatttctccaacatactcggattctaccctagcatcacacaccgcacaatcccctatctaggccttcttacgagccaaaacctgcccctactcctcctagacctaacctgactagaaaagctattacctaaaacaatttcacagcaccaaatctccacctccatcatcacctcaacccaaaaaggcataattaaactttacttcctctctttcttcttcccactcatcctaaccctactcctaatcacataacctattcccccgagcaatctcaattacaatatatacaccaacaaacaatgttcaaccagtaactactactaatcaacgcccataatcatacaaagcccccgcaccaataggatcctcccgaatcaaccctgacccctctccttcataaattattcagcttcctacactattaaagtttaccacaaccaccaccccatcatactctttcacccacagcaccaatcctacctccatcgctaaccccactaaaacactcaccaagacctcaacccctgacccccatgcctcaggatactcctcaatagccatcgctgtagtatatccaaagacaaccatcattccccctaaataaattaaaaaaactattaaacccatataacctcccccaaaattcagaataataacacacccgaccacaccgctaacaatcaatactaaacccccataaataggagaaggcttagaagaaaaccccacaaaccccattactaaacccacactcaacagaaacaaagcatacatcattattctcgcacggactacaaccacgaccaatgatatgaaaaaccatcgttgtatttcaactacaagaacaccaatgaccccaatacgcaaaactaaccccctaataaaattaattaaccactcattcatcgacctccccaccccatccaacatctccgcatgatgaaacttcggctcactccttggcgcctgcctgatcctccaaatcaccacaggactattcctagccatgcactactcaccagacgcctcaaccgccttttcatcaatcgcccacatcactcgagacgtaaattatggctgaatcatccgctaccttcacgccaatggcgcctcaatattctttatctgcctcttcctacacatcgggcgaggcctatattacggatcatttctctactcagaaacctgaaacatcggcattatcctcctgcttgcaactatagcaacagccttcataggctatgtcctcccgtgaggccaaatatcattctgaggggccacagtaattacaaacttactatccgccatcccatacattgggacagacctagttcaatgaatctgaggaggctactcagtagacagtcccaccctcacacgattctttacctttcacttcatcttgcccttcattattgcagccctagcaacactccacctcctattcttgcacgaaacgggatcaaacaaccccctaggaatcacctcccattccgataaaatcaccttccacccttactacacaatcaaagacgccctcggcttacttctcttccttctctccttaatgacattaacactattctcaccagacctcctaggcgacccagacaattataccctagccaaccccttaaacacccctccccacatcaagcccgaatgatatttcctattcgcctacacaattctccgatccgtccctaacaaactaggaggcgtccttgccctattactatccatcctcatcctagcaataatccccatcctccatatatccaaacaacaaagcataatatttcgcccactaagccaatcactttattgactcctagccgcagacctcctcattctaacctgaatcggaggacaaccagtaagctacccttttaccatcattggacaagtagcatccgtactatacttcacaacaatcctaatcctaataccaactatctccctaattgaaaacaaaatactcaaatgggcctgtccttgtagtataaactaatacaccagtcttgtaaaccggagatgaaaacctttttccaaggacaaatcagagaaaaagtctttaactccaccattagcacccaaagctaagattctaatttaaactattctctgttctttcatggggaagcagatttgggtaccacccaagtattgactcacccatcaacaaccgctatgtatttcgtacattactgccagccaccatgaatattgtacggtaccataaatacttgaccacctgtagtacataaaaacccaatccacatcaaaaccccctccccatgcttacaagcaagtacagcaatcaaccctcaactatcacacatcaactgcaactccaaagccacccctcacccactaggataccaacaaacctacccacccttaacagtacatagtacataaagccatttaccgtacatagcacattacagtcaaatcccttctcgtccccatggatgacccccctcagataggggtcccttgaccaccatcctccgtgaaatcaatatcccgcacaagagtgctactctcctcgctccgggcccataacacttgggggtagctaaagtgaactgtatccgacatctggttcctacttcagggtcataaagcctaaatagcccacacgttccccttaaataagacatcacgatg

SEQ ID NO: 17 - DNA, 16570 bp, Homo sapiens mitochondrial
  3108: "n" refers to a nucleotide at position 3107 of the Cambridge Reference Sequence (CRS, Anderson et al. 1981 Nature 290:457-465), later determined to be absent from the human mtDNA sequence according to the revised CRS (rCRS, Andrews et al. 1999 Nature Genetics 23:147); "n" therefore represents a single nucleotide deletion at a position corresponding to nucleotide 3107 of SEQ ID NO:1 as provided herein.
gatcacaggtctatcaccctattaaccactcacgggagctctccatgcatttggtattttcgtctggggggtatgcacgcgatagcattgcgagacgctggagccggagcaccctatgtcgcagtatctgtctttgattcctgcctcatcctattatttatcgcacctacgttcaatattacaggcgaacatacctactaaagtgtgttaattaattaatgcttgtaggacataataataacaattgaatgtctgcacagccgctttccacacagacatcataacaaaaaatttccaccaaaccccccctcccccgccttctggccacagcacttaaacacatctctgccaaaccccaaaaacaaagaaccctaacaccagcctaaccagatttcaaattttatcttttggcggtatgcacttttaacagtcaccccccaactaacacattattttcccctcccactcccatactactaatctcatcaatacaacccccgcccatcctacccagcacacacacaccgctgctaaccccataccccgaaccaaccaaaccccaaagacaccccccacagtttatgtagcttacctcctcaaagcaatacactgaaaatgtttagacgggctcacatcaccccataaacaaataggtttggtcctagcctttctattagctcttagtaagattacacatgcaagcatccccgttccagtgagttcaccctctaaatcaccacgatcaaaagggacaagcatcaagcacgcagcaatgcagctcaaaacgcttagcctagccacacccccacgggaaacagcagtgattaacctttagcaataaacgaaagtttaactaagctatactaaccccagggttggtcaatttcgtgccagccaccgcggtcacacgattaacccaagtcaatagaagccggcgtaaagagtgttttagatcaccccctccccaataaagctaaaactcacctgagttgtaaaaaactccagttgacacaaaatagactacgaaagtggctttaacatatctgaacacacaatagctaagacccaaactgggattagataccccactatgcttagccctaaacctcaacagttaaatcaacaaaactgctcgccagaacactacgagccacagcttaaaactcaaaggacctggcggtgcttcatatccctctagaggagcctgttctgtaatcgataaaccccgatcaacctcaccacctcttgctcagcctatataccgccatcttcagcaaaccctgatgaaggctacaaagtaagcgcaagtacccacgtaaagacgttaggtcaaggtgtagcccatgaggtggcaagaaatgggctacattttctaccccagaaaactacgatagcccttatgaaacttaagggtcgaaggtggatttagcagtaaactgagagtagagtgcttagttgaacagggccctgaagcgcgtacacaccgcccgtcaccctcctcaagtatacttcaaaggacatttaactaaaacccctacgcatttatatagaggagacaagtcgtaacatggtaagtgtactggaaagtgcacttggacgaaccagagtgtagcttaacacaaagcacccaacttacacttaggagatttcaacttaacttgaccgctctgagctaaacctagccccaaacccactccaccttactaccagacaaccttagccaaaccatttacccaaataaagtataggcgatagaaattgaaacctggcgcaatagatatagtaccgcaagggaaagatgaaaaattataaccaagcataatatagcaaggactaacccctataccttctgcataatgaattaactagaaataactttgcaaggagagccaaagctaagacccccgaaaccagacgagctacctaagaacagctaaaagagcacacccgtctatgtagcaaaatagtgggaagatttataggtagaggcgacaaacctaccgagcctggtgatagctggttgtccaagatagaatcttagttcaactttaaatttgcccacagaaccctctaaatccccttgtaaatttaactgttagtccaaagaggaacagctctttggacactaggaaaaaaccttgtagagagagtaaaaaatttaacacccatagtaggcctaaaagcagccaccaattaagaaagcgttcaagctcaacacccactacctaaaaaatcccaaacatataactgaactcctcacacccaattggaccaatctatcaccctatagaagaactaatgttagtataagtaacatgaaaacattctcctccgcataagcctgcgtcagattaaaacactgaactgacaattaacagcccaatatctacaatcaaccaacaagtcattattaccctcactgtcaacccaacacaggcatgctcataaggaaaggttaaaaaaagtaaaaggaactcggcaaatcttaccccgcctgtttaccaaaaacatcacctctagcatcaccagtattagaggcaccgcctgcccagtgacacatgtttaacggccgcggtaccctaaccgtgcaaaggtagcataatcacttgttccttaaatagggacctgtatgaatggctccacgagggttcagctgtctcttacttttaaccagtgaaattgacctgcccgtgaagaggcgggcataacacagcaagacgagaagaccctatggagctttaatttattaatgcaaacagtacctaacaaacccacaggtcctaaactaccaaacctgcattaaaaatttcggttggggcgacctcggagcagaacccaacctccgagcagtacatgctaagacttcaccagtcaaagcgaactactatactcaattgatccaataacttgaccaacggaacaagttaccctagggataacagcgcaatcctattctagagtccatatcaacaatagggtttacgacctcgatgttggatcaggacatcccgatggtgcagccgctattaaaggttcgtttgttcaacgattaaagtcctacgtgatctgagttcagaccggagtaatccaggtcggtttctatctacnttcaaattcctccctgtacgaaaggacaagagaaataaggcctacttcacaaagcgccttcccccgtaaatgatatcatctcaacttagtattatacccacacccacccaagaacagggtttgttaagatggcagagcccggtaatcgcataaaacttaaaactttacagtcagaggttcaattcctcttcttaacaacatacccatggccaacctcctactcctcattgtacccattctaatcgcaatggcattcctaatgcttaccgaacgaaaaattctaggctatatacaactacgcaaaggccccaacgttgtaggcccctacgggctactacaacccttcgctgacgccataaaactcttcaccaaagagcccctaaaacccgccacatctaccatcaccctctacatcaccgccccgaccttagctctcaccatcgctcttctactatgaacccccctccccatacccaaccccctggtcaacctcaacctaggcctcctatttattctagccacctctagcctagccgtttactcaatcctctgatcagggtgagcatcaaactcaaactacgccctgatcggcgcactgcgagcagtagcccaaacaatctcatatgaagtcaccctagccatcattctactatcaacattactaataagtggctcctttaacctctccacccttatcacaacacaagaacacctctgattactcctgccatcatgacccttggccataatatgatttatctccacactagcagagaccaaccgaacccccttcgaccttgccgaaggggagtccgaactagtctcaggcttcaacatcgaatacgccgcaggccccttcgccctattcttcatagccgaatacacaaacattattataataaacaccctcaccactgcaatcttcctaggaacaacatatgacgcactctcccctgaactctacacaacatattttgtcaccaagaccctacttctaacctccctgttcttatgaattcgaacagcatacccccgattccgctacgaccaactcatacacctcctatgaaaaaacttcctaccactcaccctagcattacttatatgatatgtctccatacccattacaatctccagcattccccctcaaacctaagaaatatgtctgataaaagagttactttgatagagtaaataataggagcttaaacccccttatttctaggactatgagaatcgaacccatccctgagaatccaaaattctccgtgccacctatcacaccccatcctaaagtaaggtcagctaaataagctatcgggcccataccccgaaaatgttggttatacccttcccgtactaattaatcccctggcccaacccgtcatctactctaccatctttgcaggcacactcatcacagcgctaagctcgcactgattttttacctgagtaggcctagaaataaacatgctagcttttattccagttctaaccaaaaaaataaaccctcgttccacagaagctgccatcaagtatttcctcacgcaagcaaccgcatccataatccttctaatagctatcctcttcaacaatatactctccggacaatgaaccataaccaatactaccaatcaatactcatcattaataatcataatggctatagcaataaaactaggaatagccccctttcacttctgagtcccagaggttacccaaggcacccctctgacatccggcctgcttcttctcacatgacaaaaactagcccccatctcaatcatataccaaatctctccctcactaaacgtaagccttctcctcactctctcaatcttatccatcatagcaggcagttgaggtggattaaaccaaacccagctacgcaaaatcctagcatactcctcaattacccacataggatgaataatagcagttctaccgtacaaccctaacataaccattcttaatttaactatttatattatcctaactactaccgcattcctactactcaacttaaactccagcaccacgaccctactactatctcgcacctgaaacaagctaacatgactaacacccttaattccatccaccctcctctccctaggaggcctgcccccgctaaccggctttttgcccaaatgggccattatcgaagaattcacaaaaaacaatagcctcatcatccccaccatcatagccaccatcaccctccttaacctctacttctacctacgcctaatctactccacctcaatcacactactccccatatctaacaacgtaaaaataaaatgacagtttgaacatacaaaacccaccccattcctccccacactcatcgcccttaccacgctactcctacctatctccccttttatactaataatcttatagaaatttaggttaaatacagaccaagagccttcaaagccctcagtaagttgcaatacttaatttctgtaacagctaaggactgcaaaaccccactctgcatcaactgaacgcaaatcagccactttaattaagctaagcccttactagaccaatgggacttaaacccacaaacacttagttaacagctaagcaccctaatcaactggcttcaatctacttctcccgccgccgggaaaaaaggcgggagaagccccggcaggtttgaagctgcttcttcgaatttgcaattcaatatgaaaatcacctcggagctggtaaaaagaggcctaacccctgtctttagatttacagtccaatgcttcactcagccattttacctcacccccactgatgttcgccgaccgttgactattctctacaaaccacaaagacattggaacactatacctattattcggcgcatgagctggagtcctaggcacagctctaagcctccttattcgagccgagctgggccagccaggcaaccttctaggtaacgaccacatctacaacgttatcgtcacagcccatgcatttgtaataatcttcttcatagtaatacccatcataatcggaggctttggcaactgactagttcccctaataatcggtgcccccgatatggcgtttccccgcataaacaacataagcttctgactcttacctccctctctcctactcctgctcgcatctgctatagtggaggccggagcaggaacaggttgaacagtctaccctcccttagcagggaactactcccaccctggagcctccgtagacctaaccatcttctccttacacctagcaggtgtctcctctatcttaggggccatcaatttcatcacaacaattatcaatataaaaccccctgccataacccaataccaaacgcccctcttcgtctgatccgtcctaatcacagcagtcctacttctcctatctctcccagtcctagctgctggcatcactatactactaacagaccgcaacctcaacaccaccttcttcgaccccgccggaggaggagaccccattctataccaacacctattctgatttttcggtcaccctgaagtttatattcttatcctaccaggcttcggaataatctcccatattgtaacttactactccggaaaaaaagaaccatttggatacataggtatggtctgagctatgatatcaattggcttcctagggtttatcgtgtgagcacaccatatatttacagtaggaatagacgtagacacacgagcatatttcacctccgctaccataatcatcgctatccccaccggcgtcaaagtatttagctgactcgccacactccacggaagcaatatgaaatgatctgctgcagtgctctgagccctaggattcatctttcttttcaccataggtggcctgactggcattgtattagcaaactcatcactagacatcgtactacacgacacgtactacgttgtagcccacttccactatgtcctatcaataggagctgtatttgccatcataggaggcttcattcactgatttcccctattctcaggctacaccctagaccaaacctacgccaaaatccatttcactatcatattcatcggcgtaaatctaactttcttcccacaacactttctcggcctatccggaatgccccgacgttactcggactaccccgatgcatacaccacatgaaacatcctatcatctgtaggctcattcatttctctaacagcagtaatattaataattttcatgatttgagaagccttcgcttcgaagcgaaaagtcctaatagtagaagaaccctccataaacctggagtgactatatggatgccccccaccctaccacacattcgaagaacccgtatacataaaatctagacaaaaaaggaaggaatcgaaccccccaaagctggtttcaagccaaccccatggcctccatgactttttcaaaaaggtattagaaaaaccatttcataactttgtcaaagttaaattataggctaaatcctatatatcttaatggcacatgcagcgcaagtaggtctacaagacgctacttcccctatcatagaagagcttatcacctttcatgatcacgccctcataatcattttccttatctgcttcctagtcctgtatgcccttttcctaacactcacaacaaaactaactaatactaacatctcagacgctcaggaaatagaaaccgtctgaactatcctgcccgccatcatcctagtcctcatcgccctcccatccctacgcatcctttacataacagacgaggtcaacgatccctcccttaccatcaaatcaattggccaccaatggtactgaacctacgagtacaccgactacggcggactaatcttcaactcctacatacttcccccattattcctagaaccaggcgacctgcgactccttgacgttgacaatcgagtagtactcccgattgaagcccccattcgtataataattacatcacaagacgtcttgcactcatgagctgtccccacattaggcttaaaaacagatgcaattcccggacgtctaaaccaaaccactttcaccgctacacgaccgggggtatactacggtcaatgctctgaaatctgtggagcaaaccacagtttcatgcccatcgtcctagaattaattcccctaaaaatctttgaaatagggcccgtatttaccctataacaccccctctaccccctctagagcccactgtaaagctaacttagcattaaccttttaagttaaagattaagagaaccaacacctctttacagtgaaatgccccaactaaatactaccgtatggcccaccataattacccccatactccttacactattcctcatcacccaactaaaaatattaaacacaaactaccacctacctccctcaccaaagcccataaaaataaaaaattataacaaaccctgagaaccaaaatgaacgaaaatctgttcgcttcattcattgcccccacaatcctaggcctacccgccgcagtactgatcattctatttccccctctattgatccccacctccaaatatctcatcaacaaccgactaatcaccacccaacaatgactaatcaaactaacctcaaaacaaatgataaccatacacaacactaaaggacgaacctgatctcttatactagtatccttaatcatttttattgccacaactaacctcctcggactcctgcctcactcatttacaccaaccacccaactatctataaacctagccatggccatccccttatgagcgggcgcagtgattataggctttcgctctaagattaaaaatgccctagcccacttcttaccacaaggcacacctacaccccttatccccatactagttattatcgaaaccatcagcctactcattcaaccaatagccctggccgtacgcctaaccgctaacattactgcaggccacctactcatgcacctaattggaagcgccaccctagcaatatcaaccattaaccttccctctacacttatcatcttcacaattctaattctactaactatcctagaaatcgctgtcgccttaatccaagcctacgttttcacacttctagtaagcctctacctgcacgacaacacataatgacccaccaatcacatgcctatcatatagtaaaacccagcccatgacccctaacaggggccctctcagccctcctaatgacctccggcctagccatgtgatttcacttccactccataacgctcctcatactaggcctactaaccaacacactaaccatataccaatgatggcgcgatgtaacacgagaaagcacataccaaggccaccacacaccacctgtccaaaaaggccttcgatacgggataatcctatttattacctcagaagtttttttcttcgcaggatttttctgagccttttaccactccagcctagcccctaccccccaattaggagggcactggcccccaacaggcatcaccccgctaaatcccctagaagtcccactcctaaacacatccgtattactcgcatcaggagtatcaatcacctgagctcaccatagtctaatagaaaacaaccgaaaccaaataattcaagcactgcttattacaattttactgggtctctattttaccctcctacaagcctcagagtacttcgagtctcccttcaccatttccgacggcatctacggctcaacattttttgtagccacaggcttccacggacttcacgtcattattggctcaactttcctcactatctgcttcatccgccaactaatatttcactttacatccaaacatcactttggcttcgaagccgccgcctgatactggcattttgtagatgtggtttgactatttctgtatgtctccatctattgatgagggtcttactcttttagtataaatagtaccgttaacttccaattaactagttttgacaacattcaaaaaagagtaataaacttcgccttaattttaataatcaacaccctcctagccttactactaataattattacattttgactaccacaactcaacggctacatagaaaaatccaccccttacgagtgcggcttcgaccctatatcccccgcccgcgtccctttctccataaaattcttcttagtagctattaccttcttattatttgatctagaaattgccctccttttacccctaccatgagccctacaaacaactaacctgccactaatagttatgtcatccctcttattaatcatcatcctagccctaagtctggcctatgagtgactacaaaaaggattagactgaaccgaattggtatatagtttaaacaaaacgaatgatttcgactcattaaattatgataatcatatttaccaaatgcccctcatttacataaatattatactagcatttaccatctcacttctaggaatactagtatatcgctcacacctcatatcctccctactatgcctagaaggaataatactatcgctgttcattatagctactctcataaccctcaacacccactccctcttagccaatattgtgcctattgccatactagtctttgccgcctgcgaagcagcggtgggcctagccctactagtctcaatctccaacacatatggcctagactacgtacataacctaaacctactccaatgctaaaactaatcgtcccaacaattatattactaccactgacatgactttccaaaaaacacataatttgaatcaacacaaccacccacagcctaattattagcatcatccctctactattttttaaccaaatcaacaacaacctatttagctgttccccaaccttttcctccgaccccctaacaacccccctcctaatactaactacctgactcctacccctcacaatcatggcaagccaacgccacttatccagtgaaccactatcacgaaaaaaactctacctctctatactaatctccctacaaatctccttaattataacattcacagccacagaactaatcatattttatatcttcttcgaaaccacacttatccccaccttggctatcatcacccgatgaggcaaccagccagaacgcctgaacgcaggcacatacttcctattctacaccctagtaggctcccttcccctactcatcgcactaatttacactcacaacaccctaggctcactaaacattctactactcactctcactgcccaagaactatcaaactcctgagccaacaacttaatatgactagcttacacaatagcttttatagtaaagatacctctttacggactccacttatgactccctaaagcccatgtcgaagcccccatcgctgggtcaatagtacttgccgcagtactcttaaaactaggcggctatggtataatacgcctcacactcattctcaaccccctgacaaaacacatagcctaccccttccttgtactatccctatgaggcataattataacaagctccatctgcctacgacaaacagacctaaaatcgctcattgcatactcttcaatcagccacatagccctcgtagtaacagccattctcatccaaaccccctgaagcttcaccggcgcagtcattctcataatcgcccacgggcttacatcctcattactattctgcctagcaaactcaaactacgaacgcactcacagtcgcatcataatcctctctcaaggacttcaaactctactcccactaatagctttttgatgacttctagcaagcctcgctaacctcgccttaccccccactattaacctactgggagaactctctgtgctagtaaccacgttctcctgatcaaatatcactctcctacttacaggactcaacatactagtcacagccctatactccctctacatatttaccacaacacaatggggctcactcacccaccacattaacaacataaaaccctcattcacacgagaaaacaccctcatgttcatacacctatcccccattctcctcctatccctcaaccccgacatcattaccgggttttcctcttgtaaatatagtttaaccaaaacatcagattgtgaatctgacaacagaggcttacgaccccttatttaccgagaaagctcacaagaactgctaactcatgcccccatgtctaacaacatggctttctcaacttttaaaggataacagctatccattggtcttaggccccaaaaattttggtgcaactccaaataaaagtaataaccatgcacactactataaccaccctaaccctgacttccctaattccccccatccttaccaccctcgttaaccctaacaaaaaaaactcatacccccattatgtaaaatccattgtcgcatccacctttattatcagtctcttccccacaacaatattcatgtgcctagaccaagaagttattatctcgaactgacactgagccacaacccaaacaacccagctctccctaagcttcaaactagactacttctccataatattcatccctgtagcattgttcgttacatggtccatcatagagttctcactgtgatatataaactcagacccaaacattaatcagttcttcaaatatctactcatcttcctaattaccatactaatcttagttaccgctaacaacctattccaactgttcatcggctgagagggcgtaggaattatatccttcttgctcatcagttgatgatacgcccgagcagatgccaacacagcagccattcaagcaatcctatacaaccgtatcggcgatatcggtttcatcctcgccttagcatgatttatcctacactccaactcatgagacccacaacaaatagcccttctaaacgctaatccaagcctcaccccactactaggcctcctcctagcagcagcaggcaaatcagcccaattaggtctccacccctgactcccctcagccatagaaggccccaccccagtctcagccctactccactcaagcactatagttgtagcaggaatcttcttactcatccgcttccaccccctagcagaaaatagcccactaatccaaactctaacactatgcttaggcgctatcaccactctgttcgcagcagtctgcgcccttacacaaaatgacatcaaaaaaatcgtagccttctccacttcaagtcaactaggactcataatagttacaatcggcatcaaccaaccacacctagcattcctgcacatctgtacccacgccttcttcaaagccatactatttatgtgctccgggtccatcatccacaaccttaacaatgaacaagatattcgaaaaataggaggactactcaaaaccatacctctcacttcaacctccctcaccattggcagcctagcattagcaggaatacctttcctcacaggtttctactccaaagaccacatcatcgaaaccgcaaacatatcatacacaaacgcctgagccctatctattactctcatcgctacctccctgacaagcgcctatagcactcgaataattcttctcaccctaacaggtcaacctcgcttccccacccttactaacattaacgaaaataaccccaccctactaaaccccattaaacgcctggcagccggaagcctattcgcaggatttctcattactaacaacatttcccccgcatcccccttccaaacaacaatccccctctacctaaaactcacagccctcgctgtcactttcctaggacttctaacagccctagacctcaactacctaaccaacaaacttaaaataaaatccccactatgcacattttatttctccaacatactcggattctaccctagcatcacacaccgcacaatcccctatctaggccttcttacgagccaaaacctgcccctactcctcctagacctaacctgactagaaaagctattacctaaaacaatttcacagcaccaaatctccacctccatcatcacctcaacccaaaaaggcataattaaactttacttcctctctttcttcttcccactcatcctaaccctactcctaatcacataacctattcccccgagcaatctcaattacaatatatacaccaacaaacaatgttcaaccagtaactactactaatcaacgcccataatcatacaaagcccccgcaccaataggatcctcccgaatcaaccctgacccctctccttcataaattattcagcttcctacactattaaagtttaccacaaccaccaccccatcatactctttcacccacagtaccaatcctacctccatcgctaaccccactaaaacactcaccaagacctcaacccctgacccccatgcctcaggatactcctcaatagccatcgctgtagtatatccaaagacaaccatcattccccctaaataaattaaaaaaactattaaacccatataacctcccccaaaattcagaataataacacacccgaccacaccactaacaatcaatgctaaacccccataaataggagaaggcttagaagaaaaccccacaaaccccattactaaacccacactcaacagaaacaaagcatacatcattattctcgcacggactacaaccacgaccaatgatatgaaaaaccatcgttgtatttcaactacaagaacaccaatgaccccaatacgcaaaactaaccccctaataaaattaattaaccactcattcatcgacctccccaccccatccaacatctccgcatgatgaaacttcggctcactccttggcgcctgcctgatcctccaaatcaccacaggactattcctagccatgcactactcaccagacgcctcaaccgccttttcatcaatcgcccacatcactcgagacgtaaattatggctgaatcatccgctaccttcacgccaatggcgcctcaatattctttatctgcctcttcctacacatcgggcgaggcctatattacggatcatttctctactcagaaacctgaaacatcggcattatcctcctgcttgcaactatagcaacagccttcataggctatgtcctcccgtgaggccaaatatcattctgaggggccacagtaattacaaacttactatccgccatcccatacattgggacagacctagttcaatgaatctgaggaggctactcagtagacagtcccaccctcacacgattctttacctttcacttcatcttgcccttcattattgcagccctagcagcactccacctcctattcttgcacgaaacgggatcaaacaaccccctaggaatcacctcccattccgataaaatcaccttccacccttactacacaatcaaagacgccctcggcttacttctcttccttctctccttaatgacattaacactattctcaccagacctcctaggcgacccagacaattataccctagccaaccccttaaacacccctccccacatcaagcccgaatgatatttcctattcgcctacacaattctccgatccgtccctaacaaactaggaggcgtccttgccctattactatccatcctcatcctagcaataatccccatcctccatatatccaaacaacaaagcataatatttcgcccactaagccaatcactttattgactcctagccgcagacctcctcattctaacctgaatcggaggacaaccagtaagctacccttttaccatcattggacaagtagcatccgtactatacttcacaacaatcctaatcctaataccaactatctccctaattgaaaacaaaatactcaaatggacctgtccttgtagtataaactaatacaccagtcttgtaaaccggagatgaaaacctttttccaaggacaaatcagagaaaaagtctttaactccaccattagcacccaaagctaagattctaatttaaactattctctgttctttcatggggaagcagatttgggtaccacccaagtattgactcacccatcaacaaccgctatgtatttcgtacattactgccagccaccatgaatattgtacggtaccataaatacttgaccacctgtagtacataaaaacccaatccacatcaaaaccccctccccatgcttacaagcaagtacagcaatcaaccctcaactatcacacatcaactgcaactccaaagccacccctcacccactaggataccaacaaacctacccacccttaacagtacatagtacataaagccatttaccgtacatagcacattacagtcaaatcccttctcgtccccatggatgacccccctcagataggggtcccttgaccaccatcctccgtgaaatcaatatcccgcacaagagtgctactctcctcgctccgggcccataacacttgggggtagctaaagtgaactgtatccgacatctggttcctacttcagggtcataaagcctaaatagcccacacgttccccttaaataagacatcacgatg

SEQ ID NO: 18 - DNA, 16570 bp, Homo sapiens mitochondrial
  3108: "n" refers to a nucleotide at position 3107 of the Cambridge Reference Sequence (CRS, Anderson et al. 1981 Nature 290:457-465), later determined to be absent from the human mtDNA sequence according to the revised CRS (rCRS, Andrews et al. 1999 Nature Genetics 23:147); "n" therefore represents a single nucleotide deletion at a position corresponding to nucleotide 3107 of SEQ ID NO:1 as provided herein.
gatcacaggtctatcaccctattaaccactcacgggagctctccatgcatttggtattttcgtctggggggtatgcacgcgatagcattgcgagacgctggagccggagcaccctatgtcgcagtatctgtctttgattcctgcctcatcctattatttatcgcacctacgttcaatattacaggcgaacatacttactaaagtgtgttaattaattaatgcttgtaggacataataataacaattgaatgtctgcacagccgctttccacacagacatcataacaaaaaatttccaccaaaccccccctcccccgccttctggccacagcacttaaacacatctctgccaaaccccaaaaacaaagaaccctaacaccagcctaaccagatttcaaattttatcttttggcggtatgcacttttaacagtcaccccccaactaacacattattttcccctcccactcccatactactaatctcatcaatacaacccccgcccatcctacccagcacacacacaccgctgctaaccccataccccgaaccaaccaaaccccaaagacaccccccacagtttatgtagcttacctcctcaaagcaatacactgaaaatgtttagacgggctcacatcaccccataaacaaataggtttggtcctagcctttctattagctcttagtaagattacacatgcaagcatccccgttccagtgagttcaccctctaaatcaccacgatcaaaagggacaagcatcaagcacgcagcaatgcagctcaaaacgcttagcctagccacacccccacgggaaacagcagtgattaacctttagcaataaacgaaagtttaactaagctatactaaccccagggttggtcaatttcgtgccagccaccgcggtcacacgattaacccaagtcaatagaagccggcgtaaagagtgttttagatcaccccctccccaataaagctaaaactcacctgagttgtaaaaaactccagttgacacaaaatagactacgaaagtggctttaacatatctgaacacacaatagctaagacccaaactgggattagataccccactatgcttagccctaaacctcaacagttaaatcaacaaaactgctcgccagaacactacgagccacagcttaaaactcaaaggacctggcggtgcttcatatccctctagaggagcctgttctgtaatcgataaaccccgatcaacctcaccacctcttgctcagcctatataccgccatcttcagcaaaccctgatgaaggctacaaagtaagcgcaagtacccacgtaaagacgttaggtcaaggtgtagcccatgaggtggcaagaaatgggctacattttctaccccagaaaactacgatagcccttatgaaacttaagggtcgaaggtggatttagcagtaaactgagagtagagtgcttagttgaacagggccctgaagcgcgtacacaccgcccgtcaccctcctcaagtatacttcaaaggacatttaactaaaacccctacgcatttatatagaggagacaagtcgtaacatggtaagtgtactggaaagtgcacttggacgaaccagagtgtagcttaacacaaagcacccaacttacacttaggagatttcaacttaacttgaccgctctgagctaaacctagccccaaacccactccaccttactaccagacaaccttagccaaaccatttacccaaataaagtataggcgatagaaattgaaacctggcgcaatagatatagtaccgcaagggaaagatgaaaaattataaccaagcataatatagcaaggactaacccctataccttctgcataatgaattaactagaaataactttgcaaggagagccaaagctaagacccccgaaaccagacgagctacctaagaacagctaaaagagcacacccgtctatgtagcaaaatagtgggaagatttataggtagaggcgacaaacctaccgagcctggtgatagctggttgtccaagatagaatcttagttcaactttaaatttgcccacagaaccctctaaatccccttgtaaatttaactgttagtccaaagaggaacagctctttggacactaggaaaaaaccttgtagagagagtaaaaaatttaacacccatagtaggcctaaaagcagccaccaattaagaaagcgttcaagctcaacacccactacctaaaaaatcccaaacatataactgaactcctcacacccaattggaccaatctatcaccctatagaagaactaatgttagtataagtaacatgaaaacattctcctccgcataagcctgcgtcagattaaaacactgaactgacaattaacagcccaatatctacaatcaaccaacaagtcattattaccctcactgtcaacccaacacaggcatgctcataaggaaaggttaaaaaaagtaaaaggaactcggcaaatcttaccccgcctgtttaccaaaaacatcacctctagcatcaccagtattagaggcaccgcctgcccagtgacacatgtttaacggccgcggtaccctaaccgtgcaaaggtagcataatcacttgttccttaaatagggacctgtatgaatggctccacgagggttcagctgtctcttacttttaaccagtgaaattgacctgcccgtgaagaggcgggcataacacagcaagacgagaagaccctatggagctttaatttattaatgcaaacagtacctaacaaacccacaggtcctaaactaccaaacctgcattaaaaatttcggttggggcgacctcggagcagaacccaacctccgagcagtacatgctaagacttcaccagtcaaagcgaactactatactcaattgatccaataacttgaccaacggaacaagttaccctagggataacagcgcaatcctattctagagtccatatcaacaatagggtttacgacctcgatgttggatcaggacatcccgatggtgcagccgctattaaaggttcgtttgttcaacgattaaagtcctacgtgatctgagttcagaccggagtaatccaggtcggtttctatctacnttcaaattcctccctgtacgaaaggacaagagaaataaggcctacttcacaaagcgccttcccccgtaaatgatatcatctcaacttagtattatacccacacccacccaagaacagggtttgttaagatggcagagcccggtaatcgcataaaacttaaaactttacagtcagaggttcaattcctcttcttaacaacatacccatggccaacctcctactcctcattgtacccattctaatcgcaatggcattcctaatgcttaccgaacgaaaaattctaggctatatacaactacgcaaaggccccaacgttgtaggcccctacgggctactacaacccttcgctgacgccataaaactcttcaccaaagagcccctaaaacccgccacatctaccatcaccctctacatcaccgccccgaccttagctctcaccatcgctcttctactatgaacccccctccccatacccaaccccctggtcaacctcaacctaggcctcctatttattctagccacctctagcctagccgtttactcaatcctctgatcagggtgagcatcaaactcaaactacgccctgatcggcgcactgcgagcagtagcccaaacaatctcatatgaagtcaccctagccatcattctactatcaacattactaataagtggctcctttaacctctccacccttatcacaacacaagaacacctctgattactcctgccatcatgacccttggccataatatgatttatctccacactagcagagaccaaccgaacccccttcgaccttgccgaaggggagtccgaactagtctcaggcttcaacatcgaatacgccgcaggccccttcgccctattcttcatagccgaatacacaaacattattataataaacaccctcaccactacaatcttcctaggaacaacatatgacgcactctcccctgaactctacacaacatattttgtcaccaagaccctacttctaacctccctgttcttatgaattcgaacagcatacccccgattccgctacgaccaactcatacacctcctatgaaaaaacttcctaccactcaccctagcattacttatatgatatgtctccatacccattacaatctccagcattccccctcaaacctaagaaatatgtctgataaaagagttactttgatagagtaaataataggagcttaaacccccttatttctaggactatgagaatcgaacccatccctgagaatccaaaattctccgtgccacctatcacaccccatcctaaagtaaggtcagctaaataagctatcgggcccataccccgaaaatgttggttatacccttcccgtactaattaatcccctggcccaacccgtcatctactctaccatctttgcaggcacactcatcacagcgctaagctcgcactgattttttacctgagtaggcctagaaataaacatgctagcttttattccagttctaaccaaaaaaataaaccctcgttccacagaagctgccatcaagtatttcctcacgcaagcaaccgcatccataatccttctaatagctatcctcttcaacaatatactctccggacaatgaaccataaccaatactaccaatcaatactcatcattaataatcataatggctatagcaataaaactaggaatagccccctttcacttctgagtcccagaggttacccaaggcacccctctgacatccggcctgcttcttctcacatgacaaaaactagcccccatctcaatcatataccaaatctctccctcactaaacgtaagccttctcctcactctctcaatcttatccatcatagcaggcagttgaggtggattaaaccaaacccagctacgcaaaatcttagcatactcctcaattacccacataggatgaataatagcagttctaccgtacaaccctaacataaccattcttaatttaactatttatattatcctaactactaccgcattcctactactcaacttaaactccagcaccacgaccctactactatctcgcacctgaaacaagctaacatgactaacacccttaattccatccaccctcctctccctaggaggcctgcccccgctaaccggctttttgcccaaatgggccattatcgaagaattcacaaaaaacaatagcctcatcatccccaccatcatagccaccatcaccctccttaacctctacttctacctacgcctaatctactccacctcaatcacactactccccatatctaacaacgtaaaaataaaatgacagtttgaacatacaaaacccaccccattcctccccacactcatcgcccttaccacgctactcctacctatctccccttttatactaataatcttatagaaatttaggttaaatacagaccaagagccttcaaagccctcagtaagttgcaatacttaatttctgtaacagctaaggactgcaaaaccccactctgcatcaactgaacgcaaatcagccactttaattaagctaagcccttactagaccaatgggacttaaacccacaaacacttagttaacagctaagcaccctaatcaactggcttcaatctacttctcccgccgccgggaaaaaaggcgggagaagccccggcaggtttgaagctgcttcttcgaatttgcaattcaatatgaaaatcacctcggagctggtaaaaagaggcctaacccctgtctttagatttacagtccaatgcttcactcagccattttacctcacccccactgatgttcgccgaccgttgactattctctacaaaccacaaagacattggaacactatacctattattcggcgcatgagctggagtcctaggcacagctctaagcctccttattcgagccgagctgggccagccaggcaaccttctaggtaacgaccacatctacaacgttatcgtcacagcccatgcatttgtaataatcttcttcatagtaatacccatcataatcggaggctttggcaactgactagttcccctaataatcggtgcccccgatatggcgtttccccgcataaacaacataagcttctgactcttacctccctctctcctactcctgctcgcatctgctatagtggaggccggagcaggaacaggttgaacagtctaccctcccttagcagggaactactcccaccctggagcctccgtagacctaaccatcttctccttacacctagcaggtgtctcctctatcttaggggccatcaatttcatcacaacaattatcaatataaaaccccctgccataacccaataccaaacgcccctcttcgtctgatccgtcctaatcacagcagtcctacttctcctatctctcccagtcctagctgctggcatcactatactactaacagaccgcaacctcaacaccaccttcttcgaccccgccggaggaggagaccccattctataccaacacctattctgatttttcggtcaccctgaagtttatattcttatcctaccaggcttcggaataatctcccatattgtaacttactactccggaaaaaaagaaccatttggatacataggtatggtctgagctatgatatcaattggcttcctagggtttatcgtgtgagcacaccacatatttacagtaggaatagacgtagacacacgagcatatttcacctccgctaccataatcatcgctatccccaccggcgtcaaagtatttagctgactcgccacactccacggaagcaatatgaaatgatctgctgcagtgctctgagccctaggattcatctttcttttcaccgtaggtggcctgactggcattgtattagcaaactcatcactagacatcgtactacacgacacgtactacgttgtagcccacttccactatgtcctatcaataggagctgtatttgccatcataggaggcttcattcactgatttcccctattctcaggctacaccctagaccaaacctacgccaaaatccatttcactatcatattcatcggcgtaaatctaactttcttcccacaacactttctcggcctatccggaatgccccgacgttactcggactaccccgatgcatacaccacatgaaacatcctatcatctgtaggctcattcatttctctaacagcagtaatattaataattttcatgatttgagaagccttcgcttcgaagcgaaaagtcctaatagtagaagaaccctccataaacctggagtgactatatggatgccccccaccctaccacacattcgaagaacccgtatacataaaatctagacaaaaaaggaaggaatcgaaccccccaaagctggtttcaagccaaccccatggcctccatgactttttcaaaaaggtattagaaaaaccatttcataactttgtcaaagttaaattataggctaaatcctatatatcttaatggcacatgcagcgcaagtaggtctacaagacgctacttcccctatcatagaagagcttatcacctttcatgatcacgccctcataatcattttccttatctgcttcctagtcctgtatgcccttttcctaacactcacaacaaaactaactaatactaacatctcagacgctcaggaaatagaaaccgtctgaactatcctgcccgccatcatcctagtcctcatcgccctcccatccctacgcatcctttacataacagacgaggtcaacgatccctcccttaccatcaaatcaattggccaccaatggtactgaacctacgagtacaccgactacggcggactaatcttcaactcctacatacttcccccattattcctagaaccaggcgacctgcgactccttgacgttgacaatcgagtagtactcccgattgaagcccccattcgtataataattacatcacaagacgtcttgcactcatgagctgtccccacattaggcttaaaaacagatgcaattcccggacgtctaaaccaaaccactttcaccgctacacgaccgggggtatactacggtcaatgctctgaaatctgtggagcaaaccacagtttcatgcccatcgtcctagaattaattcccctaaaaatctttgaaatagggcccgtatttaccctatagcaccccctctaccccctctagagcccactgtaaagctaacttagcattaaccttttaagttaaagattaagagaaccaacacctctttacagtgaaatgccccaactaaatactaccgtatggcccaccataattacccccatactccttacactattcctcatcacccaactaaaaatattaaacacaaactaccacctacctccctcaccaaagcccataaaaataaaaaattataacaaaccctgagaaccaaaatgaacgaaaatctgttcgcttcattcattgcccccacaatcctaggcctacccgccgcagtactgatcattctatttccccctctattgatccccacctccaaatatctcatcaacaaccgactaatcaccacccaacaatgactaatcaaactaacctcaaaacaaatgataaccatacacaacactaaaggacgaacctgatctcttatactagtatccttaatcatttttattgccacaactaacctcctcggactcctgcctcactcatttacaccaaccacccaactatctataaacctagccatggccatccccttatgagcgggcgcagtgattataggctttcgctctaagattaaaaatgccctagcccacttcttaccacaaggcacacctacaccccttatccccatactagttattatcgaaaccatcagcctactcattcaaccaatagccctggccgtacgcctaaccgctaacattactgcaggccacctactcatgcacctaattggaagcgccaccctagcaatatcaaccattaaccttccctctacacttatcatcttcacaattctaattctactgactatcctagaaatcgctgtcgccttaatccaagcctacgttttcacacttctagtaagcctctacctgcacgacaacacataatgacccaccaatcacatgcctatcatatagtaaaacccagcccatgacccctaacaggggccctctcagccctcctaatgacctccggcctagccatgtgatttcacttccactccataacgctcctcatactaggcctactaaccaacacactaaccatataccaatgatggcgcgatgtaacacgagaaagcacataccaaggccaccacacaccacctgtccaaaaaggccttcgatacgggataatcctatttattacctcagaagtttttttcttcgcaggatttttctgagccttttaccactccagcctagcccctaccccccaattaggagggcactggcccccaacaggcatcaccccgctaaatcccctagaagtcccactcctaaacacatccgtattactcgcatcaggagtatcaatcacctgagctcaccatagtctaatagaaaacaaccgaaaccaaataattcaagcattgcttattacaattttactgggtctctattttaccctcctacaagcctcagagtacttcgagtctcccttcaccatttccgacggcatctacggctcaacattttttgtagccacaggcttccacggacttcacgtcattattggctcaactttcctcactatctgcttcatccgccaactaatatttcactttacatccaaacatcactttggcttcgaagccgccgcctgatactggcattttgtagatgtggtttgactatttctgtatgtctccatctattgatgagggtcttactcttttagtataaatagtaccgttaacttccaattaactagttttgacaacattcaaaaaagagtaataaacttcgccttaattttaataatcaacaccctcctagccttactactaataattattacattttgactaccacaactcaacggctacatagaaaaatccaccccttacgagtgcggcttcgaccctatatcccccgcccgcgtccctttctccataaaattcttcttagtagctattaccttcttattatttgatctagaaattgccctccttttacccctaccatgagccctacaaacaactaacctgccactaatagttatgtcatccctcttattaatcatcatcctagccctaagtctggcctatgagtgactacaaaaaggattagactgaaccgaattggtatatagtttaaacaaaacgaatgatttcgactcattaaattatgataatcatatttaccaaatgcccctcatttacataaatattatactagcatttaccatctcacttctaggaatactagtatatcgctcacacctcatatcctccctactatgcctagaaggaataatactatcgctgttcattatagctactctcataaccctcaacacccactccctcttagccaatattgtgcctattgccatactagtctttgccgcctgcgaagcagcggtgggcctagccctactagtctcaatctccaacacatatggcctagactacgtacataacctaaacctactccaatgctaaaactaatcgtcccaacaattatattactaccactgacatgactttccaaaaaacacataatttgaatcaacacaaccacccacagcctaattattagcatcatccctctactattttttaaccaaatcaacaacaacctatttagctgttccccaaccttttcctccgaccccctaacaacccccctcctaatactaactacctgactcctacccctcacaatcatggcaagccaacgccacttatccagtgaaccactatcacgaaaaaaactctacctctctatactaatctccctacaaatctccttaattataacattcacagccacagaactaatcatattttatatcttcttcgaaaccacacttatccccaccttggctatcatcacccgatgaggcaaccagccagaacgcctgaacgcaggcacatacttcctattctacaccctagtaggctcccttcccctactcatcgcactaatttacactcacaacaccctaggctcactaaacattctactactcactctcactgcccaagaactatcaaactcctgagccaacaacttaatatgactagcttacacaatagcttttatagtaaagatacctctttacggactccacttatgactccctaaagcccatgtcgaagcccccatcgctgggtcaatagtacttgccgcagtactcttaaaactaggcggctatggtataatacgcctcacactcattctcaaccccctgacaaaacacatagcctaccccttccttgtactatccctatgaggcataattataacaagctccatctgcctacgacaaacagacctaaaatcgctcattgcatactcttcaatcagccacatagccctcgtagtaacagccattctcatccaaaccccctgaagcttcaccggcgcagtcattctcataatcgcccacgggcttacatcctcattactattctgcctagcaaactcaaactacgaacgcactcacagtcgcatcataatcctctctcaaggacttcaaactctactcccactaatagctttttgatgacttctagcaagcctcgctaacctcgccttaccccccactattaacctactgggagaactctctgtgctagtaaccacgttctcctgatcaaatatcactctcctacttacaggactcaacatactagtcacagccctatactccctctacatatttaccacaacacaatggggctcactcacccaccacattaacaacataaaaccctcattcacacgagaaaacaccctcatgttcatacacctatcccccattctcctcctatccctcaaccccgacatcattaccgggttttcctcttgtaaatatagtttaaccaaaacatcagattgtgaatctgacaacagaggcttacgaccccttatttaccgagaaagctcacaagaactgctaactcatgcccccatgtctaacaacatggctttctcaacttttaaaggataacagctatccattggtcttaggccccaaaaattttggtgcaactccaaataaaagtaataaccatgcacactactataaccaccctaaccctgacttccctaattccccccatccttaccaccctcgttaaccctaacaaaaaaaactcatacccccattatgtaaaatccattgtcgcatccacctttattatcagtctcttccccacaacaatattcatgtgcctagaccaagaagttattatctcgaactgacactgagccacaacccaaacaacccagctctccctaagcttcaaactagactacttctccataatattcatccctgtagcattgttcgttacatggtccatcatagaattctcactgtgatatataaactcagacccaaacattaatcagttcttcaaatatctactcatcttcctaattaccatactaatcttagttaccgctaacaacctattccaactgttcatcggctgagagggcgtaggaattatatccttcttgctcatcagttgatgatacgcccgagcagatgccaacacagcagccattcaagcaatcctatacaaccgtatcggcgatatcggtttcatcctcgccttagcatgatttatcctacactccaactcatgagacccacaacaaatagcccttctaaacgctaatccaagcctcaccccactactaggcctcctcctagcagcagcaggcaaatcagcccaattaggtctccacccctgactcccctcagccatagaaggccccaccccagtctcagccctactccactcaagcactatagttgtagcaggaatcttcttactcatccgcttccaccccctagcagaaaatagcccactaatccaaactctaacactatgcttaggcgctatcaccactctgttcgcagcagtctgcgcccttacacaaaatgacatcaaaaaaatcgtagccttctccacttcaagtcaactaggactcataatagttacaatcggcatcaaccaaccacacctagcattcctgcacatctgtacccacgccttcttcaaagccatactatttatgtgctccgggtccatcatccacaaccttaacaatgaacaagatattcgaaaaataggaggactactcaaaaccatacctctcacttcaacctccctcaccattggcagcctagcattagcaggaatacctttcctcacaggtttctactccaaagaccacatcatcgaaaccgcaaacatatcatacacaaacgcctgagccctatctattactctcatcgctacctccctgacaagcgcctatagcactcgaataattcttctcaccctaacaggtcaacctcgcttccccacccttactaacattaacgaaaataaccccaccctactaaaccccattaaacgcctggcagccggaagcctattcgcaggatttctcattactaacaacatttcccccgcatcccccttccaaacaacaatccccctctacctaaaactcacagccctcgctgtcactttcctaggacttctaacagccctagacctcaactacctaaccaacaaacttaaaataaaatccccactatgcacattttatttctccaacatactcggattctaccctagcatcacacaccgcacaatcccctatctaggccttcttacgagccaaaacctgcccctactcctcctagacctaacctgactagaaaagctattacctaaaacaatttcacagcaccaaatctccacctccatcatcacctcaacccaaaaaggcataattaaactttacttcctctctttcttcttcccactcatcctaaccctactcctaatcacataacctattcccccgagcaatctcaattacaatatatacaccaacaaacaatgttcaaccagtaactactactaatcaacgcccataatcatacaaagcccccgcaccaataggatcctcccgaatcaaccctgacccctctccttcataaattattcagcttcctacactattaaagtttaccacaaccaccaccccatcatactctttcacccacagcaccaatcctacctccatcgctaaccccactaaaacactcaccaagacctcaacccctgacccccatgcctcaggatactcctcaatagccatcgctgtagtatatccaaagacaaccatcattccccctaaataaattaaaaaaactattaaacccatataacctcccccaaaattcagaataataacacacccgaccacaccgctaacaatcaatactaaacccccataaataggagaaggcttagaagaaaaccccacaaaccccattactaaacccacactcaacagaaacaaagcatacatcattattctcgcacggactacaaccacgaccaatgatatgaaaaaccatcgttgtatttcaactacaagaacaccaatgaccccaatacgcaaaactaaccccctaataaaattaattaaccactcattcatcgacctccccaccccatccaacatctccgcatgatgaaacttcggctcactccttggcgcctgcctgatcctccaaatcaccacaggactattcctagccatgcactactcaccagacgcctcaaccgccttttcatcaatcgcccacatcactcgagacgtaaattatggctgaatcatccgctaccttcacgccaatggcgcctcaatattctttatctgcctcttcctacacatcgggcgaggcctatattacggatcatttctctactcagaaacctgaaacatcggcattatcctcctgcttgcaactatagcaacagccttcataggctatgtcctcccgtgaggccaaatatcattctgaggggccacagtaattacaaacttactatccgccatcccatacattgggacagacctagttcaatgaatctgaggaggctactcagtagacagtcccaccctcacacgattctttacctttcacttcatcttgcccttcattattgcagccctagcagcactccacctcctattcttgcacgaaacgggatcaaacaaccccctaggaatcacctcccattccgataaaatcaccttccacccttactacacaatcaaagacgccctcggcttacttctcttccttctctccttaatgacattaacactattctcaccagacctcctaggcgacccagacaattataccctagccaaccccttaaacacccctccccacatcaagcccgaatgatatttcctattcgcctacacaattctccgatccgtccctaacaaactaggaggcgtccttgccctattactatccatcctcatcctagcaataatccccatcctccatatatccaaacaacaaagcataatatttcgcccactaagccaatcactttattgactcctagccgcagacctcctcattctaacctgaatcggaggacaaccagtaagctacccttttaccatcattggacaagtagcatccgtactatacttcacaacaatcctaatcctaataccaactatctccctaattgaaaacaaaatactcaaatgggcctgtccttgtagtataaactaatacaccagtcttgtaaaccggagatgaaaacctttttccaaggacaaatcagagaaaaagtctttaactccaccattagcacccaaagctaagattctaatttaaactattctctgttctttcatggggaagcagatttgggtaccacccaagtattgactcacccatcaacaaccgctatgtatttcgtacattactgccagccaccatgaatattgtacggtaccataaatacttgaccacctgtagtacataaaaacccaatccacatcaaaaccccctccccatgcttacaagcaagtacagcaatcaaccctcaactatcacacatcaactgcaactccaaagccacccctcacccactaggataccaacaaacctacccacccttaacagtacatagtacataaagccatttaccgtacatagcacattacagtcaaatcccttctcgtccccatggatgacccccctcagataggggtcccttgaccaccatcctccgtgaaatcaatatcccgcacaagagtgctactctcctcgctccgggcccataacacttgggggtagctaaagtgaactgtatccgacatctggttcctacttcagggccataaagcctaaatagcccacacgttccccttaaataagacatcacgatg

SEQ ID NO: 19 - DNA, 16570 bp, Homo sapiens mitochondrial
  3108: "n" refers to a nucleotide at position 3107 of the Cambridge Reference Sequence (CRS, Anderson et al. 1981 Nature 290:457-465), later determined to be absent from the human mtDNA sequence according to the revised CRS (rCRS, Andrews et al. 1999 Nature Genetics 23:147); "n" therefore represents a single nucleotide deletion at a position corresponding to nucleotide 3107 of SEQ ID NO:1 as provided herein.
gatcacaggtctatcaccctattaaccactcacgggagctctccatgcatttggtattttcgtctggggggcatgcacgcgatagcattgcgagacgctggagccggagcaccctatgtcgcagtatctgtctttgattcctgcctcatcctattatttatcgcacctacgttcaatattacaggcgaacatacttactaaagtgtgttaattaattaatgcttgtaggacataataataacaattgaatgtctgcacagccgctttccacacagacatcataacaaaaaatttccaccaaaccccccctcccccgccttctggccacagcacttaaacacatctctgccaaaccccaaaaacaaagaaccctaacaccagcctaaccagatttcaaattttatcttttggcggtatgcacttttaacagtcaccccccaactaacacattattttcccctcccactcccatactactaatctcatcaatacaacccccgcccatcctacccagcacacacacaccgctgctaaccccataccccgaaccaaccaaaccccaaagacaccccccacagtttatgtagcttacctcctcaaagcaatacactgaaaatgtttagacgggctcacatcaccccataaacaaataggtttggtcctagcctttctattagctcttagtaagattacacatgcaagcatccccgttccagtgagttcaccctctaaatcaccacgatcaaaagggacaagcatcaagcacgcagcaatgcagctcaaaacgcttagcctagccacacccccacgggaaacagcagtgattaacctttagcaataaacgaaagtttaactaagctatactaaccccagggttggtcaatttcgtgccagccaccgcggtcacacgattaacccaagtcaatagaagccggcgtaaagagtgttttagatcaccccctccccaataaagctaaaactcacctgagttgtaaaaaactccagttgacacaaaatagactacgaaagtggctttaacatatctgaacacacaatagctaagacccaaactgggattagataccccactatgcttagccctaaacctcaacagttaaatcaacaaaactgctcgccagaacactacgagccacagcttaaaactcaaaggacctggcggtgcttcatatccctctagaggagcctgttctgtaatcgataaaccccgatcaacctcaccacctcttgctcagcctatataccgccatcttcagcaaaccctgatgaaggctacaaagtaagcgcaagtacccacgtaaagacgttaggtcaaggtgtagcccatgaggtggcaagaaatgggctacattttctaccccagaaaactacgatagcccttatgaaacttaagggtcgaaggtggatttagcagtaaactgagagtagagtgcttagttgaacagggccctgaagcgcgtacacaccgcccgtcaccctcctcaagtatacttcaaaggacatttaactaaaacccctacgcatttatatagaggagacaagtcgtaacatggtaagtgtactggaaagtgcacttggacgaaccagagtgtagcttaacacaaagcacccaacttacacttaggagatttcaacttaacttgaccgctctgagctaaacctagccccaaacccactccaccttactaccagacaaccttagccaaaccatttacccaaataaagtataggcgatagaaattgaaacctggcgcaatagatatagtaccgcaagggaaagatgaaaaattataaccaagcataatatagcaaggactaacccctataccttctgcataatgaattaactagaaataactttgcaaggagagccaaagctaagacccccgaaaccagacgagctacctaagaacagctaaaagagcacacccgtctatgtagcaaaatagtgggaagatttataggtagaggcgacaaacctaccgagcctggtgatagctggttgtccaagatagaatcttagttcaactttaaatttgcccacagaaccctctaaatccccttgtaaatttaactgttagtccaaagaggaacagctctttggacactaggaaaaaaccttgtagagagagtaaaaaatttaacacccatagtaggcctaaaagcagccaccaattaagaaagcgttcaagctcaacacccactacctaaaaaatcccaaacatataactgaactcctcacacccaattggaccaatctatcaccctatagaagaactaatgttagtataagtaacatgaaaacattctcctccgcataagcctgcgtcagattaaaacactgaactgacaattaacagcccaatatctacaatcaaccaacaagtcattattaccctcactgtcaacccaacacaggcatgctcataaggaaaggttaaaaaaagtaaaaggaactcggcaaatcttaccccgcctgtttaccaaaaacatcacctctagcatcaccagtattagaggcaccgcctgcccagtgacacatgtttaacggccgcggtaccctaaccgtgcaaaggtagcataatcacttgttccttaaatagggacctgtatgaatggctccacgagggttcagctgtctcttacttttaaccagtgaaattgacctgcccgtgaagaggcgggcatgacacagcaagacgagaagaccctatggagctttaatttattaatgcaaacagtacctaacaaacccacaggtcctaaactaccaaacctgcattaaaaatttcggttggggcgacctcggagcagaacccaacctccgagcagtacatgctaagacttcaccagtcaaagcgaactactatactcaattgatccaataacttgaccaacggaacaagttaccctagggataacagcgcaatcctattctagagtccatatcaacaatagggtttacgacctcgatgttggatcaggacatcccgatggtgcagccgctattaaaggttcgtttgttcaacgattaaagtcctacgtgatctgagttcagaccggagtaatccaggtcggtttctatctgcnttcaaattcctccctgtacgaaaggacaagagaaataaggcctacttcacaaagcgccttcccccgtaaatgatatcatctcaacttagtattatacccacacccacccaagaacagggtttgttaagatggcagagcccggtaatcgcataaaacttaaaactttacagtcagaggttcaattcctcttcttaacaacatacccatggccaacctcctactcctcattgtacccattctaatcgcaatggcattcctaatgcttaccgaacgaaaaattctaggctatatacaactacgcaaaggccccaacgttgtaggcccctacgggctactacaacccttcgctgacgccataaaactcctcaccaaagagcccctaaaacccgccacatctaccatcaccctctacatcaccgccccgaccttagctctcaccatcgctcttctactatgaacccccctccccatacccaaccccctggtcaacctcaacctaggcctcctatttattctagccacctctagcctagccgtttactcaatcctctgatcagggtgagcatcaaactcaaactacgccctgatcggcgcactgcgagcagtagcccaaacaatctcatatgaagtcaccctagccatcattctactatcaacattactaataagtggctcctttaacctctccacccttatcacaacacaagaacacctctgattactcctgccatcatgacccttggccataatatgatttatctccacactagcagagaccaaccgaacccccttcgaccttgccgaaggggagtccgaactagtctcaggcttcaacatcgaatacgccgcaggccccttcgccctattcttcatagccgaatacacaaacattattataataaacaccctcaccactacaatcttcctaggaacaacatatgacgcactctcccctgaactctacacaacatattttgtcaccaagaccctacttctaacctccctgttcttatgaattcgaacagcatacccccgattccgctacgaccaactcatacacctcctatgaaaaaacttcctaccactcaccctagcattacttatatgatatgtctccatacccattacaatctccagcattccccctcaaacctaagaaatatgtctgataaaagagttactttgatagagtaaataataggagcttaaacccccttatttctaggactatgagaatcgaacccatccctgagaatccaaaattctccgtgccacctatcacaccccatcctaaagtaaggtcagctaaataagctatcgggcccataccccgaaaatgttggttatacccttcccgtactaattaatcccctggcccaacccgtcatctactctaccatctttgcaggcacactcatcacagcgctaagctcgcactgattttttacctgagtaggcctagaaataaacatactagcttttattccagttctaaccaaaaaaataaaccctcgttccacagaagctgccatcaagtatttcctcacgcaagcaaccgcatccataatccttctaatagctatcctcttcaacaatatactctccggacaatgaaccataaccaatactaccaatcaatactcatcattaataatcataatggctatagcaataaaactaggaatagccccctttcacttctgagtcccagaggttacccaaggcacccctctgacatccggcctgcttcttctcacatgacaaaaactagcccccatctcaatcatataccaaatctctccctcactaaacgtaagccttctcctcactctctcaatcttatccatcatagcaggcagttgaggtggattaaaccaaacccagctacgcaaaatcttagcatactcctcaattacccacataggatgaataatagcagttctaccgtacaaccctaacataaccattcttaatttaactatttatattatcctaactactaccgcattcctactactcaacttaaactccagcaccacgaccctactactatctcgcacctgaaacaagctaacatgactaacacccttaattccatccaccctcctctccctaggaggcctgcccccgctaaccggctttttgcccaaatgggccattatcgaagaattcacaaaaaacaatagcctcatcatccccaccatcatagccaccatcaccctccttaacctctacttctacctacgcctaatctactccacctcaatcacactactccccatatctaacaacgtaaaaataaaatgacagtttgaacatacaaaacccaccccattcctccccacactcatcgcccttaccacgctactcctacctatctccccttttatactaataatcttatagaaatttaggttaaatacagaccaagagccttcaaagccctcagtaagttgcaatacttaatttctgtaacagctaaggactgcaaaaccccactctgcatcaactgaacgcaaatcagccactttaattaagctaagcccttactagaccaatgggacttaaacccacaaacacttagttaacagctaagcaccctaatcaactggcttcaatctacttctcccgccgccgggaaaaaaggcgggagaagccccggcaggtttgaagctgcttcttcgaatttgcaattcaatatgaaaatcacctcggagctggtaaaaagaggcctaacccctgtctttagatttacagtccaatgcttcactcagccattttacctcacccccactgatgttcgccgaccgttgactattctctacaaaccacaaagacattggaacactatacctattattcggcgcatgagctggagtcctaggcacagctctaagcctccttattcgagccgagctgggccagccaggcaaccttctaggtaacgaccacatctacaacgttatcgtcacagcccatgcatttgtaataatcttcttcatagtaatacccatcataatcggaggctttggcaactgactagttcccctaataatcggtgcccccgatatggcgtttccccgcataaacaacataagcttctgactcttacctccctctctcctactcctgctcgcatctgctatagtggaggccggagcaggaacaggttgaacagtctaccctcccttagcagggaactactcccaccctggagcctccgtagacctaaccatcttctccttacacctagcaggtgtctcctctatcttaggggccatcaatttcatcacaacaattatcaatataaaaccccctgccataacccaataccaaacgcccctcttcgtctgatccgtcctaatcacagcagtcctacttctcctatctctcccagtcctagctgctggcatcactatactactaacagaccgcaacctcaacaccaccttcttcgaccccgccggaggaggagaccccattctataccaacacctattctgatttttcggtcaccctgaagtttatattcttatcctaccaggcttcggaataatctcccatattgtaacttactactccggaaaaaaagaaccatttggatacataggtatggtctgagctatgatatcaattggcttcctagggtttatcgtgtgagcacaccatatatttacagtaggaatagacgtagacacacgagcatatttcacctccgctaccataatcatcgctatccccaccggcgtcaaagtatttagctgactcgccacactccacggaagcaatatgaaatgatctgctgcagtgctctgagccctaggattcatctttcttttcaccgtaggtggcctgactggcattgtattagcaaactcatcactagacatcgtactacacgacacgtactacgttgtagctcacttccactatgtcctatcaataggagctgtatttgccatcataggaggcttcattcactgatttcccctattctcaggctacaccctagaccaaacctacgccaaaatccatttcactatcatattcatcggcgtaaatctaactttcttcccacaacactttctcggcctatccggaatgccccgacgttactcggactaccccgatgcatacaccacatgaaacatcctatcatctgtaggctcattcatttctctaacagcagtaatattaataattttcatgatttgagaagccttcgcttcgaagcgaaaagtcctaatagtagaagaaccctccataaacctggagtgactatatggatgccccccaccctaccacacattcgaagaacccgtatacataaaatctagacaaaaaaggaaggaatcgaaccccccaaagctggtttcaagccaaccccatggcctccatgactttttcaaaaaggtattagaaaaaccatttcataactttgtcaaagttaaattataggctaaatcctatatatcttaatggcacatgcagcgcaagtaggtctacaagacgctacttcccctatcatagaagagcttatcacctttcatgatcacgccctcataatcattttccttatctgcttcctagtcctgtatgcccttttcctaacactcacaacaaaactaactaatactaacatctcagacgctcaggaaatagaaaccgtctgaactatcctgcccgccatcatcctagtcctcatcgccctcccatccctacgcatcctttacataacagacgaggtcaacgatccctcccttaccatcaaatcaattggccaccaatggtactgaacctacgagtacaccgactacggcggactaatcttcaactcctatatacttcccccattattcctagaaccaggcgacctgcgactccttgacgttgacaatcgagtagtactcccgattgaagcccccattcgtataataattacatcacaagacgtcttgcactcatgagctgtccccacattaggcttaaaaacagatgcaattcccggacgtctaaaccaaaccactttcaccgctacacgaccgggggtatactacggtcaatgctctgaaatctgtggagcaaaccacagtttcatgcccatcgtcctagaattaattcccctaaaaatctttgaaatagggcccgtatttaccctatagcaccccctctaccccctctagagcccactgtaaagctaacttagcattaaccttttaagttaaagattaagagaaccaacacctctttacagtgaaatgccccaactaaatactaccgtatggcccaccataattacccccatactccttacactattcctcatcacccaactaaaaatattaaacacaaactaccacctacctccctcaccaaagcccataaaaataaaaaattataacaaaccctgagaaccaaaatgaacgaaaatctgttcgcttcattcattgcccccacaatcctaggcctacccgccgcagtactgatcattctatttccccctctattgatccccacctccaaatatctcatcaacaaccgactaatcaccacccaacaatgactaatcaaactaacctcaaaacaaatgataaccatacacaacactaaaggacgaacctgatctcttatactagtatccttaatcatttttattgccacaactaacctcctcggactcctgcctcactcatttacaccaaccacccaactatctataaacctagccatggccatccccttatgagcgggcgcagtgattataggctttcgctctaagattaaaaatgccctagcccacttcttaccacaaggcacacctacaccccttatccccatactagttattatcgaaaccatcagcctactcattcaaccaatagccctggccgtacgcctaaccgctaacattactgcaggccacctactcatgcacctaattggaagcgccaccctagcaatatcaaccattaaccttccctctacacttatcatcttcacaattctaattctactgactatcctagaaatcgctgtcgccttaatccaagcctacgttttcacacttctagtaagcctctacctgcacgacaacacataatggcccaccaatcacatgcctatcatatagtaaaacccagcccatgacccctaacaggggccctctcagccctcctaatgacctccggcctagccatgtgatttcacttccactccataacgctcctcatactaggcctactaaccaacacactaaccatataccaatgatggcgcgatgtaacacgagaaagcacataccaaggccaccacacaccacctgtccaaaaaggccttcgatacgggataatcctatttattacctcagaagtttttttcttcgcaggatttttctgagccttttaccactccagcctagcccctaccccccaattaggagggcactggcccccaacaggcatcaccccgctaaatcccctagaagtcccactcctaaacacatccgtattactcgcatcaggagtatcaatcacctgagctcaccatagtctaatagaaaacaaccgaaaccaaataattcaagcactgcttattacaattttactgggtctctattttaccctcctacaagcctcagagtacttcgagtctcccttcaccatttccgacggcatctacggctcaacattttttgtagccacaggcttccacggacttcacgtcattattggctcaactttcctcactatctgcttcatccgccaactaatatttcactttacatccaaacatcactttggcttcgaagccgccgcctgatactggcattttgtagatgtggtttgactatttctgtatgtctccatctattgatgagggtcttactcttttagtataaatagtaccgttaacttccaattaactagttttgacaacattcaaaaaagagtaataaacttcgccttaattttaataatcaacaccctcctagccttactactaataattattacattttgactaccacaactcaacggctacatagaaaaatccaccccttacgagtgcggcttcgaccctatatcccccgcccgcgtccctttctccataaaattcttcttagtagctattaccttcttattatttgatctagaaattgccctccttttacccctaccatgagccctacaaacaactaacctgccactaatagttatgtcatccctcttattaatcatcatcctagccctaagtctggcctatgagtgactacaaaaaggattagactgaaccgaattggtatatagtttaaacaaaacgaatgatttcgactcattaaattatgataatcatatttaccaaatgcccctcatttacataaatattatactagcatttaccatctcacttctaggaatactagtatatcgctcacacctcatatcctccctactatgcctagaaggaataatactatcgctgttcattatagctactctcataaccctcaacacccactccctcttagccaatattgtgcctattgccatactagtctttgccgcctgcgaagcagcggtgggcctagccctactagtctcaatctccaacacatatggcctagactacgtacataacctaaacctactccaatgctaaaactaatcgtcccaacaattatattactaccactgacatgactttccaaaaaacacataatttgaatcaacacaaccacccacagcctaattattagcatcatccctctactattttttaaccaaatcaacaacaacctatttagctgttccccaaccttttcctccgaccccctaacaacccccctcctaatactaactacctgactcctacccctcacaatcatggcaagccaacgccacttatccagtgaaccactatcacgaaaaaaactctacctctctatactaatctccctacaaatctccttaattataacattcacagccacagaactaatcatattttatatcttcttcgaaaccacacttatccccaccttggctatcatcacccgatgaggcaaccagccagaacgcctgaacgcaggcacatacttcctattctacaccctagtaggctcccttcccctactcatcgcactaatttacactcacaacaccctaggctcactaaacattctactactcactctcactgcccaagaactatcaaactcctgagccaacaacttaatatgactagcttacacaatagcttttatagtaaagatacctctttacggactccacttatgactccctaaagcccatgtcgaagcccccatcgctgggtcaatagtacttgccgcagtactcttaaaactaggcggctatggtataatacgcctcacactcattctcaaccccctgacaaaacacatagcctaccccttccttgtactatccctatgaggcataattataacaagctccatctgcctacgacaaacagacctaaaatcgctcattgcatactcttcaatcagccacatagccctcgtagtaacagccattctcatccaaaccccctgaagcttcaccggcgcagtcattctcataatcgcccacgggcttacatcctcattactattctgcctagcaaactcaaactacgaacgcactcacagtcgcatcataatcctctctcaaggacttcaaactctactcccactaatagctttttgatgacttctagcaagcctcgctaacctcgccttaccccccactattaacctactgggagaactctctgtgctagtaaccacgttctcctgatcaaatatcactctcctacttacaggactcaacatactagtcacagccctatactccctctacatatttaccacaacacaatggggctcactcacccaccacattaacaacataaaaccctcattcacacgagaaaacaccctcatgttcatacacctatcccccattctcctcctatccctcaaccccgacatcattaccgggttttcctcttgtaaatatagtttaaccaaaacatcagattgtgaatctgacaacagaggcttacgaccccttatttaccgagaaagctcacaagaactgctaactcatgcccccatgtctaacaacatggctttctcaacttttaaaggataacagctatccattggtcttaggccccaaaaattttggtgcaactccaaataaaagtaataaccatgcacactactataaccaccctaaccctgacttccctaattccccccatccttaccaccctcgttaaccctaacaaaaaaaactcatacccccattatgtaaaatccattgtcgcatccacctttattatcagtctcttccccacaacaatattcatgtgcctagaccaagaagttattatctcgaactgacactgagccacaacccaaacaacccagctctccctaagcttcaaactagactacttctccataatattcatccctgtagcattgttcgttacatggtccatcatagaattctcactgtgatatataaactcagacccaaacattaatcagttcttcaaatatctactcatcttcctaattaccatactaatcttagttaccgctaacaacctattccaactgttcatcggctgagagggcgtaggaattatatccttcttgctcatcagttgatgatacgcccgagcagatgccaacacagcagccattcaagcaatcctatacaaccgtatcggcgatatcggtttcatcctcgccttagcatgatttatcctacactccaactcatgagacccacaacaaatagcccttctaaacgctaatccaagcctcaccccactactaggcctcctcctagcagcagcaggcaaatcagcccaattaggtctccacccctgactcccctcagccatagaaggccccaccccagtctcagccctactccactcaagcactatagttgtagcaggagtcttcttactcatccgcttccaccccctagcagaaaatagcccactaatccaaactctaacactatgcttaggcgctatcaccactctgttcgcagcagtctgcgcccttacacaaaatgacatcaaaaaaatcgtagccttctccacttcaagtcaactaggactcataatagttacaatcggcatcaaccaaccacacctagcattcctgcacatctgtacccacgccttcttcaaagccatactatttatgtgctccgggtccatcatccacaaccttaacaatgaacaagatattcgaaaaataggaggactactcaaaaccatacctctcacttcaacctccctcaccattggcagcctagcattagcaggaatacctttcctcacaggtttctactccaaagaccacatcatcgaaaccgcaaacatatcatacacaaacgcctgagccctatctattactctcatcgctacctccctgacaagcgcctatagcactcgaataattcttctcaccctaacaggtcaacctcgcttccccacccttactaacattaacgaaaataaccccaccctactaaaccccattaaacgcctggcagccggaagcctattcgcaggatttctcattactaacaacatttcccccgcatcccccttccaaacaacaatccccctctacctaaaactcacagccctcgctgtcactttcctaggacttctaacagccctagacctcaactacctaaccaacaaacttaaaataaaatccccactatgcacattttatttctccaacatactcggattctaccctagcatcacacaccgcacaatcccctatctaggccttcttacgagccaaaacctgcccctactcctcctagacctaacctgactagaaaagctattacctaaaacaatttcacagcaccaaatctccacctccatcatcacctcaacccaaaaaggcataattaaactttacttcctctctttcttcttcccactcatcctaaccctactcctaatcacataacctattcccccgagcaatctcaattacaatatatacaccaacaaacaatgttcaaccagtaactactactaatcaacgcccataatcatacaaagcccccgcaccaataggatcctcccgaatcaaccctgacccctctccttcataaattattcagcttcctacactattaaagtttaccacaaccaccaccccatcatactctttcacccacagcaccaatcctacctccatcgctaaccccactaaaacactcaccaagacctcaacccctgacccccatgcctcaggatactcctcaatagccatcgctgtagtatatccaaagacaaccatcattccccctaaataaattaaaaaaactattaaacccatataacctcccccaaaattcagaataataacacacccgaccacaccgctaacaatcaatactaaacccccataaataggagaaggcttagaagaaaaccccacaaaccccattactaaacccacactcaacagaaacaaagcatacatcattattctcgcacggactacaaccacgaccaatgatatgaaaaaccatcgttgtatttcaactacaagaacaccaatgaccccaatacgcaaaactaaccccctaataaaattaattaaccactcattcatcgacctccccaccccatccaacatctccgcatgatgaaacttcggctcactccttggcgcctgcctgatcctccaaatcaccacaggactattcctagccatgcactactcaccagacgcctcaaccgccttttcatcaatcgcccacatcactcgagacgtaaattatggctgaatcatccgctaccttcacgccaatggcgcctcaatattctttatctgcctcttcctacacatcgggcgaggcctatattacggatcatttctctactcagaaacctgaaacatcggcattatcctcctgcttgcaactatagcaacagccttcataggctatgtcctcccgtgaggccaaatatcattctgaggggccacagtaattacaaacttactatccgccatcccatacattgggacagacctagttcaatgaatctgaggaggctactcagtagacagtcccaccctcacacgattctttacctttcacttcatcttgcccttcattattgcagccctagcagcactccacctcctattcttgcacgaaacgggatcaaacaaccccctaggaatcacctcccattccgataaaatcaccttccacccttactacacaatcaaagacgccctcggcttacttctcttccttctctccttaatgacattaacactattctcaccagacctcctaggcgacccagacaattataccctagccaaccccttaaacacccctccccacatcaagcccgaatgatatttcctattcgcctacacaattctccgatccgtccctaacaaactaggaggcgtccttgccctattactatccatcctcatcctagcaataatccccatcctccatatatccaaacaacaaagcataatatttcgcccactaagccaatcactttattgactcctagccgcagacctcctcattctaacctgaatcggaggacaaccagtaagctacccttttaccatcattggacaagtagcatccgtactatacttcacaacaatcctaatcctaataccaactatctccctaattgaaaacaaaatactcaaatgggcctgtccttgtagtataaattaatacaccagtcttgtaaaccggagatgaaaacctttttccaaggacaaatcagagaaaaagtctttaactccaccattagcacccaaagctaagattctaatttaaactattctctgttctttcatggggaagcagatttgggtaccacccaagtattgactcacccatcaacaaccgctatgtatttcgtacattactgccagccaccatgaatattgtacggtaccataaatacttgaccacctgtagtacataaaaacccaatccacatcaaaaccccctccccatgcttacaagcaagtacagcaatcaaccctcaactatcacacatcaactggaactccaaagccacccctcacccactaggataccaacaaacctacccaccctcaacagtacatagcacataaagccatttaccgtacatagcacattacagtcaaatcccttctcgtccccatggatgacccccctcagataggggtcccttgaccaccatcctccgtgaaatcaatatcccgcacaagagtgctactctcctcgctccgggcccataacacttgggggtagctaaagtgaactgtatccgacatctggttcctacttcagggtcataaagcctaaatagcccacacgttccccttaaataagacatcacgatg

SEQ ID NO: 20 - DNA, 16571 bp, Homo sapiens mitochondrial
  3109: "n" refers to a nucleotide at position 3107 of the Cambridge Reference Sequence (CRS, Anderson et al. 1981 Nature 290:457-465), later determined to be absent from the human mtDNA sequence according to the revised CRS (rCRS, Andrews et al. 1999 Nature Genetics 23:147); "n" therefore represents a single nucleotide deletion at a position corresponding to nucleotide 3107 of SEQ ID NO:1 as provided herein.
gatcacaggtctatcaccctattaaccactcacgggagctctccatgcatttggtattttcgtctggggggtatgcacgcgatagcattgcgagacgctggagccggagcaccctatgtcgcagtatctgtctttgattcctgcctcattctattatttatcgcacctacgttcaatattacaggcgaacatacttactaaagtgtgttaattaattaatgcttgtaggacataataataacaattgaatgtctgcacagccgctttccacacagacatcataacaaaaaatttccaccaaaccccccctccctcccgcttctggccacagcacttaaacacatctctgccaaaccccaaaaacaaagaaccctaacaccagcctaaccagatttcaaattttatcttttggcggtatgcacttttaacagtcaccccccaactaacacattattttcccctcccactcccatactactaatctcatcaatacaacccccgcccatcctacccagcacacacacaccgctgctaaccccataccccgaaccaaccaaaccccaaagacaccccccacagtttatgtagcttacctcctcaaagcaatacactgaaaatgtttagacgggctcacatcaccccataaacaaataggtttggtcctagcctttctattagctcttagtaagattacacatgcaagcatccccgttccagtgagttcaccctctaaatcaccacgatcaaaaggaacaagcatcaagcacgcagcaatgcagctcaaaacgcttagcctagccacacccccacgggaaacagcagtgattaacctttagcaataaacgaaagtttaactaagctatactaaccccagggttggtcaatttcgtgccagccaccgcggtcacacgattaacccaagtcaatagaagccggcgtaaagagtgttttagatcaccccctccccaataaagctaaaactcacctgagttgtaaaaaactccagttgacacaaaatagactacgaaagtggctttaacatatctgaacacacaatagctaagacccaaactgggattagataccccactatgcttagccctaaacctcaacagttaaatcaacaaaactgctcgccagaacactacgagccacagcttaaaactcaaaggacctggcggtgcttcatatccctctagaggagcctgttctgtaatcgataaaccccgatcaacctcaccacctcttgctcagcctatataccgccatcttcagcaaaccctgatgaaggctacaaagtaagcgcaagtacccacgtaaagacgttaggtcaaggtgtagcccatgaggtggcaagaaatgggctacattttctaccccagaaaactacgatagcccttatgaaacttaagggtcgaaggtggatttagcagtaaactgagagtagagtgcttagttgaacagggccctgaagcgcgtacacaccgcccgtcaccctcctcaagtatacttcaaaggacatttaactaaaacccctacgcatttatatagaggagacaagtcgtaacatggtaagtgtactggaaagtgcacttggacgaaccagagtgtagcttaacacaaagcacccaacttacacttaggagatttcaacttaacttgaccgctctgagctaaacctagccccaaacccactccaccttactaccagacaaccttagccaaaccatttacccaaataaagtataggcgatagaaattgaaacctggcgcaatagatatagtaccgcaagggaaagatgaaaaattataaccaagcataatatagcaaggactaacccctataccttctgcataatgaattaactagaaataactttgcaaggagagccaaagctaagacccccgaaaccagacgagctacctaagaacagctaaaagagcacacccgtctatgtagcaaaatagtgggaagatttataggtagaggcgacaaacctaccgagcctggtgatagctggttgtccaagatagaatcttagttcaactttaaatttgcccacagaaccctctaaatccccttgtaaatttaactgttagtccaaagaggaacagctctttggacactaggaaaaaaccttgtagagagagtaaaaaatttaacacccatagtaggcctaaaagcagccaccaattaagaaagcgttcaagctcaacacccactacctaaaaaatcccaaacatataactgaactcctcacacccaattggaccaatctatcaccctatagaagaactaatgttagtataagtaacatgaaaacattctcctccgcataagcctgcgtcagattaaaacactgaactgacaattaacagcccaatatctacaatcaaccaacaagtcattattaccctcactgtcaacccaacacaggcatgctcataaggaaaggttaaaaaaagtaaaaggaactcggcaaatcttaccccgcctgtttaccaaaaacatcacctctagcatcaccagtattagaggcaccgcctgcccagtgacacatgtttaacggccgcggtaccctaaccgtgcaaaggtagcataatcacttgttccttaaatagggacctgtatgaatggctccacgagggttcagctgtctcttacttttaaccagtgaaattgacctgcccgtgaagaggcgggcataacacagcaagacgagaagaccctatggagctttaatttattaatgcaaacagtacctaacaaacccacaggtcctaaactaccaaacctgcattaaaaatttcggttggggcgacctcggagcagaacccaacctccgagcagtacatgctaagacttcaccagtcaaagcgaactactatactcaattgatccaataacttgaccaacggaacaagttaccctagggataacagcgcaatcctattctagagtccatatcaacaatagggtttacgacctcgatgttggatcaggacatcccgatggtgcagccgctattaaaggttcgtttgttcaacgattaaagtcctacgtgatctgagttcagaccggagtaatccaggtcggtttctatctacnttcaaattcctccctgtacgaaaggacaagagaaataaggcctacttcacaaagcgccttcccccgtaaatgatatcatctcaacttagtattatacccacacccacccaagaacagggtttgttaagatggcagagcccggtaatcgcataaaacttaaaactttacagtcagaggttcaattcctcttcttaacaacatacccatggccaacctcctactcctcattgtacccattctaatcgcaatggcattcctaatgcttaccgaacgaaaaattctaggctatatacaactacgcaaaggccccaacgttgtaggcccctacgggctactacaacccttcgctgacgccataaaactcttcaccaaagagcccctaaaacccgccacatctaccatcaccctctacatcaccgccccgaccttagctctcaccatcgctcttctactatgaacccccctccccatacccaaccccctggtcaacctcaacctaggcctcctatttattctagccacctctagcctagccgtttactcaatcctctgatcagggtgagcatcaaactcaaactacgccctgatcggcgcactgcgagcagtagcccaaacaatctcatatgaagtcaccctagccatcattctactatcaacattactaataagtggctcctttaacctctccacccttatcacaacacaagaacacctctgattactcctgccatcatgacccttggccataatatgatttatctccacactagcagagaccaaccgaacccccttcgaccttgccgaaggggagtccgaactagtctcaggcttcaacatcgaatacgccgcaggccccttcgccctattcttcatagccgaatacacaaacattattataataaacaccctcaccactacaatcttcctaggaacaacatatgacgcactctcccctgaactctacacaacatattttgtcaccaagaccctacttctaacctccctgttcttatgaattcgaacagcatacccccgattccgctacgaccaactcatacacctcctatgaaaaaacttcctaccactcaccctagcattacttatatgatatgtctccatacccattacaatctccagcattccccctcaaacctaagaaatatgtctgataaaagagttactttgatagagtaaataataggagcttaaacccccttatttctaggactatgagaatcgaacccatccctgagaatccaaaattctccgtgccacctatcacaccccatcctaaagtaaggtcagctaaataagctatcgggcccataccccgaaaatgttggttatacccttcccgtactaattaatcccctggcccaacccgtcatctactctaccatctttgcaggcacactcatcacagcgctaagctcgcactgattttttacctgagtaggcctagaaataaacatgctagcttttattccagttctaaccaaaaaaataaaccctcgttccacagaagctgccatcaagtatttcctcacgcaagcaaccgcatccataatccttctaatagctatcctcttcaacaatatactctccggacaatgaaccataaccaatactaccaatcaatactcatcattaataatcataatggctatagcaataaaactaggaatagccccctttcacttctgagtcccagaggttacccaaggcacccctctgacatccggcctgcttcttctcacatgacaaaaactagcccccatctcaatcatataccaaatctctccctcactaaacgtaagccttctcctcactctctcaatcttatccatcatagcaggcagttgaggtggattaaaccaaacccagctacgcaaaatcttagcatactcctcaattacccacataggatgaataatagcagttctaccgtacaaccctaacataaccattcttaatttaactatttatattatcctaactactaccgcattcctactactcaacttaaactccagcaccacgaccctactactatctcgcacctgaaacaagctaacatgactaacacccttaattccatccaccctcctctccctaggaggcctgcccccgctaaccggctttttgcccaaatgggccattatcgaagaattcacaaaaaacaatagcctcatcatccccaccatcatagccaccatcaccctccttaacctctacttctacctacgcctaatctactccacctcaatcacactactccccatatctaacaacgtaaaaataaaatgacagtttgaacatacaaaacccaccccattcctccccacactcatcgcccttaccacgctactcctacctatctccccttttatactaataatcttatagaaatttaggttaaatacagaccaagagccttcaaagccctcagtaagttgcaatacttaatttctgtaacagctaaggactgcaaaaccccactctgcatcaactgaacgcaaatcagccactttaattaagctaagcccttactagaccaatgggacttaaacccacaaacacttagttaacagctaagcaccctaatcaactggcttcaatctacttctcccgccgccgggaaaaaaggcgggagaagccccggcaggtttgaagctgcttcttcgaatttgcaattcaatatgaaaatcacctcggagctggtaaaaagaggcctaacccctgtctttagatttacagtccaatgcttcactcagccattttacctcacccccactgatgttcgccgaccgttgactattctctacaaaccacaaagacattggaacactatacctattattcggcgcatgagctggagtcctaggcacagctctaagcctccttattcgagccgagctgggccagccaggcaaccttctaggtaacgaccacatctacaacgttatcgtcacagcccatgcatttgtaataatcttcttcatagtaatacccatcataatcggaggctttggcaactgactagttcccctaataatcggtgcccccgatatggcgtttccccgcataaacaacataagcttctgactcttacctccctctctcctactcctgctcgcatctgctatagtggaggccggagcaggaacaggttgaacagtctaccctcccttagcagggaactactcccaccctggagcctccgtagacctaaccatcttctccttacacctagcaggtgtctcctctatcttaggggccatcaatttcatcacaacaattatcaatataaaaccccctgccataacccaataccaaacgcccctcttcgtctgatccgtcctaatcacagcagtcctacttctcctatctctcccagtcctagctgctggcatcactatactactaacagaccgcaacctcaacaccaccttcttcgaccccgccggaggaggagaccccattctataccaacacctattctgatttttcggtcaccctgaagtttatattcttatcctaccaggcttcggaataatctcccatattgtaacttactactccggaaaaaaagaaccatttggatacataggtatggtctgagctatgatatcaattggcttcctagggtttatcgtgtgagcacaccatatatttacagtaggaatagacgtagacacacgagcatatttcacctccgctaccataatcatcgctatccccaccggcgtcaaagtatttagctgactcgccacactccacggaagcaatatgaaatgatctgctgcagtgctctgagccctaggattcatctttcttttcaccgtaggtggcctgactggcattgtattagcaaactcatcactagacatcgtactacacgacacgtactacgttgtagcccacttccactatgtcctatcaataggagctgtatttgccatcataggaggcttcattcactgatttcccctattctcaggctacaccctagaccaaacctacgccaaaatccatttcactatcatattcatcggcgtaaatctaactttcttcccacaacactttctcggcctatccggaatgccccgacgttactcggactaccccgatgcatacaccacatgaaacatcctatcatctgtaggctcattcatttctctaacagcagtaatattaataattttcatgatttgagaagccttcgcttcgaagcgaaaagtcctaatagtagaagaaccctccataaacctggagtgactatatggatgccccccaccctaccacacattcgaagaacccgtatacataaaatctagacaaaaaaggaaggaatcgaaccccccaaagctggtttcaagccaaccccatggcctccatgactttttcaaaaaggtattagaaaaaccatttcataactttgtcaaagttaaattataggctaaatcctatatatcttaatggcacatgcagcgcaagtaggtctacaagacgctacttcccctatcatagaagagcttatcacctttcatgatcacgccctcataatcattttccttatctgcttcctagtcctgtatgcccttttcctaacactcacaacaaaactaactaatactaacatctcagacgctcaggaaatagaaaccgtctgaactatcctgcccgccatcatcctagtcctcatcgccctcccatccctacgcatcctttacataacagacgaggtcaacgatccctcccttaccatcaaatcaattggccaccaatggtactgaacctacgagtacaccgactacggcggactaatcttcaactcctacatacttcccccattattcctagaaccaggcgacctgcgactccttgacgttgacaatcgagtagtactcccgattgaagcccccattcgtataataattacatcacaagacgtcttgcactcatgagctgtccccacattaggcttaaaaacagatgcaattcccggacgtctaaaccaaaccactttcaccgctacacgaccgggggtatactacggtcaatgctctgaaatctgtggagcaaaccacagtttcatgcccatcgtcctagaattaattcccctaaaaatctttgaaatagggcccgtatttaccctatagcaccccctctaccccctctagagcccactgtaaagctaacttagcattaaccttttaagttaaagattaagagaaccaacacctctttacagtgaaatgccccaactaaatactaccgtatggcccaccataattacccccatactccttacactattcctcatcacccaactaaaaatattaaacacaaactaccacctacctccctcaccaaagcccataaaaataaaaaattataacaaaccctgagaaccaaaatgaacgaaaatctgttcgcttcattcattgcccccacaatcctaggcctacccgccgcagtactgatcattctatttccccctctattgatccccacctccaaatatctcatcaacaaccgactaatcaccacccaacaatgactaatcaaactaacctcaaaacaaatgataaccatacacaacactaaaggacgaacctgatctcttatactagtatccttaatcatttttattgccacaactaacctcctcggactcctgcctcactcatttacaccaaccacccaactatctataaacctagccatggccatccccttatgagcgggcgcagtgattataggctttcgctctaagattaaaaatgccctagcccacttcttaccacaaggcacacctacaccccttatccccatactagttattatcgaaaccatcagcctactcattcaaccaatagccctggccgtacgcctaaccgctaacattactgcaggccacctactcatgcacctaattggaagcgccaccctagcaatatcaaccattaaccttccctctacacttatcatcttcacaattctaattctactgactatcctagaaatcgctgtcgccttaatccaagcctacgttttcacacttctagtaagcctctacctgcacgacaacacataatgacccaccaatcacatgcctatcatatagtaaaacccagcccatgacccctaacaggggccctctcagccctcctaatgacctccggcctagccatgtgatttcacttccactccataacgctcctcatactaggcctactaaccaacacactaaccatataccaatgatggcgcgatgtaacacgagaaagcacataccaaggccaccacacaccacctgtccaaaaaggccttcgatacgggataatcctatttattacctcagaagtttttttcttcgcaggatttttctgagccttttaccactccagcctagcccctaccccccaattaggagggcactggcccccaacaggcatcaccccgctaaatcccctagaagtcccactcctaaacacatccgtattactcgcatcaggagtatcaatcacctgagctcaccatagtctaatagaaaacaaccgaaaccaaataattcaagcactgcttattacaattttactgggtctctattttaccctcctacaagcctcagagtacttcgagtctcccttcaccatttccgacggcatctacggctcaacattttttgtagccacaggcttccacggacttcacgtcattattggctcaactttcctcactatctgcttcatccgccaactaatatttcactttacatccaaacatcactttggcttcgaagccgccgcctgatactggcattttgtagatgtggtttgactatttctgtatgtctccatctattgatgagggtcttactcttttagtataaatagtaccgttaacttccaattaactagttttgacaacattcaaaaaagagtaataaacttcgccttaattttaataatcaacaccctcctagccttactactaataattattacattttgactaccacaactcaacggctacatagaaaaatccaccccttacgagtgcggcttcgaccctatatcccccgcccgcgtccctttctccataaaattcttcttagtagctattaccttcttattatttgatctagaaattgccctccttttacccctaccatgagccctacaaacaactaacctgccactaatagttatgtcatccctcttattaatcatcatcctagccctaagtctggcctatgagtgactacaaaaaggattagactgaaccgaattggtatatagtttaaacaaaacgaatgatttcgactcattaaattatgataatcatatttaccaaatgcccctcatttacataaatattatactagcatttaccatctcacttctaggaatactagtatatcgctcacacctcatatcctccctactatgcctagaaggaataatactatcgctgttcattatagctactctcataaccctcaacacccactccctcttagccaatattgtgcctattgccatactagtctttgccgcctgcgaagcagcggtgggcctagccctactagtctcaatctccaacacatatggcctagactacgtacataacctaaacctactccaatgctaaaactaatcgtcccaacaattatattactaccactgacatgactttccaaaaaacacataatttgaatcaacacaaccacccacagcctaattattagcatcatccctctactattttttaaccaaatcaacaacaacctatttagctgttccccaaccttttcctccgaccccctaacaacccccctcctaatactaactacctgactcctacccctcacaatcatggcaagccaacgccacttatccagtgaaccactatcacgaaaaaaactctacctctctatactaatctccctacaaatctccttaattataacattcacagccacagaactaatcatattttatatcttcttcgaaaccacacttatccccaccttggctatcatcacccgatgaggcaaccagccagaacgcctgaacgcaggcacatacttcctattctacaccctagtaggctcccttcccctactcatcgcactaatttacactcacaacaccctaggctcactaaacattctactactcactctcactgcccaagaactatcaaactcctgagccaacaacttaatatgactagcttacacaatagcttttatagtaaagatacctctttacggactccacttatgactccctaaagcccatgtcgaagcccccatcgctgggtcaatagtacttgccgcagtactcttaaaactaggcggctatggtataatacgcctcacactcattctcaaccccctgacaaaacacatagcctaccccttccttgtactatccctatgaggcataattataacaagctccatctgcctacgacaaacagacctaaaatcgctcattgcatactcttcaatcagccacatagccctcgtagtaacagccattctcatccaaaccccctgaagcttcaccggcgcagtcattctcataatcgcccacgggcttacatcctcattactattctgcctagcaaactcaaactacgaacgcactcacagtcgcatcataatcctctctcaaggacttcaaactctactcccactaatagctttttgatgacttctagcaagcctcgctaacctcgccttaccccccactattaacctactgggagaactctctgtgctagtaaccacgttctcctgatcaaatatcactctcctacttacaggactcaacatactagtcacagccctatactccctctacatatttaccacaacacaatggggctcactcacccaccacattaacaacataaaaccctcattcacacgagaaaacaccctcatgttcatacacctatcccccattctcctcctatccctcaaccccgacatcattaccgggttttcctcttgtaaatatagtttaaccaaaacatcagattgtgaatctgacaacagaggcttacgaccccttatttaccgagaaagctcacaagaactgctaactcatgcccccatgtctaacaacatggctttctcaacttttaaaggataacagctatccattggtcttaggccccaaaaattttggtgcaactccaaataaaagtaataaccatgcacactactataaccaccctaaccctgacttccctaattccccccatccttaccaccctcgttaaccctaacaaaaaaaactcatacccccattatgtaaaatccattgtcgcatccacctttattatcagtctcttccccacaacaatattcatgtgcctagaccaagaagttattatctcgaactgacactgagccacaacccaaacaacccagctctccctaagcttcaaactagactacttctccataatattcatccctgtagcattgttcgttacatgatccatcatagaattctcactgtgatatataaactcagacccaaacattaatcagttcttcaaatatctactcatcttcctaattaccatactaatcttagttaccgctaacaacctattccaactgttcatcggctgagagggcgtaggaattatatccttcttgctcatcagttgatgatacgcccgagcagatgccaacacagcagccattcaagcaatcctatacaaccgtatcggcgatatcggtttcatcctcgccttagcatgatttatcctacactccaactcatgagacccacaacaaatagcccttctaaacgctaatccaagcctcaccccactactaggcctcctcctagcagcagcaggcaaatcagcccaattaggtctccacccctgactcccctcagccatagaaggccccaccccagtctcagccctactccactcaagcactatagttgtagcaggaatcttcttactcatccgcttccaccccctagcagaaaatagcccactaatccaaactctaacactatgcttaggcgctatcaccactctgttcgcagcagtctgcgcccttacacaaaatgacatcaaaaaaatcgtagccttctccacttcaagtcaactaggactcataatagttacaatcggcatcaaccaaccacacctagcattcctgcacatctgtacccacgccttcttcaaagccatactatttatgtgctccgggtccatcatccacaaccttaacaatgaacaagatattcgaaaaataggaggactactcaaaaccatacctctcacttcaacctccctcaccattggcagcctagcattagcaggaatacctttcctcacaggtttctactccaaagaccacatcatcgaaaccgcaaacatatcatacacaaacgcctgagccctatctattactctcatcgctacctccctgacaagcgcctatagcactcgaataattcttctcaccctaacaggtcaacctcgcttccccacccttactaacattaacgaaaataaccccaccctactaaaccccattaaacgcctggcagccggaagcctattcgcaggatttctcattactaacaacatttcccccgcatcccccttccaaacaacaatccccctctacctaaaactcacagccctcgctgtcactttcctaggacttctaacagccctagacctcaactacctaaccaacaaacttaaaataaaatccccactatgcacattttatttctccaacatactcggattctaccctagcatcacacaccgcacaatcccctatctaggccttcttacgagccaaaacctgcccctactcctcctagacctaacctgactagaaaagctattacctaaaacaatttcacagcaccaaatctccacctccatcatcacctcaacccaaaaaggcataattaaactttacttcctctctttcttcttcccactcatcctaaccctactcctaatcacataacctattcccccgagcaatctcaattacaatatatacaccaacaaacaatgttcaaccagtaactactactaatcaacgcccataatcatacaaagcccccgcaccaataggatcctcccgaatcaaccctgacccctctccttcataaattattcagcttcctacactattaaagtttaccacaaccaccaccccatcatactctttcacccacagcaccaatcctacctccatcgctaaccccactaaaacactcgccaagacctcaacccctgacccccatgcctcaggatactcctcaatagccatcgctgtagtatatccaaagacaaccatcattccccctaaataaattaaaaaaactattaaacccatataacctcccccaaaattcagaataataacacacccgaccacaccgctaacaatcaatactaaacccccataaataggagaaggcttagaagaaaaccccacaaaccccattactaaacccacactcaacagaaacaaagcatacatcattattctcgcacggactacaaccacgaccaatgatatgaaaaaccatcgttgtatttcaactacaagaacaccaatgaccccaatacgcaaaactaaccccctaataaaattaattaaccactcattcatcgacctccccaccccatccaacatctccgcatgatgaaacttcggctcactccttggcgcctgcctgatcctccaaatcaccacaggactattcctagccatgcactactcaccagacgcctcaaccgccttttcatcaatcgcccacatcactcgagacgtaaattatggctgaatcatccgctaccttcacgccaatggcgcctcaatattctttatctgcctcttcctacacatcgggcgaggcctatattacggatcatttctctactcagaaacctgaaacatcggcattatcctcctgcttgcaactatagcaacagccttcataggctatgtcctcccgtgaggccaaatatcattctgaggggccacagtaattacaaacttactatccgccatcccatacattgggacagacctagttcaatgaatctgaggaggctactcagtagacagtcccaccctcacacgattctttacctttcacttcatcttgcccttcattattgcagccctagcagcactccacctcctattcttgcacgaaacgggatcaaacaaccccctaggaatcacctcccattccgataaaatcaccttccatccttactacacaatcaaagacgccctcggcttacttctcttccttctctccttaatgacattaacactattctcaccagacctcctaggcgacccagacaattataccctagccaaccccttaaacacccctccccacatcaagcccgaatgatatttcctattcgcctacacaattctccgatccgtccctaacaaactaggaggcgtccttgccctattactatccatcctcatcctagcaataatccccatcctccatatatccaaacaacaaagcataatatttcgcccactaagccaatcactttattgactcctagccgcagacctcctcattctaacctgaatcggaggacaaccagtaagctacccttttaccatcattggacaagtagcatccgtactatacttcacaacaatcctaatcctaataccaactatctccctaattgaaaacaaaatactcaaatgggcctgtccttgtagtataaactaatacaccagtcttgtaaaccggagatgaaaacctttttccaaggacaaatcagagaaaaagtctttaactccaccattagcacccaaagctaagattctaatttaaactattctctgttctttcatggggaagcagatttgggtaccacccaagtattgactcacccatcaacaaccgctatgtatttcgtacattactgccagccaccatgaatattgtacggtaccataaatacttgaccacctgtagtacataaaaacccaatccacatcaaaaccccctccccatgcttacaagcaagtacagcaatcaaccctcaactatcacacatcaactgcaactccaaagccacccctcacccactaggataccaacaaacctacccacccttaacagtacatagtacataaagccatttaccgtacatagcacattacagtcaaatcccttctcgtccccatggatgacccccctcagataggggtcccttgaccaccatcctccgtgaaatcaatatcccgcacaagagtgctactctcctcgctccgggcccataacacttgggggtagctaaagtgaactgtatccgacatctggttcctacttcagggccataaagcctaaatagcccacacgttccccttaaataagacatcacgatg

SEQ ID NO: 21 - DNA, 16570 bp, Homo sapiens mitochondrial
  3108: "n" refers to a nucleotide at position 3107 of the Cambridge Reference Sequence (CRS, Anderson et al. 1981 Nature 290:457-465), later determined to be absent from the human mtDNA sequence according to the revised CRS (rCRS, Andrews et al. 1999 Nature Genetics 23:147); "n" therefore represents a single nucleotide deletion at a position corresponding to nucleotide 3107 of SEQ ID NO:1 as provided herein.
gatcacaggtctatcaccctattaaccactcacgggagctctccatgcatttggtattttcgtctggggggtatgcacgcgatagcattgcgagacgctggagccggagcaccctatgtcgcagtatctgtctttgattcctgcctcatcctattatttatcgcacctacgttcaatattacaggcgaacatacttactaaagtgtgttaattaattaatgcttgtaggacataataataacaattgaatgtctgcacagccgctttccacacagacatcataacaaaaaatttccaccaaaccccccctcccccgccttctggccacagcacttaaacacatctctgccaaaccccaaaaacaaagaaccctaacaccagcctaaccagatttcaaattttatcttttggcggtatgcacttttaacagtcaccccccaactaacacattatttttccctcccactcccatactactaatctcatcaatacaacccccgcccatcctacccagcacacacacaccgctgctaaccccataccccgaaccaaccaaaccccaaagacaccccccacagtttatgtagcttacctcctcaaagcaatacactgaaaatgtttagacgggctcacatcaccccataaacaaataggtttggtcctagcctttctattagctcttagtaagattacacatgcaagcatccccgttccagtgagttcaccctctaaatcaccacgatcaaaagggacaagcatcaagcacgcagcaatgcagctcaaaacgcttagcctagccacacccccacgggaaacagcagtgattaacctttagcaataaacgaaagtttaactaagctatactaaccccagggttggtcaatttcgtgccagccaccgcggtcacacgattaacccaagtcaatagaagccggcgtaaagagtgttttagatcaccccctccccaataaagctaaaactcacctgagttgtaaaaaactccagttgacacaaaatagactacgaaagtggctttaacatatctgaacacacaatagctaagacccaaactgggattagataccccactatgcttagccctaaacctcaacagttaaatcaacaaaactgctcgccagaacactacgagccacagcttaaaactcaaaggacctggcggtgcttcatatccctctagaggagcctgttctgtaatcgataaaccccgatcaacctcaccacctcttgctcagcctatataccgccatcttcagcaaaccctgatgaaggctacaaagtaagcgcaagtacccacgtaaagacgttaggtcaaggtgtagcccatgaggtggcaagaaatgggctacattttctaccccagaaaactacgatagcccttatgaaacttaagggtcgaaggtggatttagcagtaaactgagagtagagtgcttagttgaacagggccctgaagcgcgtacacaccgcccgtcaccctcctcaagtatacttcaaaggacatttaactaaaacccctacgcatttatatagaggagacaagtcgtaacatggtaagtgtactggaaagtgcacttggacgaaccagagtgtagcttaacacaaagcacccaacttacacttaggagatttcaacttaacttgaccgctctgagctaaacctagccccaaacccactccaccttactaccagacaaccttagccaaaccatttacccaaataaagtataggcgatagaaattgaaacctggcgcaatagatatagtaccgcaagggaaagatgaaaaattataaccaagcataatatagcaaggactaacccctataccttctgcataatgaattaactagaaataactttgcaaggagagccaaagctaagacccccgaaaccagacgagctacctaagaacagctaaaagagcacacccgtctatgtagcaaaatagtgggaagatttataggtagaggcgacaaacctaccgagcctggtgatagctggttgtccaagatagaatcttagttcaactttaaatttgcccacagaaccctctaaatccccttgtaaatttaactgttagtccaaagaggaacagctctttggacactaggaaaaaaccttgtagagagagtaaaaaatttaacacccatagtaggcctaaaagcagccaccaattaagaaagcgttcaagctcaacacccactacctaaaaaatcccaaacatataactgaactcctcacacccaattggaccaatctatcaccctatagaagaactaatgttagtataagtaacatgaaaacattctcctccgcataagcctgcgtcagattaaaacactgaactgacaattaacagcccaatatctacaatcaaccaacaagtcattattaccctcactgtcaacccaacacaggcatgctcataaggaaaggttaaaaaaagtaaaaggaactcggcaaatcttaccccgcctgtttaccaaaaacatcacctctagcatcaccagtattagaggcaccgcctgcccagtgacacatgtttaacggccgcggtaccctaaccgtgcaaaggtagcataatcacttgttccttaaatagggacccgtatgaatggctccacgagggttcagctgtctcttacttttaaccagtgaaattgacctgcccgtgaagaggcgggcataacacagcaagacgagaagaccctatggagctttaatttattaatgcaaacagtacctaacaaacccacaggtcctaaactaccaaacctgcattaaaaatttcggttggggcgacctcggagcagaacccaacctccgagcagtacatgctaagacttcaccagtcaaagcgaactactatactcaattgatccaataacttgaccaacggaacaagttaccctagggataacagcgcaatcctattctagagtccatatcaacaatagggtttacgacctcgatgttggatcaggacatcccgatggtgcagccgctattaaaggttcgtttgttcaacgattaaagtcctacgtgatctgagttcagaccggagtaatccaggtcggtttctatctacnttcaaattcctccctgtacgaaaggacaagagaaataaggcctacttcacaaagcgccttcccccgtaaatgatatcatctcaacttagtattatacccacacccacccaagaacagggtttgttaagatggcagagcccggtaatcgcataaaacttaaaactttacagtcagaggttcaattcctcttcttaacaacatacccatggccaacctcctactcctcattgtacccattctaatcgcaatggcattcctaatgcttaccgaacgaaaaattctaggctatatacaactacgcaaaggccccaacgttgtaggcccctacgggctactacaacccttcgctgacgccataaaactcttcaccaaagagcccctaaaacccgccacatctaccatcaccctctacatcaccgccccgaccttagctctcaccatcgctcttctactatgaacccccctccccatacccaaccccctggtcaacctcaacctaggcctcctatttattctagccacctctagcctagccgtttactcaatcctctgatcagggtgagcatcaaactcaaactacgccctgatcggcgcactgcgagcagtagcccaaacaatctcatatgaagtcaccctagccatcattctactatcaacattactaataagtggctcctttaacctctccacccttatcacaacacaagaacacctctgattactcctgccatcatgacccttggccataatatgatttatctccacactagcagagaccaaccgaacccccttcgaccttgccgaaggggagtccgaactagtctcaggcttcaacatcgaatacgccgcaggccccttcgccctattcttcatagccgaatacacaaacattattataataaacaccctcaccactacaatcttcctaggaacaacatatgacgcactctcccctgaactctacacaacatattttgtcaccaagaccctacttctaacctccctgttcttatgaattcgaacagcatacccccgattccgctacgaccaactcatacacctcctatgaaaaaacttcctaccactcaccctagcattacttatatgatatgtctccatacccattacaatctccagcattccccctcaaacctaagaaatatgtctgataaaagagttactttgatagagtaaataataggagcttaaacccccttatttctaggactatgagaatcgaacccatccctgagaatccaaaattctccgtgccacctatcacaccccatcctaaagtaaggtcagctaaataagctatcgggcccataccccgaaaatgttggttatacccttcccgtactaattaatcccctggcccaacccgtcatctactctaccatctttgcaggcacactcatcacagcgctaagctcgcactgattttttacctgagtaggcctagaaataaacatgctagcttttattccagttctaaccaaaaaaataaaccctcgttccacagaagctgccatcaagtatttcctcacgcaagcaaccgcatccataatccttctaatagctatcctcttcaacaatatactctccggacaatgaaccataaccaatactaccaatcaatactcatcattaataatcataatggctatagcaataaaactaggaatagccccctttcacttctgagtcccagaggttacccaaggcacccctctgacatccggcctgcttcttctcacatgacaaaaactagcccccatctcaatcatataccaaatctctccctcactaaacgtaagccttctcctcactctctcaatcttatccatcatagcaggcagttgaggtggattaaaccaaacccagctacgcaaaatcttagcatactcctcaattacccacataggatgaataatagcagttctaccgtacaaccctaacataaccattcttaatttaactatttatattatcctaactactaccgcattcctactactcaacttaaactccagcaccacgaccctactactatctcgcacctgaaacaagctaacatgactaacacccttaattccatccaccctcctctccctaggaggcctgcccccgctaaccggctttttgcccaaatgggccattatcgaagaattcacaaaaaacaatagcctcatcatccccaccatcatagccaccatcaccctccttaacctctacttctacctacgcctaatctactccacctcaatcacactactccccatatctaacaacgtaaaaataaaatgacagtttgaacatacaaaacccaccccattcctccccacactcatcgcccttaccacgctactcctacctatctccccttttatactaataatcttatagaaatttaggttaaatacagaccaagagccttcaaagccctcagtaagttgcaatacttaatttctgtaacagctaaggactgcaaaaccccactctgcatcaactgaacgcaaatcagccactttaattaagctaagcccttactagaccaatgggacttaaacccacaaacacttagttaacagctaagcaccctaatcaactggcttcaatctacttctcccgccgccgggaaaaaaggcgggagaagccccggcaggtttgaagctgcttcttcgaatttgcaattcaatatgaaaatcacctcggagctggtaaaaagaggcctaacccctgtctttagatttacagtccaatgcttcactcagccattttacctcacccccactgatgttcgccgaccgttgactattctctacaaaccacaaagacattggaacactatacctattattcggcgcatgagctggagtcctaggcacagctctaagcctccttattcgagccgagctgggccagccaggcaaccttctaggtaacgaccacatctacaacgttatcgtcacagcccatgcatttgtaataatcttcttcatagtaatacccatcataatcggaggctttggcaactgactagttcccctaataatcggtgcccccgatatggcgtttccccgcataaacaacataagcttctgactcttacctccctctctcctactcctgctcgcatctgctatagtggaggccggagcaggaacaggttgaacagtctaccctcccttagcagggaactactcccaccctggagcctccgtagacctaaccatcttctccttacacctagcaggtgtctcctctatcttaggggccatcaatttcatcacaacaattatcaatataaaaccccctgccataacccaataccaaacgcccctcttcgtctgatccgtcctaatcacagcagtcctacttctcctatctctcccagtcctagctgctggcatcactatactactaacagaccgcaacctcaacaccaccttcttcgaccccgccggaggaggagaccccattctataccaacacctattctgatttttcggtcaccctgaagtttatattcttatcctaccaggcttcggaataatctcccatattgtaacttactactccggaaaaaaagaaccatttggatacataggtatggtctgagctatgatatcaattggcttcctagggtttatcgtgtgagcacaccatatatttacagtaggaatagacgtagacacacgagcatatttcacctccgctaccataatcatcgctatccccaccggcgtcaaagtatttagctgactcgccacactccacggaagcaatatgaaatgatctgctgcagtgctctgagccctaggattcatctttcttttcaccgtaggtggcctgactggcattgtattagcaaactcatcactagacatcgtactacacgacacgtactacgttgtagcccacttccactatgtcctatcaataggagctgtatttgccatcataggaggcttcattcactgatttcccctattctcaggctacaccctagaccaaacctacgccaaaatccatttcactatcatattcatcggcgtaaatctaactttcttcccacaacactttctcggcctatccggaatgccccgacgttactcggactaccccgatgcatacaccacatgaaacatcctatcatctgtaggctcattcatttctctaacagcagtaatattaataattttcatgatttgagaagccttcgcttcgaagcgaaaagtcctaatagtagaagaaccctccataaacctggagtgactatatggatgccccccaccctaccacacattcgaagaacccgtatacataaaatctagacaaaaaaggaaggaatcgaaccccccaaagctggtttcaagccaaccccatggcctccatgactttttcaaaaaggtattagaaaaaccatttcataactttgtcaaagttaaattataggctaaatcctatatatcttaatggcacatgcagcgcaagtaggtctacaagacgctacttcccctatcatagaagagcttatcacctttcatgatcacgccctcataatcattttccttatctgcttcctagtcctgtatgcccttttcctaacactcacaacaaaactaactaatactaacatctcagacgctcaggaaatagaaaccgtctgaactatcctgcccgccatcatcctagtcctcatcgccctcccatccctacgcatcctttacataacagacgaggtcaacgatccctcccttaccatcaaatcaattggccaccaatggtactgaacctacgagtacaccgactacggcggactaatcttcaactcctacatacttcccccattattcctagaaccaggcgacctgcgactccttgacgttgacaatcgagtagtactcccaattgaagcccccattcgtataataattacatcacaagacgtcttgcactcatgagctgtccccacattaggcttaaaaacagatgcaattcccggacgtctaaaccaaaccactttcaccgctacacgaccgggggtatactacggtcaatgctctgaaatctgtggagcaaaccacagtttcatgcccatcgtcctagaattaattcccctaaaaatctttgaaatagggcccgtatttaccctatagcaccccctctaccccctctagagcccactgtaaagctaacttagcattaaccttttaagttaaagattaagagaaccaacacctctttacagtgaaatgccccaactaaatactaccgtatggcccaccataattacccccatactccttacactattcctcatcacccaactaaaaatattaaacacaaactaccacctacctccctcaccaaagcccataaaaataaaaaattataacaaaccctgagaaccaaaatgaacgaaaatctgttcgcttcattcattgcccccacaatcctaggcctacccgccgcagtactgatcattctatttccccctctattgatccccacctccaaatatctcatcaacaaccgactaatcaccacccaacaatgactaatcaaactaacctcaaaacaaatgataaccatacacaacactaaaggacgaacctgatctcttatactagtatccttaatcatttttattgccacaactaacctcctcggactcctgcctcactcatttacaccaaccacccaactatctataaacctagccatggccatccccttatgagcgggcgcagtgattataggctttcgctctaagattaaaaatgccctagcccacttcttaccacaaggcacacctacaccccttatccccatactagttattatcgaaaccatcagcctactcattcaaccaatagccctggccgtacgcctaaccgctaacattactgcaggccacctactcatgcacctaattggaagcgccaccctagcaatatcaaccattaaccttccctctacacttatcatcttcacaattctaattctactgactatcctagaaatcgctgtcgccttaatccaagcctacgttttcacacttctagtaagcctctacctgcacgacaacacataatgacccaccaatcacatgcctatcatatagtaaaacccagcccatgacccctaacaggggccctctcagccctcctaatgacctccggcctagccatgtgatttcacttccactccataacgctcctcatactaggcctactaaccaacacactaaccatataccaatgatggcgcgatgtaacacgagaaagcacataccaaggccaccacacaccacctgtccaaaaaggccttcgatacgggataatcctatttattacctcagaagtttttttcttcgcaggatttttctgagccttttaccactccagcctagcccctaccccccaattaggagggcactggcccccaacaggcatcaccccgctaaatcccctagaagtcccactcctaaacacatccgtattactcgcatcaggagtatcaatcacctgagctcaccatagtctaatagaaaacaaccgaaaccaaataattcaagcactgcttattacaattttactgggtctctattttaccctcctacaagcctcagagtacttcgagtctcccttcaccatttccgacggcatctacggctcaacattttttgtagccacaggcttccacggacttcacgtcattattggctcaactttcctcactatctgcttcatccgccaactaatatttcactttacatccaaacatcactttggcttcgaagccgccgcctgatactggcattttgtagatgtggtttgactatttctgtatgtctccatctattgatgagggtcttactcttttagtataaatagtaccgttaacttccaattaactagttttgacaacattcaaaaaagagtaataaacttcgccttaattttaataatcaacaccctcctagccttactactaataattattacattttgactaccacaactcaacggctacatagaaaaatccaccccttacgagtgcggcttcgaccctatatcccccgcccgcgtccctttctccataaaattcttcttagtagctattaccttcttattatttgatctagaaattgccctccttttacccctaccatgagccctacaaacaactaacctgccactaatagttatgtcatccctcttattaatcatcatcctagccctaagtctggcctatgagtgactacaaaaaggattagactgaaccgaattggtatatagtttaaacaaaacgaatgatttcgactcattaaattatgataatcatatttaccaaatgcccctcatttacataaatattatactagcatttaccatctcacttctaggaatactagtatatcgctcacacctcatatcctccctactatgcctagaaggaataatactatcgctgttcattatagctactctcataaccctcaacacccactccctcttagccaatattgtgcctattgccatactagtctttgccgcctgcgaagcagcggtgggcctagccctactagtctcaatctccaacacatatggcctagactacgtacataacctaaacctactccaatgctaaaactaatcgtcccaacaattatattactaccactgacatgactttccaaaaaacacataatttgaatcaacacaaccacccacagcctaattattagcatcatccctctactattttttaaccaaatcaacaacaacctatttagctgttccccaaccttttcctccgaccccctaacaacccccctcctaatactaactacctgactcctacccctcacaatcatggcaagccaacgccacttatccagtgaaccactatcacgaaaaaaactctacctctctatactaatctccctacaaatctccttaattataacattcacagccacagaactaatcatattttatatcttcttcgaaaccacacttatccccaccttggctatcatcacccgatgaggcaaccagccagaacgcctgaacgcaggcacatacttcctattctacaccctagtaggctcccttcccctactcatcgcactaatttacactcacaacaccctaggctcactaaacattctactactcactctcactgcccaagaactatcaaactcctgagccaacaacttaatatgactagcttacacaatagcttttatagtaaagatacctctttacggactccacttatgactccctaaagcccatgtcgaagcccccatcgctgggtcaatagtacttgccgcagtactcttaaaactaggcggctatggtataatacgcctcacactcattctcaaccccctgacaaaacacatagcctaccccttccttgtactatccctatgaggcataattataacaagctccatctgcctacgacaaacagacctaaaatcgctcattgcatactcttcaatcagccacatagccctcgtagtaacagccattctcatccaaaccccctgaagcttcaccggcgcagtcattctcataatcgcccacgggcttacatcctcattactattctgcctagcaaactcaaactacgaacgcactcacagtcgcatcataatcctctctcaaggacttcaaactctactcccactaatagctttttgatgacttctagcaagcctcgctaacctcgccttaccccccactattaacctactgggagaactctctgtgctagtaaccacgttctcctgatcaaatatcactctcctacttacaggactcaacatactagtcacagccctatactccctctacatatttaccacaacacaatggggctcactcacccaccacattaacaacataaaaccctcattcacacgagaaaacaccctcatgttcatacacctatcccccattctcctcctatccctcaaccccgacatcattaccgggttttcctcttgtaaatatagtttaaccaaaacatcagattgtgaatctgacaacagaggcttacgaccccttatttaccgagaaagctcacaagaactgctaactcatgcccccatgtctaacaacatggctttctcaacttttaaaggataacagctatccattggtcttaggccccaaaaattttggtgcaactccaaataaaagtaataaccatgcacactactataaccaccctaaccctgacttccctaattccccccatccttaccaccctcgttaaccctaacaaaaaaaactcatacccccattatgtaaaatccattgtcgcatccacctttattatcagtctcttccccacaacaatattcatgtgcctagaccaagaagttattatctcgaactgacactgagccacaacccaaacaacccagctctccctaagcttcaaactagactacttctccataatattcatccctgtagcattgttcgttacatggtccatcatagaattctcactgtgatatataaactcagacccaaacattaatcagttcttcaaatatctactcatcttcctaattaccatactaatcttagttaccgctaacaacctattccaactgttcatcggctgagagggcgtaggaattatatccttcttgctcatcagttgatgatacgcccgagcagatgccaacacagcagccattcaagcaatcctatacaaccgtatcggcgatatcggtttcatcctcgccttagcatgatttatcctacactccaactcatgagacccacaacaaatagcccttctaaacgctaatccaagcctcaccccactactaggcctcctcctagcagcagcaggcaaatcagcccaattaggtctccacccctgactcccctcagccatagaaggccccaccccagtctcagccctactccactcaagcactatagttgtagcaggaatcttcttactcatccgcttccaccccctagcagaaaatagcccactaatccaaactctaacactatgcttaggcgctatcaccactctgttcgcagcagtctgcgcccttacacaaaatgacatcaaaaaaatcgtagccttctccacttcaagtcaactaggactcataatagttacaatcggcatcaaccaaccacacctagcattcctgcacatctgtacccacgccttcttcaaagccatactatttatgtgctccgggtccatcatccacaaccttaacaatgaacaagatattcgaaaaataggaggactactcaaaaccatacctctcacttcaacctccctcaccattggcagcctagcattagcaggaatacctttcctcacaggtttctactccaaagaccacatcatcgaaaccgcaaacatatcatacacaaacgcctgagccctatctattactctcatcgctacctccctgacaagcgcctatagcactcgaataattcttctcaccctaacaggtcaacctcgcttccccacccttactaacattaacgaaaataaccccaccctactaaaccccattaaacgcctggcagccggaagcctattcgcaggatttctcattactaacaacatttcccccgcatcccccttccaaacaacaatccccctctacctaaaactcacagccctcgctgtcactttcctaggacttctaacagccctagacctcaactacctaaccaacaaacttaaaataaaatccccactatgcacattttatttctccaacatactcggattctaccctagcatcacacaccgcacaatcccctatctaggccttcttacgagccaaaacctgcccctactcctcctagacctaacctgactagaaaagctattacctaaaacaatttcacagcaccaaatctccacctccatcatcacctcaacccaaaaaggcataattaaactttacttcctctctttcttcttcccactcatcctaaccctactcctaatcacataacctattcccccgagcaatctcaattacaatatatacaccaacaaacaatgttcaaccagtaactactactaatcaacgcccataatcatacaaagcccccgcaccaataggatcctcccgaatcaaccctgacccctctccttcataaattattcagcttcctacactattaaagtttaccacaaccaccaccccatcatactctttcacccacagcaccaatcctacctccatcgctaaccccactaaaacactcaccaagacctcaacccctgacccccatgcctcaggatactcctcaatagccatcgctgtagtatatccaaagacaaccatcattccccctaaataaattaaaaaaactattaaacccatataacctcccccaaaattcagaataataacacacccgaccacaccgctaacaatcaatactaaacccccataaataggagaaggcttagaagaaaaccccacaaaccccattactaaacccacactcaacagaaacaaagcatacatcattattctcgcacggactacaaccacgaccaatgatatgaaaaaccatcgttgtatttcaactacaagaacaccaatgaccccaatacgcaaaactaaccccctaataaaattaattaaccactcattcatcgacctccccaccccatccaacatctccgcatgatgaaacttcggctcactccttggcgcctgcctgatcctccaaatcaccacaggactattcctagccatgcactactcaccagacgcctcaaccgccttttcatcaatcgcccacatcactcgagacgtaaattatggctgaatcatccgctaccttcacgccaatggcgcctcaatattctttatctgcctcttcctacacatcgggcgaggcctatattacggatcatttctctactcagaaacctgaaacatcggcattatcctcctgcttgcaactatagcaacagccttcataggctatgtcctcccgtgaggccaaatatcattctgaggggccacagtaattacaaacttactatccgccatcccatacattgggacagacctagttcaatgaatctgaggaggctactcagtagacagtcccaccctcacacgattctttacctttcacttcatcttgcccttcattattgcagccctagcagcactccacctcctattcttgcacgaaacgggatcaaacaaccccctaggaatcacctcccattccgataaaatcaccttccacccttactacacaatcaaagacgccctcggcttacttctcttccttctctccttaatgacattaacactattctcaccagacctcctaggcgacccagacaattataccctagccaaccccttaaacacccctccccacatcaagcccgaatgatatttcctattcgcctacacaattctccgatccgtccctaacaaactaggaggcgtccttgccctattactatccatcctcatcctagcaataatccccatcctccatatatccaaacaacaaagcataatatttcgcccactaagccaatcactttattgactcctagccgcagacctcctcattctaacctgaatcggaggacaaccagtaagctacccttttaccatcattggacaagtagcatccgtactatacttcacaacaatcctaatcctaataccaactatctccctaattgaaaacaaaatactcaaatgggcctgtccttgtagtataaactaatacaccagtcttgtaaaccggagatgaaaacctttttccaaggacaaatcagagaaaaagtctttaactccaccattagcacccaaagctaagattctaatttaaactattctctgttctttcatggggaagcagatttgggtaccacccaagtattgactcacccatcaacaaccgctatgtatttcgtacattactgccagccaccatgaatattgtacggtaccataaatacttgaccacctgtagtacataaaaacccaatccacatcaaaaccccctccccatgcttacaagcaagtacagcaatcaaccctcaactatcacacatcaactgcaactccaaagccacccctcacccactaggataccaacaaacctacccacccttaacagcacatagtacataaagccatttaccgtacatagcacattacagtcaaatcccttctcgtccccatggatgacccccctcagataggggtcccttgaccaccatcctccgtgaaatcaatatcccgcacaagagtgctactctcctcgctccgggcccataacacttgggggtagctaaagtgaactgtatccgacatctggttcctacttcagggtcataaagcctaaatagcccacacgttccccttaaataagacatcacgatg

SEQ ID NO: 22 - DNA, 16562 bp, Homo sapiens mitochondrial
  3109: "n" refers to a nucleotide at position 3107 of the Cambridge Reference Sequence (CRS, Anderson et al. 1981 Nature 290:457-465), later determined to be absent from the human mtDNA sequence according to the revised CRS (rCRS, Andrews et al. 1999 Nature Genetics 23:147); "n" therefore represents a single nucleotide deletion at a position corresponding to nucleotide 3107 of SEQ ID NO:1 as provided herein.
gatcacaggtctatctccctattaaccactcacgggagctctccatgcatttggtattttcgtctggggggtgtgcacgcgatagcattgcgagacgctggagccggagcaccctatgtcgcagtatctgtctttgattcctgcctcattctattatttatcgcacctacgttcaatattacaggcgaacatacttaccaaagtgtgttaattaattaatgcttgtaggacataataataacaattgaatgtctgcacagccgctttccacacagacatcataacaaaaaatttccaccaaaccccccctcccccccgcttctggccacagcacttaaacacatctctgccaaaccccaaaaacaaagaaccctaacaccagcctaaccagatttcaaattttatcttttggcggtatgcacttttaacagtcaccccccaactaacacattattttcccctcccactcccatactactaatctcatcaatacaaccctcgcccatcctacccagcacacacacaccgctgctaaccccataccccgaaccaaccaaaccccaaagacaccccccacagtttatgtagcttacctcctcaaagcaatacactgaaaatgtttagacgggctcacatcaccccataaacaaataggtttggtcctagcctttctattagctcttagtaagattacacatgcaagcatccccgttccagtgagttcaccctctaaatcaccacgatcaaaagggacaagcatcaagcacgcagcaatgcagctcaaaacgcttagcctagccacacccccacgggaaacagcagtgattaacctttagcaataaacgaaagtttaactaagctatactaaccccagggttggtcaatttcgtgccagccaccgcggtcacacgattaacccaagtcaatagaagccggcgtaaagagtgttttagatcaccccctccccaataaagctaaaactcacctgagttgtaaaaaactccagttgacacaaaatagactacgaaagtggctttaacatatctgaacacacaatagctaagacccaaactgggattagataccccactatgcttagccctaaacctcaacagttaaatcaacaaaactgctcgccagaacactacgagccacagcttaaaactcaaaggacctggcggtgcttcatacccctctagaggagcctgttctgtaatcgataaaccccgatcaacctcaccacctcttgctcagcctatataccgccatcttcagcaaaccctgatgaaggctacaaagtaagcgcaagtacccacgtaaagacgttaggtcaaggtgtagcccatgaggtggcaagaaatgggctacattttctaccccagaaaactacgatagcccttatgaaacttaagggtcgaaggtggatttagcagtaaactgagagtagagtgcttagttgaacagggccctgaagcgcgtacacaccgcccgtcaccctcctcaagtatacttcaaaggacatttaactaaaacccctacgcatttatatagaggagacaagtcgtaacatggtaagtgtactggaaagtgcacttggacgaaccagagtgtagcttaacacaaagcacccaacttacacttaggagatttcaacttaacttgaccgctctgagctaaacctagccccaaacccactccaccttactaccagacaaccttagccaaaccatttacccaaataaagtataggcgatagaaattgaaacctggcgcaatagatatagtaccgcaagggaaagatgaaaaattatagccaagcataatatagcaaggactaacccctataccttctgcataatgaattaactagaaataactttgcaaggagagccaaagctaagacccccgaaaccagacgagctacctaagaacagctaaaagagcacacccgtctatgtagcaaaatagtgggaagatttataggtagaggcgacaaacctaccgagcctggtgatagctggttgtccaagatagaatcttagttcaactttaaatttgcccacagaaccctctaaatccccttgtaaatttaactgttagtccaaagaggaacagctctttggacactaggaaaaaaccttgtagagagagtaaaaaatttaacacccatagtaggcctaaaagcagccaccaattaagaaagcgttcaagctcaacacccactacctaaaaaatcccaaacatataactgaactcctcacacccaattggaccaatctatcaccctatagaagaactaatgttagtataagtaacatgaaaacattctcctccgcataagcctgcgtcagattaaaacactgaactgacaattaacagcccaatatctacaatcaaccaacaagtcattattaccctcactgtcaacccaacacaggcatgctcataaggaaaggttaaaaaaagtaaaaggaactcggcaaatcttaccccgcctgtttaccaaaaacatcacctctagcatcaccagtattagaggcaccgcctgcccagtgacacatgtttaacggccgcggtaccctaaccgtgcaaaggtagcataatcacttgttccttaaatagggacctgtatgaatggctccacgagggttcagctgtctcttacttttaaccagtgaaattgacctgcccgtgaagaggcgggcatgacacagcaagacgagaagaccctatggagctttaatttattaatgcaaacagtacctaacaaacccacaggtcctaaactaccaaacctgcattaaaaatttcggttggggcgacctcggagcagaacccaacctccgagcagtacatgctaagacttcaccagtcaaagcgaactactatactcaattgatccaataacttgaccaacggaacaagttaccctagggataacagcgcaatcctattctagagtccatatcaacaatagggtttacgacctcgatgttggatcaggacatcccgatggtgcagccgctattaaaggttcgtttgttcaacgattaaagtcctacgtgatctgagttcagaccggagtaatccaggtcggtttctatctacnttcaaattcctccctgtacgaaaggacaagagaaataaggcctacttcacaaagcgccttcccccgtaaatgatatcatctcaacttagtattatacccacacccacccaagaacagggtttgttaagatggcagagcccggtaatcgcataaaacttaaaactttacagtcagaggttcaattcctcttcttaacaacatacccatggccaacctcctactcctcattgtacccattctaatcgcaatggcattcctaatgcttaccgaacgaaaaattctaggctatatacaactacgcaaaggccccaacgttgtaggcccctacgggctactacaacccttcgctgacgccataaaactcttcaccaaggagcccctaaaacccgccacatctaccatcaccctctacatcaccgccccgaccttagctctcaccatcgctcttctactatgaacccccctccccatacccaaccccctggtcaacctcaacctaggcctcctatttattctagccacctctagcctagccgtttactcaatcctctgatcagggtgagcatcaaactcaaactacgccctgatcggcgcactgcgagcagtagcccaaacaatctcatatgaagtcaccctagccatcattctactatcaacattactaataagtggctcctttaacctctccacccttatcacaacacaagaacacctctgattactcctgccatcatgacccttggccataatatgatttatctccacactagcagagaccaaccgaacccccttcgaccttgccgaaggggagtccgaactagtctcaggcttcaacatcgaatacgccgcaggccccttcgccctattcttcatagccgaatacacaaacattattataataaacaccctcaccactacaatcttcctaggaacaacatatgacgcactctcccctgaactctacacaacatattttgtcaccaagaccctacttctaacctccctgttcttatgaattcgaacagcatacccccgattccgctacgaccaactcatacacctcctatgaaaaaacttcctaccactcaccctagcattacttatatgatatgtctccatacccattacaatctccagcattccccctcaaacctaagaaatatgtctgataaaagagttactttgatagagtaaataataggagcttaaacccccttatttctaggactatgagaatcgaacccatccctgagaatccaaaattctccgtgccacctatcacaccccatcctaaagtaaggtcagctaaataagctatcgggcccataccccgaaaatgttggttatacccttcccgtactaattaatcccctggcccaacccgtcatctactctaccatctttgcaggcacactcatcacagcgctaagctcgcactgattttttacctgagtaggcctagaaataaacatgctagcttttattccagttctaaccaaaaaaataaaccctcgttccacagaagctgccatcaagtatttcctcacgcaagcaaccgcatccataatccttctaatagctatcctcttcaacaatatactctccggacaatgaaccataaccaatactaccaatcaatactcatcattaataatcataatggctatagcaataaaactaggaatagccccctttcacttctgagtcccagaggttacccaaggcacccctctgacatccggcctgcttcttctcacatgacaaaaactagcccccatctcaatcatataccaaatctctccctcactaaacgtaagccttctcctcactctctcaatcttatccatcatagcaggcagttgaggtggattaaaccaaacccagctacgcaaaatcttagcatactcctcaattacccacataggatgaataatagcagttctaccgtacaaccctaacataaccattcttaatttaactatttatattatcctaactactaccgcattcctactactcaacttaaactccagcaccacgaccctactactatctcgcacctgaaacaagctaacatgactaacacccttaattccatccaccctcctctccctaggaggcctgcccccgctaaccggctttttgcccaaatgggccattatcgaagaattcacaaaaaacaatagcctcatcatccccaccatcatagccaccatcaccctccttaacctctacttctacctacgcctaatctactccacctcaatcacactactccccatatctaacaacgtaaaaataaaatgacagtttgaacatacaaaacccaccccattcctccccacactcatcgcccttaccacgctactcctacctatctccccttttatactaataatcttatagaaatttaggttaaatacagaccaagagccttcaaagccctcagtaagttgcaatacttaatttctgtaacagctaaggactgcaaaaccccactctgcatcaactgaacgcaaatcagccactttaattaagctaagcccttactagaccaatgggacttaaacccacaaacacttagttaacagctaagcaccctaatcaactggcttcaatctacttctcccgccgccgggaaaaaaggcgggagaagccccggcaggtttgaagctgcttcttcgaatttgcaattcaatatgaaaatcacctcggagctggtaaaaagaggcctaacccctgtctttagatttacagtccaatgcttcactcagccattttacctcacccccactgatgttcgccgaccgttgactattctctacaaaccacaaagacattggaacactatacctattattcggcgcatgagctggagtcctaggcacagctctaagcctccttattcgagccgagctgggccagccaggcaaccttctaggtaacgaccacatctacaacgttatcgtcacagcccatgcatttgtaataatcttcttcatagtaatacccatcataatcggaggctttggcaactgactagttcccctaataatcggtgcccccgatatggcgtttccccgcataaacaacataagcttctgactcttacctccctctctcctactcctgctcgcatctgctatagtggaggccggagcaggaacaggttgaacagtctaccctcccttagcagggaactactcccaccctggagcctccgtagacctaaccatcttctccttacacctagcaggtgtctcctctatcttaggggccatcaatttcatcacaacaattatcaatataaaaccccctgccataacccaataccaaacgcccctcttcgtctgatccgtcctaatcacagcagtcctacttctcctatctctcccagtcctagctgctggcatcactatactactaacagaccgcaacctcaacaccaccttcttcgaccccgccggaggaggagaccccattctataccaacacctattctgatttttcggtcaccctgaagtttatattcttatcctaccaggcttcggaataatctcccatattgtaacttactactccggaaaaaaagaaccatttggatacataggtatggtctgagctatgatatcaattggcttcctagggtttatcgtgtgagcacaccatatatttacagtaggaatagacgtagacacacgagcatatttcacctccgctaccataatcatcgctatccccaccggcgtcaaagtatttagctgactcgccacactccacggaagcaatatgaaatgatctgctgcagtgctctgagccctaggattcatctttcttttcaccgtaggtggcctgactggcattgtattagcaaactcatcactagacatcgtactacacgacacgtactacgttgtagctcacttccactatgtcctatcaataggagctgtatttgccatcataggaggcttcattcactgatttcccctattctcaggctacaccctagaccaaacctacgccaaaatccatttcactatcatattcatcggcgtaaatctaactttcttcccacaacactttctcggcctatccggaatgccccgacgttactcggactaccccgatgcatacaccacatgaaacatcctatcatctgtaggctcattcatttctctaacagcagtaatattaataattttcatgatttgagaagccttcgcttcgaagcgaaaagtcctaatagtagaagaaccctccataaacctggagtgactatatggatgccccccaccctaccacacattcgaagaacccgtatacataaaatctagacaaaaaaggaaggaatcgaaccccccaaagctggtttcaagccaaccccatggcctccatgactttttcaaaaaggtattagaaaaaccatttcataactttgtcaaagttaaattataggctaaatcctatatatcttaatggcacatgcagcgcaagtaggtctacaagacgctacttcccctatcatagaagagcttatcacctttcatgatcacgccctcataatcattttccttatctgcttcctagtcctgtatgcccttttcctaacactcacaacaaaactaactaatactaacatctcagacgctcaggaaatagaaaccgtctgaactatcctgcccgccatcatcctagtcctcatcgccctcccatccctacgcatcctttacataacagacgaggtcaacgatccctcccttaccatcaaatcaattggccaccaatggtactgaacctacgagtacaccgactacggcggactaatcttcaactcctacatacttcccccattattcctagaaccaggcgacctgcgactccttgacgttgacaatcgagtagtactcccgattgaagcccccattcgtataataattacatcacaagacgtcttgcactcatgagctgtccccacattaggcttaaaaacagatgcaattcccggacgtctaaaccaaaccactttcaccgctacacgaccgggggtatactacggtcaatgctctgaaatctgtggagcaaaccacagtttcatgcccatcgtcctagaattaattcccctaaaaatctttgaaatagggcccgtatttaccctatagcaccccctctagagcccactgtaaagctaacttagcattaaccttttaagttaaagattaagagaaccaacacctctttacagtgaaatgccccaactaaatactaccgtatggcccaccataattacccccatactccttacactattcctcatcacccaactaaaaatattaaacacaaactaccacctacctccctcaccaaagcccataaaaataaaaaattataacaaaccctgagaaccaaaatgaacgaaaatctgttcgcttcattcattgcccccacaatcctaggcctacccgccgcagtactgatcattctatttccccctctattgatccccacctccaaatatctcatcaacaaccgactaatcaccacccaacaatgactaatcaaactaacctcaaaacaaatgataaccatacacaacactaaaggacgaacctgatctcttatactagtatccttaatcatttttattgccacaactaacctcctcggactcctgcctcactcatttacaccaaccacccaactatctataaacctagccatggccatccccttatgagcgggcgcagtgattataggctttcgctctaagattaaaaatgccctagcccacttcttaccacaaggcacacctacaccccttatccccatactagttattatcgaaaccatcagcctactcattcaaccaatagccctggccgtacgcctaaccgctaacattactgcaggccacctactcatgcacctaattggaagcaccaccctagcaatatcaaccattaaccttccctctacacttatcatcttcacaattctaattctactgactatcctagaaatcgctgtcgccttaatccaagcctacgttttcacacttctagtaagcctctacctgcacgacaacacataatgacccaccaatcacatgcctatcatatagtaaaacccagcccatgacccctaacaggggccctctcagccctcctaatgacctccggcctagccatgtgatttcacttccactccataacgctcctcatactaggcctactaaccaacacactaaccatataccaatgatggcgcgatgtaacacgagaaagcacataccaaggccaccacacaccacctgtccaaaaaggccttcgatacgggataatcctatttattacctcagaagtttttttcttcgcaggatttttctgagccttttaccactccagcctagcccctaccccccaattaggagggcactggcccccaacaggcatcaccccgctaaatcccctagaagtcccactcctaaacacatccgtattactcgcatcaggagtatcaatcacctgagctcaccatagtctaatagaaaacaaccgaaaccaaataattcaagcactgctcattacaattttactgggtctctattttaccctcctacaagcctcagagtacttcgagtctcccttcaccatttccgacggcatctacggctcaacattttttgtagccacaggcttccacggacttcacgtcattattggctcaactttcctcactatctgcttcatccgccaactaatatttcactttacatccaaacatcactttggcttcgaagccgccgcctgatactggcatttcgtagatgtggtttgactatttctgtatgtctccatctattgatgagggtcttactcttttagtataaatagtaccgttaacttccaattaactagttttgacaacattcaaaaaagagtaataaacttcgccttaattttaataatcaacaccctcctagccttactactaataattattacattttgactaccacaactcaacggctacatagaaaaatccaccccttacgagtgcggcttcgaccctatatcccccgcccgcgtccctttctccataaaattcttcttagtagctattaccttcttattatttgatctagaaattgccctccttttacccctaccatgagccctacaaacaactaacctgccactaatagttatgtcatccctcttattaatcatcatcctagccctaagtctggcctatgagtgactacaaaaaggattagactgagccgaattggtatatagtttaaacaaaacgaatgatttcgactcattaaattatgataatcatatttaccaaatgcccctcatttacataaatattatactagcatttaccatctcacttctaggaatactagtatatcgctcacacctcatgtcctccctactatgcctagaaggaataatactatcgctgttcattatagctactctcataaccctcaacacccactccctcttagccaatattgtgcctattgccatactagtctttgccgcctgcgaagcagcggtgggcctagccctactagtctcaatctccaacacatatggcctagactacgtacataacctaaacctactccaatgctaaaactaatcgtcccaacaattatattactaccactgacatgactttccaaaaaacacataatttgaatcaacacaaccacccacagcctaattattagcatcatccctctactattttttaaccaaatcaacaacaacctatttagctgttccccaaccttttcctccgaccccctaacaacccccctcctaatactaactacctgactcctacccctcacaatcatggcaagccaacgccacttatccagtgaaccactatcacgaaaaaaactctacctctctatactaatctccctacaaatctccttaattataacattcacagccacagaactaatcatattttatatcttcttcgaaaccacacttatccccaccttggctatcatcacccgatgaggcaaccagccagaacgcctgaacgcaggcacatacttcctattctacaccctagtaggctcccttcccctactcatcgcactaatttacactcacaacaccctaggctcactaaacattctactactcaccctcactgcccaagaactatcaaactcctgagccaacaacttaatatgactagcttacacaatagcttttatagtaaagatacctctttacggactccacttatgactccctaaagcccatgtcgaagcccccatcgctgggtcaatagtacttgccgcagtactcttgaaactaggcggctatggtataatacgcctcacactcattctcaaccccctgacaaaacacatagcctaccccttccttgtactatccctatgaggcataattataacaagctccatctgcctacgacaaacagacctaaaatcgctcattgcatactcttcaatcagccacatagccctcgtagtaacagccattctcatccaaaccccctgaagcttcaccggcgcagtcattctcataatcgcccacggacttacatcctcattactattctgcctagcaaactcaaactacgaacgcactcacagtcgcatcataatcctctctcaaggacttcaaactctactcccactaatagctttttgatgacttctagcaagcctcgctaacctcgccttaccccccactattaacctactgggagaactctctgtgctagtaaccacgttctcctgatcaaatatcactctcctacttacaggactcaacatactagtcacagccctatactccctctacatatttaccacaacacaatggggctcactcacccaccacattaacaacataaaaccctcattcacacgagaaaacaccctcatgttcatacacctatcccccattctcctcctatccctcaaccccgacatcattaccgggttttcctcttgtaaatatagtttaaccaaaacatcagattgtgaatctgacaacagaggcttacgaccccttatttaccgagaaagctcacaagaactgctaactcatgcccccatgtctaacaacatggctttctcaacttttaaaggataacagctatccattggtcttaggccccaagaattttggtgcaactccaaataaaagtaataaccatgcacactactataaccaccctaaccctaacttccctaattccccccatccttaccaccctcgttaaccctaacaaaaaaaactcatacccccattatgtaaaatccattgtcgcatccacctttattatcagtctcttccccacaacaatattcatgtgcctagaccaagaagttattatctcgaactgacactgagccacaacccaaacaacccagctctccctaagcttcaaactagactacttctccataatattcatccctgtagcattgttcgttacatggtccatcatagaattctcactgtgatatataaactcagacccaaacattaatcagttcttcaaatatctactcatcttcctaattaccatactaatcttagttaccgctaacaacctattccaactgttcatcggctgagagggcgtaggaattatatccttcttgctcatcagttgatgatacgcccgagcagatgccaacacagcagccattcaagcaatcctatacaaccgtatcggcgatatcggtttcatcctcgccttagcatgatttatcctacactccaactcatgagacccacaacaaatagcccttctaaacgctaatccaagcctcaccccactactaggcctcctcctagcagcagcaggcaaatcagcccaattaggtctccacccctgactcccctcagccatagaaggccccaccccagtctcagccctactccactcaagcactatagttgtagcaggaatcttcttactcatccgcttccaccccctagcagaaaatagcccactaatccaaactctaacactatgcttaggcgctatcaccactctgttcgcagcagtctgcgcccttacacaaaatgacatcaaaaaaatcgtagccttctccacttcaagtcaactaggactcataatagttacaatcggcatcaaccaaccacacctagcattcctgcacatctgtacccacgccttcttcaaagccatactatttatgtgctccgggtccatcatccacaaccttaacaatgaacaagatattcgaaaaataggaggactactcaaaaccatacctctcacttcaacctccctcaccattggcagcctagcattagcaggaatacctttcctcacaggtttctactccaaagaccacatcatcgaaaccgcaaacatatcatacacaaacgcctgagccctatctattactctcatcgctacctccctgacaagcgcctatagcactcgaataattcttctcaccctaacaggtcaacctcgcttccccacccttactaacattaacgaaaataaccccaccctactaaaccccattaaacgcctggcagccggaagcctattcgcaggatttctcattactaacaacatttcccccgcatcccccttccaaacaacaatccccctctacctaaaactcacagccctcgctgtcactttcctaggacttctaacagccctagacctcaactacctaaccaacaaacttaaaataaaatccccactatgcacattttatttctccaacatactcggattctaccctagcatcacacaccgcacaatcccctatctaggccttcttacgagccaaaacctgcccctactcctcctagacctaacctgactagaaaagctattacctaaaacaatttcacagcaccaaatctccacctccatcatcacctcaacccaaaaaggcataattaaactttacttcctctctttcttcttcccactcatcctaaccctactcctaatcacataacctattcccccgagcaatttcaattacaatatatacaccaacaaacaatgttcaaccagtaactactactaatcaacgcccataatcatacaaagcccccgcaccaataggatcctcccgaatcaaccctgacccctctccttcataaattattcagcttcctacactattaaagtttaccacaaccaccaccccatcatactctttcacccacagcaccaatcctacctccatcgctaaccccactaaaacactcaccaagacctcaacccctgacccccatgcctcaggatactcctcaatagccatcgctgtagtatatccaaagacaaccatcattccccctaaataaattaaaaaaactattaaacccatataacctcccccaaaattcagaataataacacacccgaccacaccgctaacaatcaatactaaacccccataaataggagaaggcttagaagaaaaccccacaaaccccattactaaacccacactcaacagaaacaaagcatacatcattattctcgcacggactacaaccacgaccaatgatatgaaaaaccatcgttgtatttcaactacaagaacaccaatgaccccaatacgcaaaattaaccccctaataaaattaattaaccactcactcatcgacctccccaccccatccaacatctccgcatgatgaaacttcggctcactccttggcgcctgcctgatcctccaaatcaccacaggactattcctagccatgcactactcaccagacgcctcaaccgccttttcatcaatcgcccacatcactcgagacgtaaattatggctgaatcatccgctaccttcacgccaatggcgcctcaatattctttatctgcctcttcctacacatcgggcgaggcctatattacggatcatttctctactcagaaacctgaaacatcggcattatcctcctgcttgcaactatagcaacagccttcataggctatgtcctcccgtgaggccaaatatcattctgaggggccacagtaattacaaacttactatccgccatcccatacattgggacagacctagttcaatgaatctgaggaggctactcagtagacagtcccaccctcacacgattctttacctttcacttcatcttgcccttcattattgcagccctagcagcactccacctcctattcttgcacgaaacgggatcaaacaaccccctaggaatcacctcccattccgataaaatcaccttccacccttactacacaatcaaagacgccctcggcttacttctcttccttctctccttaatgacattaacactattctcaccagacctcctaggcgacccagacaattataccctagccaaccccttaaacacccctccccacatcaagcccgaatgatatttcctattcgcctacacaattctccgatccgtccctaacaaactaggaggcgtccttgccctattactatccatcctcatcctagcaataatccccatcctccatatatccaaacaacaaagcataatatttcgcccactaagccaatcactttattgactcctagccgcagacctcctcattctaacctgaatcggaggacaaccagtaagctacccttttaccatcattggacaagtagcatccgtactatacttcacaacaatcctaatcctaataccaactatctccctaattgaaaacaaaatactcaaatgggcctgtccttgtagtataaactaatacaccagtcttgtaaaccggagatgaaaacctttttccaaggacaaatcagagaaaaagtctttaactccaccattagcacccaaagctaagattctaatttaaactattctctgttctttcatggggaagcagatttgggtaccacccaagtattgactcacccatcaacaaccgctatgtatttcgtacattactgccagccaccatgaatattgtacagtaccataaatacttgaccacctgtagtacataaaaacccaatccacatcaaaaccccctccccatgcttacaagcaagtacagcaatcaacccccaactatcacacatcaactgcaactccaaagccacccctcacccactaggataccaacaaacctacccacccttaacagtacatagcacataaagccatttaccgtacatagcacattacagtcaaatcccttctcgtccccatggatgacccccctcagataggggtcccttgaccaccatcctccgtgaaatcaatatcccgcacaagagtgctactctcctcgctccgggcccataacacttgggggtagctaaagtgaactgtatccgacatctggttcctacttcagggccataaagcctaaatagcccacacgttccccttaaataagacatcacgatg

SEQ ID NO: 23 - DNA, 16570 bp, Homo sapiens mitochondrial
  3108: "n" refers to a nucleotide at position 3107 of the Cambridge Reference Sequence (CRS, Anderson et al. 1981 Nature 290:457-465), later determined to be absent from the human mtDNA sequence according to the revised CRS (rCRS, Andrews et al. 1999 Nature Genetics 23:147); "n" therefore represents a single nucleotide deletion at a position corresponding to nucleotide 3107 of SEQ ID NO:1 as provided herein.
gatcacaggtctatcaccctattaaccactcacgggagctctccatgcatttggtattttcgtctggggggtatgcacgcgatagcattgcgagacgctggagccggagcaccctatgtcgcagtatctgtctttgattcctgcctcatcctattatttatcgcacctacgttcaatattacaggcgaacatacttactaaagtgtgttaattaattaatgcttgtaggacataataataacaattgaatgtctgcacagccgctttccacacagacatcataacaaaaaatttccaccaaaccccccctcccccgccttctggccacagcacttaaacacatctctgccaaaccccaaaaacaaagaaccctaacaccagcctaaccagatttcaaattttatcttttggcggtatgcacttttaacagtcaccccccaactaacacattattttcccctcccactcccatactaccaatctcatcaatacaacccccgcccatcctacccagcacacacacaccgctgctaaccccataccccgaaccaaccaaaccccaaagacaccccccacagtttatgtagcttacctcctcaaagcaatacactgaaaatgtttagacgggctcacatcaccccataaacaaataggtttggtcctagcctttctattagctcttagtaagattacacatgcaagcatccccgttccagtgagttcaccctctaaatcaccacgatcaaaagggacaagcatcaagcacgcagcaatgcagctcaaaacgcttagcctagccacacccccacgggaaacagcagtgattaacctttagcaataaacgaaagtttaactaagctatactaaccccagggttggtcaatttcgtgccagccaccgcggtcacacgattaacccaagtcaatagaagccggcgtaaagagtgttttagatcaccccctccccaataaagctaaaactcacctgagttgtaaaaaactccagttgacacaaaatagactacgaaagtggctttaacatatctgaacacacaatagctaagacccaaactgggattagataccccactatgcttagccctaaacctcaacagttaaatcaacaaaactgctcgccagaacactacgagccacagcttaaaactcaaaggacctggcggtgcttcatatccctctagaggagcctgttctgtaatcgataaaccccgatcaacctcaccacctcttgctcagcctatataccgccatcttcagcaaaccctgatgaaggctacaaagtaagcgcaagtacccacgtaaagacgttaggtcaaggtgtagcccatgaggtggcaagaaatgggctacattttctaccccagaaaactacgatagcccttatgaaacttaagggtcgaaggtggatttagcagtaaactgagagtagagtgcttagttgaacagggccctgaagcgcgtacacaccgcccgtcaccctcctcaagtatacttcaaaggacatttaactaaaacccctacgcatttatatagaggagacaagtcgtaacatggtaagtgtactggaaagtgcacttggacgaaccagagtgtagcttaacacaaagcacccaacttacacttaggagatttcaacttaacttgaccgctctgagctaaacctagccccaaacccactccaccttactaccagacaaccttagccaaaccatttacccaaataaagtataggcgatagaaattgaaacctggcgcaatagatatagtaccgcaagggaaagatgaaaaattataaccaagcataatatagcaaggactaacccctataccttctgcataatgaattaactagaaataactttgcaaggagagccaaagctaagacccccgaaaccagacgagctacctaagaacagctaaaagagcacacccgtctatgtagcaaaatagtgggaagatttataggtagaggcgacaaacctaccgagcctggtgatagctggttgtccaagatagaatcttagttcaactttaaatttgcccacagaaccctctaaatccccttgtaaatttaactgttagtccaaagaggaacagctctttggacactaggaaaaaaccttgtagagagagtaaaaaatttaacacccatagtaggcctaaaagcagccaccaattaagaaagcgttcaagctcaacacccactacctaaaaaatcccaaacatataactgaactcctcacacccaattggaccaatctatcaccctatagaagaactaatgttagtataagtaacatgaaaacattctcctccgcataagcctgcgtcagattaaaacactgaactgacaattaacagcccaatatctacaatcaaccaacaagtcattattaccctcactgtcaacccaacacaggcatgctcataaggaaaggttaaaaaaagtaaaaggaactcggcaaatcttaccccgcctgtttaccaaaaacatcacctctagcatcaccagtattagaggcaccgcctgcccagtgacacatgtttaacggccgcggtaccctaaccgtgcaaaggtagcataatcacttgttccttaaatagggacctgtatgaatggctccacgagggttcagctgtctcttacttttaaccagtgaaattgacctgcccgtgaagaggcgggcataacacagcaagacgagaagaccctatggagctttaatttattaatgcaaacagtacctaacaaacccacaggtcctaaactaccaaacctgcattaaaaatttcggttggggcgacctcggagcagaacccaacctccgagcagtacatgctaagacttcaccagtcaaagcgaactactatactcaattgatccaataacttgaccaacggaacaagttaccctagggataacagcgcaatcctattctagagtccatatcaacaatagggtttacgacctcgatgttggatcaggacatcccaatggtgcagccgctattaaaggttcgtttgttcaacgattaaagtcctacgtgatctgagttcagaccggagtaatccaggtcggtttctatctacnttcaaattcctccctgtacgaaaggacaagagaaataaggcctacttcacaaagcgccttcccccgtaaatgatatcatctcaacttagtattatacccacacccacccaagaacagggtttgttaagatggcagagcccggtaatcgcataaaacttaaaactttacagtcagaggttcaattcctcttcttaacaacatacccatggccaacctcctactcctcattgtacccattctaatcgcaatggcattcctaatgcttaccgaacgaaaaattctaggctatatacaactacgcaaaggccccaacgttgtaggcccctacgggctactacaacccttcgctgacgccataaaactcttcaccaaagagcccctaaaacccgccacatctaccatcaccctctacatcaccgccccgaccttagctctcaccatcgctcttctactatgaacccccctccccatacccaaccccctggtcaacctcaacctaggcctcctatttattctagccacctctagcctagccgtttactcaatcctctgatcagggtgagcatcaaactcaaactacgccctgatcggcgcactgcgagcagtagcccaaacaatctcatatgaagtcaccctagccatcattctactatcaacattactaataagtggctcctttaacctctccacccttatcacaacacaagaacacctctgattactcctgccatcatgacccttggccataatatgatttatctccacactagcagagaccaaccgaacccccttcgaccttgccgaaggggagtccgaactagtctcaggcttcaacatcgaatacgccgcaggccccttcgccctattcttcatagccgaatacacaaacattattataataaacaccctcaccactacaatcttcctaggaacaacatatgacgcactctcccctgaactctacacaacatattttgtcaccaagaccctacttctaacctccctgttcttatgaattcgaacagcatacccccgattccgctacgaccaactcatacacctcctatgaaaaaacttcctaccactcaccctagcattacttatatgatatgtctccatacccattacaatctccagcattccccctcaaacctaagaaatatgtctgataaaagagttactttgatagagtaaataataggagcttaaacccccttatttctaggactatgagaatcgaacccatccctgagaatccaaaattctccgtgccacctatcacaccccatcctaaagtaaggtcagctaaataagctatcgggcccataccccgaaaatgttggttatacccttcccgtactaattaatcccctggcccaacccgtcatctactctaccatctttgcaggcacactcatcacagcgctaagctcgcactgattttttacctgagtaggcctagaaataaacatgctagcttttattccagttctaaccaaaaaaataaaccctcgttccacagaagctgccatcaagtatttcctcacgcaagcaaccgcatccataatccttctaatagctatcctcttcaacaatatactctccggacaatgaaccataaccaatactaccaatcaatactcatcattaataatcataatggctatagcaataaaactaggaatagccccctttcacttctgagtcccagaggttacccaaggcacccctctgacatccggcctgcttcttctcacatgacaaaaactagcccccatctcaatcatataccaaatctctccctcactaaacgtaagccttctcctcactctctcaatcttatccatcatagcaggcagttgaggtggattaaaccaaacccagctacgcaaaatcctagcatactcctcaattacccacataggatgaataatagcagttctaccgtacaaccctaacataaccattcttaatttaactatttatattatcctaactactaccgcattcctactactcaacttaaactccagcaccacgaccctactactatctcgcacctgaaacaagctaacatgactaacacccttaattccatccaccctcctctccctaggaggcctgcccccgctaaccggctttttgcccaaatgggccattatcgaagaattcacaaaaaacaatagcctcatcatccccaccatcatagccaccatcaccctccttaacctctacttctacctacgcctaatctactccacctcaatcacactactccccatatctaacaacgtaaaaataaaatgacagtttgaacatacaaaacccaccccattcctccccacactcatcgcccttaccacgctactcctacctatctccccttttatactaataatcttatagaaatttaggttaaatacagaccaagagccttcaaagccctcagtaagttgcaatacttaatttctgtaacagctaaggactgcaaaaccccactctgcatcaactgaacgcaaatcagccactttaattaagctaagcccttactagaccaatgggacttaaacccacaaacacttagttaacagctaagcaccctaatcaactggcttcaatctacttctcccgccgccgggaaaaaaggcgggagaagccccggcaggtttgaagctgcttcttcgaatttgcaattcaatatgaaaatcacctcggagctggtaaaaagaggcctaacccctgtctttagatttacagtccaatgcttcactcagccattttacctcacccccactgatgttcgccgaccgttgactattctctacaaaccacaaagacattggaacactatacctattattcggcgcatgagctggagtcctaggcacagctctaagcctccttattcgagccgagctgggccagccaggcaaccttctaggtaacgaccacatctacaacgttatcgtcacagcccatgcatttgtaataatcttcttcatagtaatacccatcataatcggaggctttggcaactgactagttcccctaataatcggtgcccccgatatggcgtttccccgcataaacaacataagcttctgactcttacctccctctctcctactcctgctcgcatctgctatagtggaggccggagcaggaacaggttgaacagtctaccctcccttagcagggaactactcccaccctggagcctccgtagacctaaccatcttctccttacacctagcaggtgtctcctctatcttaggggccatcaatttcatcacaacaattatcaatataaaaccccctgccataacccaataccaaacgcccctcttcgtctgatccgtcctaatcacagcagtcctacttctcctatctctcccagtcctagctgctggcatcactatactactaacagaccgcaacctcaacaccaccttcttcgaccccgccggaggaggagaccccattctataccaacacctattctgatttttcggtcaccctgaagtttatattcttatcctaccaggcttcggaataatctcccatattgtaacttactactccggaaaaaaagaaccatttggatacataggtatggtctgagctatgatatcaattggcttcctagggtttatcgtgtgagcacaccatatatttacagtaggaatagacgtagacacacgagcatatttcacctccgctaccataatcatcgctatccccaccggcgtcaaagtatttagctgactcgccacactccacggaagcaatatgaaatgatctgctgcagtgctctgagccctaggattcatctttcttttcaccgtaggtggcctgactggcattgtattagcaaactcatcactagacatcgtactacacgacacgtactacgttgtagcccacttccactatgtcctatcaataggagctgtatttgccatcataggaggcttcattcactgatttcccctattctcaggctacaccctagaccaaacctacgccaaaatccatttcactatcatattcatcggcgtaaatctaactttcttcccacaacactttctcggcctatccggaatgccccgacgttactcggactaccccgatgcatacaccacatgaaacatcctatcatctgtaggctcattcatttctctaacagcagtaatattaataattttcatgatttgagaagccttcgcttcgaagcgaaaagtcctaatagtagaagaaccctccataaacctggagtgactatatggatgccccccaccctaccacacattcgaagaacccgtatacataaaatctagacaaaaaaggaaggaatcgaaccccccaaagctggtttcaagccaaccccatggcctccatgactttttcaaaaaggtattagaaaaaccatttcataactttgtcaaagttaaattataggctaaatcctatatatcttaatggcacatgcagcgcaagtaggtctacaagacgctacttcccctatcatagaagagcttatcacctttcatgatcacgccctcataatcattttccttatctgcttcctagtcctgtatgcccttttcctaacactcacaacaaaactaactaatactaacatctcagacgctcaggaaatagaaaccgtctgaactatcctgcccgccatcatcctagtcctcatcgccctcccatccctacgcatcctttacataacagacgaggtcaacgatccctcccttaccatcaaatcaattggccaccaatggtactgaacctacgagtacaccgactacggcggactaatcttcaactcctacatacttcccccattattcctagaaccaggcgacctgcgactccttgacgttgacaatcgagtagtactcccgattgaagcccccattcgtataataattacatcacaagacgtcttgcactcatgagctgtccccacattaggcttaaaaacagatgcaattcccggacgtctaaaccaaaccactttcaccgctacacgaccgggggtatactacggtcaatgctctgaaatctgtggagcaaaccacagtttcatgcccatcgtcctagaattaattcccctaaaaatctttgaaatagggcccgtatttaccctatagcaccccctctaccccctctagagcccactgtaaagctaacttagcattaaccttttaagttaaagattaagagaaccaacacctctttacagtgaaatgccccaactaaatactaccgtatggcccaccataattacccccatactccttacactattcctcatcacccaactaaaaatattaaacacaaactaccacctacctccctcaccaaagcccataaaaataaaaaattataacaaaccctgagaaccaaaatgaacgaaaatctgttcgcttcattcattgcccccacaatcctaggcctacccgccgcagtactgatcattctatttccccctctattgatccccacctccaaatatctcatcaacaaccgactaatcaccacccaacaatgactaatcaaactaacctcaaaacaaatgataaccatacacaacactaaaggacgaacctgatctcttatactagtatccttaatcatttttattgccacaactaacctcctcggactcctgcctcactcatttacaccaaccacccaactatctataaacctagccatggccatccccttatgagcgggcgcagtgattataggctttcgctctaagattaaaaatgccctagcccacttcttaccacaaggcacacctacaccccttatccccatactagttattatcgaaaccatcagcctactcattcaaccaatagccctggccgtacgcctaaccgctaacattactgcaggccacctactcatgcacctaattggaagcgccaccctagcaatatcaaccattaaccttccctctacacttatcatcttcacaattctaattctactgactatcctagaaatcgctgtcgccttaatccaagcctacgttttcacacttctagtaagcctctacctgcacgacaacacataatgacccaccaatcacatgcctatcatatagtaaaacccagcccatgacccctaacaggggccctctcagccctcctaatgacctccggcctagccatgtgatttcacttccactccataacgctcctcatactaggcctactaaccaacacactaaccatataccaatgatggcgcgatgtaacacgagaaagcacataccaaggccaccacacaccacctgtccaaaaaggccttcgatacgggataatcctatttattacctcagaagtttttttcttcgcaggatttttctgagccttttaccactccagcctagcccctaccccccaattaggagggcactggcccccaacaggcatcaccccgctaaatcccctagaagtcccactcctaaacacatccgtattactcgcatcaggagtatcaatcacctgagctcaccatagtctaatagaaaacaaccgaaaccaaataattcaagcactgcttattacaattttactgggtctctattttaccctcctacaagcctcagagtacttcgagtctcccttcaccatttccgacggcatctacggctcaacattttttgtagccacaggcttccacggacttcacgtcattattggctcaactttcctcactatctgcttcatccgccaactaatatttcactttacatccaaacatcactttggcttcgaagccgccgcctgatactggcattttgtagatgtggtttgactatttctgtatgtctccatctattgatgagggtcttactcttttagtataaatagtaccgttaacttccaattaactagttttgacaacattcaaaaaagagtaataaacttcgccttaattttaataatcaacaccctcctagccttactactaataattattacattttgactaccacaactcaacggctacatagaaaaatccaccccttacgagtgcggcttcgaccctatatcccccgcccgcgtccctttctccataaaattcttcttagtagctattaccttcttattatttgatctagaaattgccctccttttacccctaccatgagccctacaaacaactaacctgccactaatagttatgtcatccctcttattaatcatcatcctagccctaagtctggcctatgagtgactacaaaaaggattagactgaaccgaattggtatatagtttaaacaaaacgaatgatttcgactcattaaattatgataatcatatttaccaaatgcccctcatttacataaatattatactagcatttaccatctcacttctaggaatactagtatatcgctcacacctcatatcctccctactatgcctagaaggaataatactatcgctgttcattatagctactctcataaccctcaacacccactccctcttagccaatattgtgcctattgccatactagtctttgccgcctgcgaagcagcggtgggcctagccctactagtctcaatctccaacacatatggcctagactacgtacataacctaaacctactccaatgctaaaactaatcgtcccaacaattatattactaccactgacatgactttccaaaaaacacataatttgaatcaacacaaccacccacagcctaattattagcatcatccctctactattttttaaccaaatcaacaacaacctatttagctgttccccaaccttttcctccgaccccctaacaacccccctcctaatactaactacctgactcctacccctcacaatcatggcaagccaacgccacttatccagtgaaccactatcacgaaaaaaactctacctctctatactaatctccctacaaatctccttaattataacattcacagccacagaactaatcatattttatatcttcttcgaaaccacacttatccccaccttggctatcatcacccgatgaggcaaccagccagaacgcctgaacgcaggcacatacttcctattctacaccctagtaggctcccttcccctactcatcgcactaatttacactcacaacaccctaggctcactaaacattctactactcactctcactgcccaagaactatcaaactcctgagccaacaacttaatatgactagcttacacaatagcttttatagtaaagatacctctttacggactccacttatgactccctaaagcccatgtcgaagcccccatcgctgggtcaatagtacttgccgcagtactcttaaaactaggcggctatggtataatacgcctcacactcattctcaaccccctgacaaaacacatagcctaccccttccttgtactatccctatgaggcataattataacaagctccatctgcctacgacaaacagacctaaaatcgctcattgcatactcttcaatcagccacatagccctcgtagtaacagccattctcatccaaaccccctgaagcttcaccggcgcagtcattctcataatcgcccacgggcttacatcctcattactattctgcctagcaaactcaaactacgaacgcactcacagtcgcatcataatcctctctcaaggacttcaaactctactcccactaatagctttttgatgacttctagcaagcctcgctaacctcgccttaccccccactattaacctactgggagaactctctgtgctagtaaccacgttctcctgatcaaatatcactctcctacttacaggactcaacatactagtcacagccctatactccctctacatatttaccacaacacaatggggctcactcacccaccacattaacaacataaaaccctcattcacacgagaaaacaccctcatgttcatacacctatcccccattctcctcctatccctcaaccccgacatcattaccgggttttcctcttgtaaatatagtttaaccaaaacatcagattgtgaatctgacaacagaggcttacgaccccttatttaccgagaaagctcacaagaactgctaactcatgcccccatgtctaacaacatggctttctcaacttttaaaggataacagctatccattggtcttaggccccaaaaattttggtgcaactccaaataaaagtaataaccatgcacactactataaccaccctaaccctgacttccctaattccccccatccttaccaccctcgttaaccctaacaaaaaaaactcatacccccattatgtaaaatccattgtcgcatccacctttattatcagtctcttccccacaacaatattcatgtgcctagaccaagaagttattatctcgaactgacactgagccacaacccaaacaacccagctctccctaagcttcaaactagactacttctccataatattcatccctgtagcattgttcgttacatggtccatcatagaattctcactgtgatatataaactcagacccaaacattaatcagttcttcaaatatctactcatcttcctaattaccatactaatcttagttaccgctaacaacctattccaactgttcatcggctgagagggcgtaggaattatatccttcttgctcatcagttgatgatacgcccgagcagatgccaacacagcagccattcaagcaatcctatataaccgtatcggcgatatcggtttcatcctcgccttagcatgatttatcctacactccaactcatgagacccacaacaaatagcccttctaaacgctaatccaagcctcaccccactactaggcctcctcctagcagcagcaggcaaatcagcccaattaggtctccacccctgactcccctcagccatagaaggccccaccccagtctcagccctactccactcaagcactatagttgtagcaggaatcttcttactcatccgcttccaccccctagcagaaaatagcccactaatccaaactctaacactatgcttaggcgctatcaccactctgttcgcagcagtctgcgcccttacacaaaatgacatcaaaaaaatcgtagccttctccacttcaagtcaactaggactcataatagttacaatcggcatcaaccaaccacacctagcattcctgcacatctgtacccacgccttcttcaaagccatactatttatgtgctccgggtccatcatccacaaccttaacaatgaacaagatattcgaaaaataggaggactactcaaaaccatacctctcacttcaacctccctcaccattggcagcctagcattagcaggaatacctttcctcacaggtttctactccaaagaccacatcatcgaaaccgcaaacatatcatacacaaacgcctgagccctatctattactctcatcgctacctccctgacaagcgcctatagcactcgaataattcttctcaccctaacaggtcaacctcgcttccccacccttactaacattaacgaaaataaccccaccctactaaaccccattaaacgcctggcagccggaagcctattcgcaggatttctcattactaacaacatttcccccgcatcccccttccaaacaacaatccccctctacctaaaactcacagccctcgctgtcactttcctaggacttctaacagccctagacctcaactacctaaccaacaaacttaaaataaaatccccactatgcacattttatttctccaacatactcggattctaccctagcatcacacaccgcacaatcccctatctaggccttcttacgagccaaaacctgcccctactcctcctagacctaacctgactagaaaagctattacctaaaacaatttcacagcaccaaatctccacctccatcatcacctcaacccaaaaaggcataattaaactttacttcctctctttcttcttcccactcatcctaaccctactcctaatcacataacctattcccccgagcaatctcaattacaatatatacaccaacaaacaatgttcaaccagtaactactactaatcaacgcccataatcatacaaagcccccgcaccaataggatcctcccgaatcaaccctgacccctctccttcataaattattcagcttcctacactattaaagtttaccacaaccaccaccccatcatactctttcacccacagcaccaatcctacctccatcgctaaccccactaaaacactcaccaagacctcaacccctgacccccatgcctcaggatactcctcaatagccatcgctgtagtatatccaaagacaaccatcattccccctaaataaattaaaaaaactattaaacccatataacctcccccaaaattcagaataataacacacccgaccacaccgctaacaatcaatactaaacccccataaataggagaaggcttagaagaaaaccccacaaaccccattactaaacccacactcaacagaaacaaagcatacatcattattctcgcacggactacaaccacgaccaatgatatgaaaaaccatcgttgtatttcaactacaagaacaccaatgaccccaatacgcaaaactaaccccctaataaaattaattaaccactcattcatcgacctccccaccccatccaacatctccgcatgatgaaacttcggctcactccttggcgcctgcctgatcctccaaatcaccacaggactattcctagccatgcactactcaccagacgcctcaaccgccttttcatcaatcgcccacatcactcgagacgtaaattatggctgaatcatccgctaccttcacgccaatggcgcctcaatattctttatctgcctcttcctacacatcgggcgaggcctatattacggatcatttctctactcagaaacctgaaacatcggcattatcctcctgcttgcaactatagcaacagccttcataggctatgtcctcccgtgaggccaaatatcattctgaggggccacagtaattacaaacttactatccgccatcccatacattgggacagacctagttcaatgaatctgaggaggctactcagtagacagtcccaccctcacacgattctttacctttcacttcatcttgcccttcattattgcagccctagcagcactccacctcctattcttgcacgaaacgggatcaaacaaccccctaggaatcacctcccattccgataaaatcaccttccacccttactacacaatcaaagacgccctcggcttacttctcttccttctctccttaatgacattaacactattctcaccagacctcctaggcgacccagacaattataccctagccaaccccttaaacacccctccccacatcaagcccgaatgatatttcctattcgcctacacaattctccgatccgtccctaacaaactaggaggcgtccttgccctattactatccatcctcatcctagcaataatccccatcctccatatatccaaacaacaaagcataatatttcgcccactaagccaatcactttattgactcctagccgcagacctcctcattctaacctgaatcggaggacaaccagtaagctacccttttaccatcattggacaagtagcatccgtactatacttcacaacaatcctaatcctaataccaactatctccctaattgaaaacaaaatactcaaatgggcctgtccttgtagtataaactaatacaccagtcttgtaaaccggagatgaaaacctttttccaaggacaaatcagagaaaaagtctttaactccaccattagcacccaaagctaagattctaatttaaactattctctgttctttcatggggaagcagatttgggtaccacccaagtattgactcacccatcaacaaccgctatgtatttcgtacattactgccagccaccatgaatattgtacggtaccataaatacttgaccacctgtagtacataaaaacccaatccacatcaaaaccccctccccatgcttacaagcaagtacagcaatcaaccctcaactatcacacatcaactgcaactccaaagccacccctcacccactaggataccaacaaacctacccacccttaacagtacatagtacataaagccatttaccgtacatagcacattacagtcaaatcccttctcgtccccatggatgacccccctcagataggggtcccttgaccaccatcctccgtgaaatcaatatcccgcacaagagtgctactctcctcgctccgggcccataacacttgggggtagctaaagtgaactgtatccgacatctggttcctacttcagggccataaagcctaaatagcccacacgttccccttaaataagacatcacgatg

SEQ ID NO: 24 - DNA, 16568 bp, Homo sapiens mitochondrial
  3106: "n" refers to a nucleotide at position 3107 of the Cambridge Reference Sequence (CRS, Anderson et al. 1981 Nature 290:457-465), later determined to be absent from the human mtDNA sequence according to the revised CRS (rCRS, Andrews et al. 1999 Nature Genetics 23:147); "n" therefore represents a single nucleotide deletion at a position corresponding to nucleotide 3107 of SEQ ID NO:1 as provided herein.
gatcacaggtctatcaccctattaaccactcacgggagctctccatgcatttggtattttcgtctggggggtatgcacgcgatagcattgcgagacgctggagccggagcaccctatgtcgcagtatctgtctttgattcctgcctcatcctattatttatcgcacctacgttcaatattacaggcgaacatacttactaaagtgtgttaattaattaatgcttgtaggacataataataacaattgaatgtctgcacagccgctttccacacagacatcataacaaaaaatttccaccaaaccccccctcccccgccttctggccacagcacttaaacacatctctgccaaaccccaaaaacaaagaaccctaacaccagcctaaccagatttcaaattttatcttttggcggtatgcacttttaacagtcaccccccaactaacacattatttttccctcccactcccatactactaatctcatcaatacaacccccgcccatcctacccagcacacacaccgctgctaaccccataccccgaaccaaccaaaccccaaagacaccccccacagtttatgtagcttacctcctcaaagcaatacactgaaaatgtttagacgggctcacatcaccccataaacaaataggtttggtcctagcctttctattagctcttagtaagattacacatgcaagcatccccgttccagtgagttcaccctctaaatcaccacgatcaaaagggacaagcatcaagcacgcagcaatgcagctcaaaacgcttagcctagccacacccccacgggaaacagcagtgattaacctttagcaataaacgaaagtttaactaagctatactaaccctagggttggtcaatttcgtgccagccaccgcggtcacacgattaacccaagtcaatagaagccggcgtaaagagtgttttagatcaccccctccccaataaagctaaaactcacctgagttgtaaaaaactccagttgacacaaaatagactacgaaagtggctttaacatatctgaacacacaatagctaagacccaaactgggattagataccccactatgcttagccctaaacctcaacagttaaatcaacaaaactgctcgccagaacactacgagccacagcttaaaactcaaaggacctggcggtgcttcatatccctctagaggagcctgttctgtaatcgataaaccccgatcaacctcaccacctcttgctcagcctatataccgccatcttcagcaaaccctgatgaaggctacaaagtaagcgcaagtacccacgtaaagacgttaggtcaaggtgtagcccatgaggtggcaagaaatgggctacattttctaccccagaaaactacgatagcccttatgaaacttaagggtcgaaggtggatttagcagtaaactgagagtagagtgcttagttgaacagggccctgaagcgcgtacacaccgcccgtcaccctcctcaagtatacttcaaaggacatttaactaaaacccctacgcatttatatagaggagacaagtcgtaacatggtaagtgtactggaaagtgcacttggacgaaccagagtgtagcttaacacaaagcacccaacttacacttaggagatttcaacttaacttgaccgctctgagctaaacctagccccaaacccactccaccttactaccagacaaccttagccaaaccatttacccaaataaagtataggcgatagaaattgaaacctggcgcaatagatatagtaccgcaagggaaagatgaaaaattataaccaagcataatatagcaaggactaacccctataccttctgcataatgaattaactagaaataactttgcaaggagagccaaagctaagacccccgaaaccagacgagctacctaagaacagctaaaagagcacacccgtctatgtagcaaaatagtgggaagatttataggtagaggcgacaaacctaccgagcctggtgatagctggttgtccaagatagaatcttagttcaactttaaatttgcccacagaaccctctaaatccccttgtaaatttaactgttagtccaaagaggaacagctctttggacactaggaaaaaaccttgtagagagagtaaaaaatttaacacccatagtaggcctaaaagcagccaccaattaagaaagcgttcaagctcaacacccactacctaaaaaatcccaaacatataactgaactcctcacacccaattggaccaatctatcaccctatagaagaactaatgttagtataagtaacatgaaaacattctcctccgcataagcctgcgtcagattaaaacactgaactgacaattaacagcccaatatctacaatcaaccaacaagtcattattaccctcactgtcaacccaacacaggcatgctcataaggaaaggttaaaaaaagtaaaaggaactcggcaaatcttaccccgcctgtttaccaaaaacatcacctctagcatcaccagtattagaggcaccgcctgcccagtgacacatgtttaacggccgcggtaccctaaccgtgcaaaggtagcataatcacttgttccttaaatagggacctgtatgaatggctccacgagggttcagctgtctcttacttttaaccagtgaaattgacctgcccgtgaagaggcgggcataacacagcaagacgagaagaccctatggagctttaatttattaatgcaaacagtacctaacaaacccacaggtcctaaactaccaaacctgcattaaaaatttcggttggggcgacctcggagcagaacccaacctccgagcagtacatgctaagacttcaccagtcaaagcgaactactatactcaattgatccaataacttgaccaacggaacaagttaccctagggataacagcgcaatcctattctagagtccatatcaacaatagggtttacgacctcgatgttggatcaggacatcccgatggtgcagccgctattaaaggttcgtttgttcaacgattaaagtcctacgtgatctgagttcagaccggagtaatccaggtcggtttctatctacnttcaaattcctccctgtacgaaaggacaagagaaataaggcctacttcacaaagcgccttcccccgtaaatgatatcatctcaacttagtattatacccacacccacccaagaacagggtttgttaagatggcagagcccggtaatcgcataaaacttaaaactttacagtcagaggttcaattcctcttcttaacaacatacccatggccaacctcctactcctcattgtacccattctaatcgcaatggcattcctaatgcttaccgaacgaaaaattctaggctatatacaactacgcaaaggccccaacgttgtaggcccctacgggctactacaacccttcgctgacgccataaaactcttcaccaaagagcccctaaaacccgccacatctaccatcaccctctacatcaccgccccgaccttagctctcaccatcgctcttctactatgaacccccctccccatacccaaccccctggtcaacctcaacctaggcctcctatttattctagccacctctagcctagccgtttactcaatcctctgatcagggtgagcatcaaactcaaactacgccctgatcggcgcactgcgagcagtagcccaaacaatctcatatgaagtcaccctagccatcattctactatcaacattactaataagtggctcctttaacctctccacccttatcacaacacaagaacacctctgattactcctgccatcatgacccttggccataatatgatttatctccacactagcagagaccaaccgaacccccttcgaccttgccgaaggggagtccgaactagtctcaggcttcaacatcgaatacgccgcaggccccttcgccctattcttcatagccgaatacacaaacattattataataaacaccctcaccactacaatcttcctaggaacaacatatgacgcactctcccctgaactctacacaacatattttgtcaccaagaccctacttctaacctccctgttcttatgaattcgaacagcatacccccgattccgctacgaccaactcatacacctcctatgaaaaaacttcctaccactcaccctagcattacttatatgatatgtctccatacccattacaatctccagcattccccctcaaacctaagaaatatgtctgataaaagagttactttgatagagtaaataataggagcttaaacccccttatttctaggaccatgagaatcgaacccatccctgagaatccaaaattctccgtgccacctatcacaccccatcctaaagtaaggtcagctaaataagctatcgggcccataccccgaaaatgttggttatacccttcccgtactaattaatcccctggcccaacccgtcatctactctaccatctttgcaggcacactcatcacagcgctaagctcgcactgattttttacctgagtaggcctagaaataaacatgctagcttttattccagttctaaccaaaaaaataaaccctcgttccacagaagctgccatcaagtatttcctcacgcaagcaaccgcatccataatccttctaatagctatcctcttcaacaatatactctccggacaatgaaccataaccaatactaccaatcaatactcatcattaataatcataatggctatagcaataaaactaggaatagccccctttcacttctgagtcccagaggttacccaaggcacccctctgacatccggcctgcttcttctcacatgacaaaaactagcccccatctcaatcatataccaaatctctccctcactaaacgtaagccttctcctcactctctcaatcttatccatcatagcaggcagttgaggtggattaaaccaaacccagctacgcaaaatcttagcatactcctcaattacccacataggatgaataatagcagttctaccgtacaaccctaacataaccattcttaatttaactatttatattatcctaactactaccgcattcctactactcaacttaaactccagcaccacgaccctactactatctcgcacctgaaacaagctaacatgactaacacccttaattccatccaccctcctctccctaggaggcctgcccccgctaaccggctttttgcccaaatgggccattatcgaagaattcacaaaaaacaatagcctcatcatccccaccatcatagccaccatcaccctccttaacctctacttctacctacgcctaatctactccacctcaatcacactactccccatatctaacaacgtaaaaataaaatgacagtttgaacatacaaaacccaccccattcctccccacactcatcgcccttaccacgctactcctacctatctccccttttatactaataatcttatagaaatttaggttaaatacagaccaagagccttcaaagccctcagtaagttgcaatacttaatttctgtaacagctaaggactgcaaaaccccactctgcatcaactgaacgcaaatcagccactttaattaagctaagcccttactagaccaatgggacttaaacccacaaacacttagttaacagctaagcaccctaatcaactggcttcaatctacttctcccgccgccgggaaaaaaggcgggagaagccccggcaggtttgaagctgcttcttcgaatttgcaattcaatatgaaaatcacctcggagctggtaaaaagaggcctaacccctgtctttagatttacagtccaatgcttcactcagccattttacctcacccccactgatgttcgccgaccgttgactattctctacaaaccacaaagacattggaacactatacctattattcggcgcatgagctggagtcctaggcacagctctaagcctccttattcgagccgagctgggccagccaggcaaccttctaggtaacgaccacatctacaacgttatcgtcacagcccatgcatttgtaataatcttcttcatagtaatacccatcataatcggaggctttggcaactgactagttcccctaataatcggtgcccccgatatggcgtttccccgcataaacaacataagcttctgactcttacctccctctctcctactcctgctcgcatctgctatagtggaggccggagcaggaacaggttgaacagtctaccctcccttagcagggaactactcccaccctggagcctccgtagacctaaccatcttctccttacacctagcaggtgtctcctctatcttaggggccatcaatttcatcacaacaattatcaatataaaaccccctgccataacccaataccaaacgcccctcttcgtctgatccgtcctaatcacagcagtcctacttctcctatctctcccagtcctagctgctggcatcactatactactaacagaccgcaacctcaacaccaccttcttcgaccccgccggaggaggagaccccattctataccaacacctattctgatttttcggtcaccctgaagtttatattcttatcctaccaggcttcggaataatctcccatattgtaacttactactccggaaaaaaagaaccatttggatacataggtatggtctgagctatgatatcaattggcttcctagggtttatcgtgtgagcacaccatatatttacagtaggaatagacgtagacacacgagcatatttcacctccgctaccataatcatcgctatccccaccggcgtcaaagtatttagctgactcgccacactccacggaagcaatatgaaatgatctgctgcagtgctctgagccctaggattcatctttcttttcaccgtaggtggcctgactggcattgtattagcaaactcatcactagacatcgtactacacgacacgtactacgttgtagcccacttccactatgtcctatcaataggagctgtatttgccatcataggaggcttcattcactgatttcccctattctcaggctacaccctagaccaaacctacgccaaaatccatttcactatcatattcatcggcgtaaatctaactttcttcccacaacactttctcggcctatccggaatgccccgacgttactcggactaccccgatgcatacaccacatgaaacatcctatcatctgtaggctcattcatttctctaacagcagtaatattaataattttcatgatttgagaagccttcgcttcgaagcgaaaagtcctaatagtagaagaaccctccataaacctggagtgactatatggatgccccccaccctaccacacattcgaagaacccgtatacataaaatctagacaaaaaaggaaggaatcgaaccccccaaagctggtttcaagccaaccccatggcctccatgactttttcaaaaaggtattagaaaaaccatttcataactttgtcaaagttaaattataggctaaatcctatatatcttaatggcacatgcagcgcaagtaggtctacaagacgctacttcccctatcatagaagagcttatcacctttcatgatcacgccctcataatcattttccttatctgcttcctagtcctgtatgcccttttcctaacactcacaacaaaactaactaatactaacatctcagacgctcaggaaatagaaaccgtctgaactatcctgcccgccatcatcctagtcctcatcgccctcccatccctacgcatcctttacataacagacgaggtcaacgatccctcccttaccatcaaatcaattggccaccaatggtactgaacctacgagtacaccgactacggcggactaatcttcaactcctacatacttcccccattattcctagaaccaggcgacctgcgactccttgacgttgacaatcgagtagtactcccgattgaagcccccattcgtataataattacatcacaagacgtcttgcactcatgagctgtccccacattaggcttaaaaacagatgcaattcccggacgtctaaaccaaaccactttcaccgctacacgaccgggggtatactacggtcaatgctctgaaatctgtggagcaaaccacagtttcatgcccatcgtcctagaattaattcccctaaaaatctttgaaatagggcccgtatttaccctatagcaccccctctaccccctctagagcccactgtaaagctaacttagcattaaccttttaagttaaagattaagagaaccaacacctctttacagtgaaatgccccaactaaatactaccgtatggcccaccataattacccccatactccttacactattcctcatcacccaactaaaaatattaaacacaaactaccacctacctccctcaccaaagcccataaaaataaaaaattataacaaaccctgagaaccaaaatgaacgaaaatctgttcgcttcattcattgcccccacaatcctaggcctacccgccgcagtactgatcattctatttccccctctattgatccccacctccaaatatctcatcaacaaccgactaatcaccacccaacaatgactaatcaaactaacctcaaaacaaatgataaccatacacaacactaaaggacgaacctgatctcttatactagtatccttaatcatttttattgccacaactaacctcctcggactcctgcctcactcatttacaccaaccacccaactatctataaacctagccatggccatccccttatgagcgggcgcagtgattataggctttcgctctaagattaaaaatgccctagcccacttcttaccacaaggcacacctacaccccttatccccatactagttattatcgaaaccatcagcctactcattcaaccaatagccctggccgtacgcctaaccgctaacattactgcaggccacctactcatgcacctaattggaagcgccaccctagcaatatcaaccattaaccttccctctacacttatcatcttcacaattctaattctactgactatcctagaaatcgctgtcgccttaatccaagcctacgttttcacacttctagtaagcctctacctgcacgacaacacataatgacccaccaatcacatgcctatcatatagtaaaacccagcccatgacccctaacaggggccctctcagccctcctaatgacctccggcctagccatgtgatttcacttccactccataacgctcctcatactaggcctactaaccaacacactaaccatataccaatgatggcgcgatgtaacacgagaaagcacataccaaggccaccacacaccacctgtccaaaaaggccttcgatacgggataatcctatttattacctcagaagtttttttcttcgcaggatttttctgagccttttaccactccagcctagcccctaccccccaattaggagggcactggcccccaacaggcatcaccccgctaaatcccctagaagtcccactcctaaacacatccgtattactcgcatcaggagtatcaatcacctgagctcaccatagtctaatagaaaacaaccgaaaccaaataattcaagcactgcttattacaattttactgggtctctattttaccctcctacaagcctcagagtacttcgagtctcccttcaccatttccgacggcatctacggctcaacattttttgtagccacaggcttccacggacttcacgtcattattggctcaactttcctcactatctgcttcatccgccaactaatatttcactttacatccaaacatcactttggcttcgaagccgccgcctgatactggcattttgtagatgtggtttgactatttctgtatgtctccatctattgatgagggtcttactcttttagtataaatagtaccgttaacttccaattaactagttttgacaacattcaaaaaagagtaataaacttcgccttaattttaataatcaacaccctcctagccttactactaataattattacattttgactaccacaactcaacggctacatagaaaaatccaccccttacgagtgcggcttcgaccctatatcccccgcccgcgtccctttctccataaaattcttcttagtagctattaccttcttattatttgatctagaaattgccctccttttacccctaccatgagccctacaaacaactaacctgccactaatagttatgtcatccctcttattaatcatcatcctagccctaagtctggcctatgagtgactacaaaaaggattagactgaaccgaattggtatatagtttaaacaaaacgaatgatttcgactcattaaattatgataatcatatttaccaaatgcccctcatttacataaatattatactagcatttaccatctcacttctaggaatactagtatatcgctcacacctcatatcctccctactatgcctagaaggaataatactatcgctgttcattatagctactctcataaccctcaacacccactccctcttagccaatattgtgcctattgccatactagtctttgccgcctgcgaagcagcggtgggcctagccctactagtctcaatctccaacacatatggcctagactacgtacataacctaaacctactccaatgctaaaactaatcgtcccaacaattatattactaccactgacatgactttccaaaaaacacataatttgaatcaacacaaccacccacagcctaattattagcatcatccctctactattttttaaccaaatcaacaacaacctatttagctgttccccaaccttttcctccgaccccctaacaacccccctcctaatactaactacctgactcctacccctcacaatcatggcaagccaacgccacttatccagtgaaccactatcacgaaaaaaactctacctctctatactaatctccctacaaatctccttaattataacattcacagccacagaactaatcatattttatatcttcttcgaaaccacacttatccccaccttggctatcatcacccgatgaggcaaccagccagaacgcctgaacgcaggcacatacttcctattctacaccctagtaggctcccttcccctactcatcgcactaatttacactcacaacaccctaggctcactaaacattctactactcactctcactgcccaagaactatcaaactcctgagccaacaacttaatatgactagcttacacaatagcttttatagtaaagatacctctttacggactccacttatgactccctaaagcccatgtcgaagcccccatcgctgggtcaatagtacttgccgcagtactcttaaaactaggcggctatggtataatacgcctcacactcattctcaaccccctgacaaaacacatagcctaccccttccttgtactatccctatgaggcataattataacaagctccatctgcctacgacaaacagacctaaaatcgctcattgcatactcttcaatcagccacatagccctcgtagtaacagccattctcatccaaaccccctgaagcttcaccggcgcagtcattctcataatcgcccacgggcttacatcctcattactattctgcctagcaaactcaaactacgaacgcactcacagtcgcatcataatcctctctcaagggcttcaaactctactcccactaatagctttttgatgacttctagcaagcctcgctaacctcgccttaccccccactattaacctactgggagaactctctgtgctagtaaccacgttctcctgatcaaatatcactctcctacttacaggactcaacatactagtcacagccctatactccctctacatatttaccacaacacaatggggctcactcacccaccacattaacaacataaaaccctcattcacacgagaaaacaccctcatgttcatacacctatcccccattctcctcctatccctcaaccccgacatcattaccgggttttcctcttgtaaatatagtttaaccaaaacatcagattgtgaatctgacaacagaggcttacgaccccttatttaccgagaaagctcacaagaactgctaactcatgcccccatgtctaacaacatggctttctcaacttttaaaggataacagctatccattggtcttaggccccaaaaattttggtgcaactccaaataaaagtaataaccatgcacactactataaccaccctaaccctgacttccctaattccccccatccttaccaccctcgttaaccctaacaaaaaaaactcatacccccattatgtaaaatccattgtcgcatccacctttattatcagtctcttccccacaacaatattcatgtgcctagaccaagaagttattatctcgaactgacactgagccacaacccaaacaacccagctctccctaagcttcaaactagactacttctccataatattcatccctgtagcattgttcgttacatggtccatcatagaattctcactgtgatatataaactcagacccaaacattaatcagttcttcaaatatctactcatcttcctaattaccatactaatcttagttaccgctaacaacctattccaactgttcatcggctgagagggcgtaggaattatatccttcttgctcatcagttgatgatacgcccgagcagatgccaacacagcagccattcaagcaatcctatacaaccgtatcggcgatatcggtttcatcctcgccttagcatgatttatcctacactccaactcatgagacccacaacaaatagcccttctaaacgctaatccaagcctcaccccactactaggcctcctcctagcagcagcaggcaaatcagcccaattaggtctccacccctgactcccctcagccatagaaggccccaccccagtctcagccctactccactcaagcactatagttgtagcaggaatcttcttactcatccgcttccaccccctagcagaaaatagcccactaatccaaactctaacactatgcttaggcgctatcaccactctgttcgcagcagtctgcgcccttacacaaaatgacatcaaaaaaatcgtagccttctccacttcaagtcaactaggactcataatagttacaatcggcatcaaccaaccacacctagcattcctgcacatctgtacccacgccttcttcaaagccatactatttatgtgctccgggtccatcatccacaaccttaacaatgaacaagatattcgaaaaataggaggactactcaaaaccatacctctcacttcaacctccctcaccattggcagcctagcattagcaggaatacctttcctcacaggtttctactccaaagaccacatcatcgaaaccgcaaacatatcatacacaaacgcctgagccctatctattactctcatcgctacctccctgacaagcgcctatagcactcgaataattcttctcaccctaacaggtcaacctcgcttccccacccttactaacattaacgaaaataaccccaccctactaaaccccattaaacgcctggcagccggaagcctattcgcaggatttctcattactaacaacatttcccccgcatcccccttccaaacaacaatccccctctacctaaaactcacagccctcgctgtcactttcctaggacttctaacagccctagacctcaactacctaaccaacaaacttaaaataaaatccccactatgcacattttatttctccaacatactcggattctaccctagcatcacacaccgcacaatcccctatctaggccttcttacgagccaaaacctgcccctactcctcctagacctaacctgactagaaaagctattacctaaaacaatttcacagcaccaaatctccacctccatcatcacctcaacccaaaaaggcataattaaactttacttcctctctttcttcttcccactcatcctaaccctactcctaatcacataacctattcccccgagcaatctcaattacaatatatacaccaacaaacaatgttcaaccagtaactactactaatcaacgcccataatcatacaaagcccccgcaccaataggatcctcccgaatcaaccctgacccctctccttcataaattattcagcttcctacactattaaagtttaccacaaccaccaccccatcatactctttcacccacagcaccaatcctacctccatcgctaaccccactaaaacactcaccaagacctcaacccctgacccccatgcctcaggatactcctcaatagccatcgctgtagtatatccaaagacaaccatcattccccctaaataaattaaaaaaactattaaacccatataacctcccccaaaattcagaataataacacacccgaccacaccgctaacaatcaatactaaacccccataaataggagaaggcttagaagaaaaccccacaaaccccattactaaacccacactcaacagaaacaaagcatacatcattattctcgcacggactacaaccacgaccaatgatatgaaaaaccatcgttgtatttcaactacaagaacaccaatgaccccaatacgcaaaactaaccccctaataaaattaattaaccactcattcatcgacctccccaccccatccaacatctccgcatgatgaaacttcggctcactccttggcgcctgcctgatcctccaaatcaccacaggactattcctagccatgcactactcaccagacgcctcaaccgccttttcatcaatcgcccacatcactcgagacgtaaattatggctgaatcatccgctaccttcacgccaatggcgcctcaatattctttatctgcctcttcctacacatcgggcgaggcctatattacggatcgtttctctactcagaaacctgaaacatcggcattatcctcctgcttgcaactatagcaacagccttcataggctatgtcctcccgtgaggccaaatatcattctgaggggccacagtaattacaaacttactatccgccatcccatacattgggacagacctagttcaatgaatctgaggaggctactcagtagacagtcccaccctcacacgattctttacctttcacttcatcttgcccttcattattgcagccctagcagcactccacctcctattcttgcacgaaacgggatcaaacaaccccctaggaatcacctcccattccgataaaatcaccttccacccttactacacaatcaaagacgccctcggcttacttctcttccttctctccttaatgacattaacactattctcaccagacctcctaggcgacccagacaattataccctagccaaccccttaaacacccctccccacatcaagcccgaatgatatttcctattcgcctacacaattctccgatccgtccctaacaaactaggaggcgtccttgccctattactatccatcctcatcctagcaataatccccatcctccatatatccaaacaacaaagcataatatttcgcccactaagccaatcactttattgactcctagccgcagacctcctcattctaacctgaatcggaggacaaccagtaagctacccttttaccatcattggacaagtagcatccgtactatacttcacaacaatcttaatcctaataccaactatctccctaattgaaaacaaaatactcaaatgggcctgtccttgtagtataaactaatacaccagtcttgtaaaccggagatgaaaacctttttccaaggacaaatcagagaaaaagtctttaactccaccattagcacccaaagctaagattctaatttaaactattctctgttctttcatggggaagcagatttgggtaccacccaagtattgactcacccatcaacaaccgctatgtatttcgtacattactgccagccaccatgaatattgtacggtaccataaatacttgaccacctgtagtacataaaaacccaatccacatcaaaaccccctccccatgcttacaagcaagtacagcaatcaaccctcaactatcacacatcaactgcaactccaaagccacccctcacccactaggataccaacaaacctacccacccttaacagcacatagtacataaagccatttaccgtacatagcacattacagtcaaatcccttctcgtccccatggatgacccccctcagataggggtcccttgaccaccatcctccgtgaaatcaatatcccgcacaagagtgctactctcctcgctccgggcccataacacttgggggtagctaaagtgaactgtatccgacatctggttcctacttcagggtcataaagcctaaatagcccacacgttccccttaaataagacatcacgatg

SEQ ID NO: 25 - DNA, 16570 bp, Homo sapiens mitochondrial
  3108: "n" refers to a nucleotide at position 3107 of the Cambridge Reference Sequence (CRS, Anderson et al. 1981 Nature 290:457-465), later determined to be absent from the human mtDNA sequence according to the revised CRS (rCRS, Andrews et al. 1999 Nature Genetics 23:147); "n" therefore represents a single nucleotide deletion at a position corresponding to nucleotide 3107 of SEQ ID NO:1 as provided herein.
gatcacaggtctatcaccctattaaccactcacgggagctctccatgcatttggtattttcgtctggggggcatgcacgcgatagcattgcgagacgctggagccggagcaccctatgtcgcagtatctgtctttgattcctgcctcatcctattatttatcgcacctacgttcaatattacaggcgaacatacctactaaagtgtgttaattaattaatgcttgtaggacataataataacaattgaatgtctgcacagccgctttccacacagacatcataacaaaaaatttccaccaaaccccccctcccccgccttctggccacagcacttaaacacatctctgccaaaccccaaaaacaaagaaccctaacaccagcctaaccagatttcaaattttatcttttggcggtatgcacttttaacagtcaccccccaactaacacattattttcccctcccactcccatactactaatctcatcaatacaacccccgcccatcctacccagcacacacacaccgctgctaaccccataccccgaaccaaccaaaccccaaagacaccccccacagtttatgtagcttacctcctcaaagcaatacactgaaaatgtttagacgggctcacatcaccccataaacaaataggtttggtcctagcctttctattagctcttagtaagattacacatgcaagcatccccgttccagtgagttcaccctctaaatcaccacgatcaaaagggacaagcatcaagcacgcagcaatgcagctcaaaacgcttagcctagccacacccccacgggaaacagcagtgattaacctttagcaataaacgaaagtttaactaagctatactaaccccagggttggtcaatttcgtgccagccaccgcggtcacacgattaacccaagtcaatagaagccggcgtaaagagtgttttagatcaccccctccccaataaagctaaaactcacctgagttgtaaaaaactccagttgacacaaaatagactacgaaagtggctttaacatatctgaacacacaatagctaagacccaaactgggattagataccccactatgcttagccctaaacctcaacagttaaatcaacaaaactgctcgccagaacactacgagccacagcttaaaactcaaaggacctggcggtgcttcatatccctctagaggagcctgttctgtaatcgataaaccccgatcaacctcaccacctcttgctcagcctatataccgccatcttcagcaaaccctgatgaaggctacaaagtaagcgcaagtacccacgtaaagacgttaggtcaaggtgtagcccatgaggtggcaagaaatgggctacattttctaccccagaaaactacgatagcccttatgaaacttaagggtcgaaggtggatttagcagtaaactgagagtagagtgcttagttgaacagggccctgaagcgcgtacacaccgcccgtcaccctcctcaagtatacttcaaaggacatttaactaaaacccctacgcatttatatagaggagacaagtcgtaacatggtaagtgtactggaaagtgcacttggacgaaccagagtgtagcttaacacaaagcacccaacttacacttaggagatttcaacttaacttgaccgctctgagctaaacctagccccaaacccactccaccttactaccagacaaccttagccaaaccatttacccaaataaagtataggcgatagaaattgaaacctggcgcaatagatatagtaccgcaagggaaagatgaaaaattataaccaagcataatatagcaaggactaacccctataccttctgcataatgaattaactagaaataactttgcaaggagagccaaagctaagacccccgaaaccagacgagctacctaagaacagctaaaagagcacacccgtctatgtagcaaaatagtgggaagatttataggtagaggcgacaaacctaccgagcctggtgatagctggttgtccaagatagaatcttagttcaactttaaatttgcccacagaaccctctaaatccccttgtaaatttaactgttagtccaaagaggaacagctctttggacactaggaaaaaaccttgtagagagagtaaaaaatttaacacccatagtaggcctaaaagcagccaccaattaagaaagcgttcaagctcaacacccactacctaaaaaatcccaaacatataactgaactcctcacacccaattggaccaatctatcaccctatagaagaactaatgttagtataagtaacatgaaaacattctcctccgcataagcctgcgtcagattaaaacactgaactgacaattaacagcccaatatctacaatcaaccaacaagtcattattaccctcactgtcaacccaacacaggcatgctcataaggaaaggttaaaaaaagtaaaaggaactcggcaaatcttaccccgcctgtttaccaaaaacatcacctctagcatcaccagtattagaggcaccgcctgcccagtgacacatgtttaacggccgcggtaccctaaccgtgcaaaggtagcataatcacttgttccttaaatagggacctgtatgaatggctccacgagggttcagctgtctcttacttttaaccagtgaaattgacctgcccgtgaagaggcgggcatgacacagcaagacgagaagaccctatggagctttaatttattaatgcaaacagtacctaacaaacccacaggtcctaaactaccaaacctgcattaaaaatttcggttggggcgacctcggagcagaacccaacctccgagcagtacatgctaagacttcaccagtcaaagcgaactactatactcaattgatccaataacttgaccaacggaacaagttaccctagggataacagcgcaatcctattctagagtccatatcaacaatagggtttacgacctcgatgttggatcaggacatcccgatggtgcagccgctattaaaggttcgtttgttcaacgattaaagtcctacgtgatctgagttcagaccggagtaatccaggtcggtttctatctacnttcaaattcctccctgtacgaaaggacaagagaaataaggcctacttcacaaagcgccttcccccgtaaatgatatcatctcaacttagtattatacccacacccacccaagaacagggtttgttaagatggcagagcccggtaatcgcataaaacttaaaactttacagtcagaggttcaattcctcttcttaacaacatacccatggccaacctcctactcctcattgtacccattctaatcgcaatggcattcctaatgcttaccgaacgaaaaattctaggctatatacaactacgcaaaggccccaacgttgtaggcccctacgggctactacaacccttcgctgacgccataaaactcttcaccaaagagcccctaaaacccgccacatctaccatcaccctctacatcaccgccccgaccttagctctcaccatcgctcttctactatgaacccccctccccatacccaaccccctggtcaacctcaacctaggcctcctatttattctagccacctctagcctagccgtttactcaatcctctgatcagggtgagcatcaaactcaaactacgccctgatcggcgcactgcgagcagtagcccaaacaatctcatatgaagtcaccctagccatcattctactatcaacattactaataagtggctcctttaacctctccacccttatcacaacacaagaacacctctgattactcctgccatcatgacccttggccataatatgatttatctccacactagcagagaccaaccgaacccccttcgaccttgccgaaggggagtccgaactagtctcaggcttcaacatcgaatacgccgcaggccccttcgccctattcttcatagccgaatacacaaacattattataataaacaccctcaccactacaatcttcctaggaacaacatatgacgcactctcccctgaactctacacaacatattttgtcaccaagaccctacttctaacctccctgttcttatgaattcgaacagcatacccccgattccgctacgaccaactcatacacctcctatgaaaaaacttcctaccactcaccctagcattacttatatgatatgtctccatacccattacaatctccagcattccccctcaaacctaagaaatatgtctgataaaagagttactttgatagagtaaataataggagcttaaacccccttatttctaggactatgagaatcgaacccatccctgagaatccaaaattctccgtgccacctatcacaccccatcctaaagtaaggtcagctaaataagctatcgggcccataccccgaaaatgttggttatacccttcccgtactaattaatcccctggcccaacccgtcatctactctaccatctttgcaggcacactcatcacagcgctaagctcgcactgattttttacctgagtaggcctagaaataaacatgctagcttttattccagttctaaccaaaaaaataaaccctcgttccacagaagctgccatcaagtatttcctcacgcaagcaaccgcatccataatccttctaatagctatcctcttcaacaatatactctccggacaatgaaccataaccaatactaccaatcaatactcatcattaataatcataatggctatagcaataaaactaggaatagccccctttcacttctgagtcccagaggttacccaaggcacccctctgacatccggcctgcttcttctcacatgacaaaaactagcccccatctcaatcatataccaaatctctccctcactaaacgtaagccttctcctcactctctcaatcttatccatcatagcaggcagttgaggtggattaaaccaaacccagctacgcaaaatcttagcatactcctcaattacccacataggatgaataatagcagttctaccgtacaaccctaacataaccattcttaatttaactatttatattatcctaactactaccgcattcctactactcaacttaaactccagcaccacgaccctactactatctcgcacctgaaacaagctaacatgactaacacccttaattccatccaccctcctctccctaggaggcctgcccccgctaaccggctttttgcccaaatgggccattatcgaagaattcacaaaaaacaatagcctcatcatccccaccatcatagccaccatcaccctccttaacctctacttctacctacgcctaatctactccacctcaatcacactactccccatatctaacaacgtaaaaataaaatgacagtttgaacatacaaaacccaccccattcctccccacactcatcgcccttaccacgctactcctacctatctccccttttatactaataatcttatagaaatttaggttaaatacagaccaagagccttcaaagccctcagtaagttgcaatacttaatttctgtaacagctaaggactgcaaaaccccactctgcatcaactgaacgcaaatcagccactttaattaagctaagcccttactagaccaatgggacttaaacccacaaacacttagttaacagctaagcaccctaatcaactggcttcaatctacttctcccgccgccgggaaaaaaggcgggagaagccccggcaggtttgaagctgcttcttcgaatttgcaattcaatatgaaaatcacctcggagctggtaaaaagaggcctaacccctgtctttagatttacagtccaatgcttcactcagccattttacctcacccccactgatgttcgccgaccgttgactattctctacaaaccacaaagacattggaacactatacctattattcggcgcatgagctggagtcctaggcacagctctaagcctccttattcgagccgagctgggccagccaggcaaccttctaggtaacgaccacatctacaacgttatcgtcacagcccatgcatttgtaataatcttcttcatagtaatacccatcataatcggaggctttggcaactgactagttcccctaataatcggtgcccccgatatggcgtttccccgcataaacaacataagcttctgactcttacctccctctctcctactcctgctcgcatctgctatagtggaggccggagcaggaacaggttgaacagtctaccctcccttagcagggaactactcccaccctggagcctccgtagacctaaccatcttctccttacacctagcaggtgtctcctctatcttaggggccatcaatttcatcacaacaattatcaatataaaaccccctgccataacccaataccaaacgcccctcttcgtctgatccgtcctaatcacagcagtcctacttctcctatctctcccagtcctagctgctggcatcactatactactaacagaccgcaacctcaacaccaccttcttcgaccccgccggaggaggagaccccattctataccaacacctattctgatttttcggtcaccctgaagtttatattcttatcctaccaggcttcggaataatctcccatattgtaacttactactccggaaaaaaagaaccatttggatacataggtatggtctgagctatgatatcaattggcttcctagggtttatcgtgtgagcacaccatatatttacagtaggaatagacgtagacacacgagcatatttcacctccgctaccataatcatcgctatccccaccggcgtcaaagtatttagctgactcgccacactccacggaagcaatatgaaatgatctgctgcagtgctctgagccctaggattcatctttcttttcaccgtaggtggcctgactggcattgtattagcaaactcatcactagacatcgtactacacgacacgtactacgttgtagctcacttccactatgtcctatcaataggagctgtatttgccatcataggaggcttcattcactgatttcccctattctcaggctacaccctagaccaaacctacgccaaaatccatttcactatcatattcatcggcgtaaatctaactttcttcccacaacactttctcggcctatccggaatgccccgacgttactcggactaccccgatgcatacaccacatgaaacatcctatcatctgtaggctcattcatttctctaacagcagtaatattaataattttcatgatttgagaagccttcgcttcgaagcgaaaagtcctaatagtagaagaaccctccataaacctggagtgactatatggatgccccccaccctaccacacattcgaagaacccgtatacataaaatctagacaaaaaaggaaggaatcgaaccccccaaagctggtttcaagccaaccccatggcctccatgactttttcaaaaaggtattagaaaaaccatttcataactttgtcaaagttaaattataggctaaatcctatatatcttaatggcacatgcagcgcaagtaggtctacaagacgctacttcccctatcatagaagagcttatcacctttcatgatcacgccctcataatcattttccttatctgcttcctagtcctgtatgcccttttcctaacactcacaacaaaactaactaatactaacatctcagacgctcaggaaatagaaaccgtctgaactatcctgcccgccatcatcctagtcctcatcgccctcccatccctacgcatcctttacataacagacgaggtcaacgatccctcccttaccatcaaatcaattggccaccaatggtactgaacctacgagtacaccgactacggcggactaatcttcaactcctacatacttcccccattattcctagaaccaggcgacctgcgactccttgacgttgacaatcgagtagtactcccgattgaagcccccattcgtataataattacatcacaagacgtcttgcactcatgagctgtccccacattaggcttaaaaacagatgcaattcccggacgtctaaaccaaaccactttcaccgctacacgaccgggggtatactacggtcaatgctctgaaatctgtggagcaaaccacagtttcatgcccatcgtcctagaattaattcccctaaaaatctttgaaatagggcccgtatttaccctatagcaccccctctaccccctctagagcccactgtaaagctaacttagcattaaccttttaagttaaagattaagagaaccaacacctctttacagtgaaatgccccaactaaatactaccgtatggcccaccataattacccccatactccttacactattcctcatcacccaactaaaaatattaaacacaaactaccacctacctccctcaccaaagcccataaaaataaaaaattataacaaaccctgagaaccaaaatgaacgaaaatctgttcgcttcattcattgcccccacaatcctaggcctacccgccgcagtactgatcattctatttccccctctattgatccccacctccaaatatctcatcaacaaccgactaatcaccacccaacaatgactaatcaaactaacctcaaaacaaatgataaccatacacaacactaaaggacgaacctgatctcttatactagtatccttaatcatttttattgccacaactaacctcctcggactcctgcctcactcatttacaccaaccacccaactatctataaacctagccatggccatccccttatgagcgggcgcagtgattataggctttcgctctaagattaaaaatgccctagcccacttcttaccacaaggcacacctacaccccttatccccatactagttattatcgaaaccatcagcctactcattcaaccaatagccctggccgtacgcctaaccgctaacattactgcaggccacctactcatgcacctaattggaagcgccaccctagcaatatcaaccattaaccttccctctacacttatcatcttcacaattctaattctactgactatcctagaaatcgctgtcgccttaatccaagcctacgttttcacacttctagtaagcctctacctgcacgacaacacataatgacccaccaatcacatgcctatcatatagtaaaacccagcccatgacccctaacaggggccctctcagccctcctaatgacctccggcctagccatgtgatttcacttccactccataacgctcctcatactaggcctactaaccaacacactaaccatataccaatgatggcgcgatgtaacacgagaaagcacataccaaggccaccacacaccacctgtccaaaaaggccttcgatacgggataatcctatttattacctcagaagtttttttcttcgcaggatttttctgagccttttaccactccagcctagcccctaccccccaattaggagggcactggcccccaacaggcatcaccccgctaaatcccctagaagtcccactcctaaacacatccgtattactcgcatcaggagtatcaatcacctgagctcaccatagtctaatagaaaacaaccgaaaccaaataattcaagcactgcttattacaattttactgggtctctattttaccctcctacaagcctcagagtacttcgagtctcccttcaccatttccgacggcatctacggctcaacattttttgtagccacaggcttccacggacttcacgtcattattggctcaactttcctcactatctgcttcatccgccaactaatatttcactttacatccaaacatcactttggcttcgaagccgccgcctgatactggcattttgtagatgtggtttgactatttctgtatgtctccatctattgatgagggtcttactcttttagtataaatagtaccgttaacttccaattaactagttttgacaacattcaaaaaagagtaataaacttcgccttaattttaataatcaacaccctcctagccttactactaataattattacattttgactaccacaactcaacggctacatagaaaaatccaccccttacgagtgcggcttcgaccctatatcccccgcccgcgtccctttctccataaaattcttcttagtagctattaccttcttattatttgatctagaaattgccctccttttacccctaccatgagccctacaaacaactaacctgccactaatagttatgtcatccctcttattaatcatcatcctagccctaagtctggcctatgagtgactacaaaaaggattagactgaaccgaattggtatatagtttaaacaaaacgaatgatttcgactcattaaattatgataatcatatttaccaaatgcccctcatttacataaatattatactagcatttaccatctcacttctaggaatactagtatatcgctcacacctcatatcctccctactatgcctagaaggaataatactatcgctgttcattatagctactctcataaccctcaacacccactccctcttagccaatattgtgcctattgccatactagtctttgccgcctgcgaagcagcggtgggcctagccctactagtctcaatctccaacacatatggcctagactacgtacataacctaaacctactccaatgctaaaactaatcgtcccaacaattatattactaccactgacatgactttccaaaaaacacataatttgaatcaacacaaccacccacagcctaattattagcatcatccctctactattttttaaccaaatcaacaacaacctatttagctgttccccaaccttttcctccgaccccctaacaacccccctcctaatactaactacctgactcctacccctcacaatcatggcaagccaacgccacttatccagtgaaccactatcacgaaaaaaactctacctctctatactaatctccctacaaatctccttaattataacattcacagccacagaactaatcatattttatatcttcttcgaaaccacacttatccccaccttggctatcatcacccgatgaggcaaccagccagaacgcctgaacgcaggcacatacttcctattctacaccctagtaggctcccttcccctactcatcgcactaatttacactcacaacaccctaggctcactaaacattctactactcactctcactgcccaagaactatcaaactcctgagccaacaacttaatatgactagcttacacaatagcttttatagtaaagatacctctttacggactccacttatgactccctaaagcccatgtcgaagcccccatcgctgggtcaatagtacttgccgcagtactcttaaaactaggcggctatggtataatacgcctcacactcattctcaaccccctgacaaaacacatagcctaccccttccttgtactatccctatgaggcataattataacaagctccatctgcctacgacaaacagacctaaaatcgctcattgcatactcttcaatcagccacatagccctcgtagtaacagccattctcatccaaaccccctgaagcttcaccggcgcagtcattctcataatcgcccacgggcttacatcctcattactattctgcctagcaaactcaaactacgaacgcactcacagtcgcatcataatcctctctcaaggacttcaaactctactcccactaatagctttttgatgacttctagcaagcctcgctaacctcgccttaccccccactattaacctactgggagaactctctgtgctagtaaccacgttctcctgatcaaatatcactctcctacttacaggactcaacatactagtcacagccctatactccctctacatatttaccacaacacaatggggctcactcacccaccacattaacaacataaaaccctcattcacacgagaaaacaccctcatgttcatacacctatcccccattctcctcctatccctcaaccccgacatcattaccgggttttcctcttgtaaatatagtttaaccaaaacatcagattgtgaatctgacaacagaggcttacgaccccttatttaccgagaaagctcacaagaactgctaactcatgcccccatgtctaacaacatggctttctcaacttttaaaggataacagctatccattggtcttaggccccaaaaattttggtgcaactccaaataaaagtaataaccatgcacactactataaccaccctaaccctgacttccctaattccccccatccttaccaccctcgttaaccctaacaaaaaaaactcatacccccattatgtaaaatccattgtcgcatccacctttattatcagtctcttccccacaacaatattcatgtgcctagaccaagaagttattatctcgaactgacactgagccacaacccaaacaacccagctctccctaagcttcaaactagactacttctccataatattcatccctgtagcattgttcgttacatggtccatcatagaattctcactgtgatatataaactcagacccaaacattaatcagttcttcaaatatctactcatcttcctaattaccatactaatcttagttaccgctaacaacctattccaactgttcatcggctgagagggcgtaggaattatatccttcttgctcatcagttgatgatacgcccgagcagatgccaacacagcagccattcaagcaatcctatacaaccgtatcggcgatatcggtttcatcctcgccttagcatgatttatcctacactccaactcatgagacccacaacaaatagcccttctaaacgctaatccaagcctcaccccactactaggcctcctcctagcagcagcaggcaaatcagcccaattaggtctccacccctgactcccctcagccatagaaggccccaccccagtctcagccctactccactcaagcactatagttgtagcaggaatcttcttactcatccgcttccaccccctagcagaaaatagcccactaatccaaactctaacactatgcttaggcgctatcaccactctgttcgcagcagtctgcgcccttacacaaaatgacatcaaaaaaatcgtagccttctccacttcaagtcaactaggactcataatagttacaatcggcatcaaccaaccacacctagcattcctgcacatctgtacccacgccttcttcaaagccatactatttatgtgctccgggtccatcatccacaaccttaacaatgaacaagatattcgaaaaataggaggactactcaaaaccatacctctcacttcaacctccctcaccattggcagcctagcattagcaggaatacctttcctcacaggtttctactccaaagaccacatcatcgaaaccgcaaacatatcatacacaaacgcctgagccctatctattactctcatcgctacctccctgacaagcgcctatagcactcgaataattcttctcaccctaacaggtcaacctcgcttccccacccttactaacattaacgaaaataaccccaccctactaaaccccattaaacgcctggcagccggaagcctattcgcaggatttctcattactaacaacatttcccccgcatcccccttccaaacaacaatccccctctacctaaaactcacagccctcgctgtcactttcctaggacttctaacagccctagacctcaactacctaaccaacaaacttaaaataaaatccccactatgcacattttatttctccaacatactcggattctaccctagcatcacacaccgcacaatcccctatctaggccttcttacgagccaaaacctgcccctactcctcctagacctaacctgactagaaaagctattacctaaaacaatttcacagcaccaaatctccacctccatcatcacctcaacccaaaaaggcataattaaactttacttcctctctttcttcttcccactcatcctaaccctactcctaatcacataacctattcccccgagcaatctcaattacaatatatacaccaacaaacaatgttcaaccagtaactactactaatcaacgcccataatcatacaaagcccccgcaccaataggatcctcccgaatcaaccctgacccctctccttcataaattattcagcttcctacactattaaagtttaccacaaccaccaccccatcatactctttcacccacagcaccaatcctacctccatcgctaaccccactaaaacactcaccaagacctcaacccctgacccccatgcctcaggatactcctcaatagccatcgctgtagtatatccaaagacaaccatcattccccctaaataaattaaaaaaactattaaacccatataacctcccccaaaattcagaataataacacacccgaccacaccgctaacaatcaatactaaacccccataaataggagaaggcttagaagaaaaccccacaaaccccattactaaacccacactcaacagaaacaaagcatacatcattattctcgcacggactacaaccacgaccaatgatatgaaaaaccatcgttgtatttcaactacaagaacaccaatgaccccaatacgcaaaactaaccccctaataaaattaattaaccactcattcatcgacctccccaccccatccaacatctccgcatgatgaaacttcggctcactccttggcgcctgcctgatcctccaaatcaccacaggactattcctagccatgcactactcaccagacgcctcaaccgccttttcatcaatcgcccacatcactcgagacgtaaattatggctgaatcatccgctaccttcacgccaatggcgcctcaatattctttatctgcctcttcctacacatcgggcgaggcctatattacggatcatttctctactcagaaacctgaaacatcggcattatcctcctgcttgcaactatagcaacagccttcataggctatgtcctcccgtgaggccaaatatcattctgaggggccacagtaattacaaacttactatccgccatcccatacattgggacagacctagttcaatgaatctgaggaggctactcagtagacagtcccaccctcacacgattctttacctttcacttcatcttgcccttcattattgcagccctagcagcactccacctcctattcttgcacgaaacgggatcaaacaaccccctaggaatcacctcccattccgataaaatcaccttccacccttactacacaatcaaagacgccctcggcttacttctcttccttctctccttaatgacattaacactattctcaccagacctcctaggcgacccagacaattataccctagccaaccccttaaacacccctccccacatcaagcccgaatgatatttcctattcgcctacacaattctccgatccgtccctaacaaactaggaggcgtccttgccctattactatccatcctcatcctagcaataatccccatcctccatatatccaaacaacaaagcataatatttcgcccactaagccaatcactttattgactcctagccgcagacctcctcattctaacctgaatcggaggacaaccagtaagctacccttttaccatcattggacaagtagcatccgtactatacttcacaacaatcctaatcctaataccaactatctccctaattgaaaacaaaatactcaaatgggcctgtccttgtagtataaactaatacaccagtcttgtaaaccggagatgaaaacctttttccaaggacaaatcagagaaaaagtctttaactccaccattagcacccaaagctaagattctaatttaaactattctctgttctttcatggggaagcagatttgggtaccacccaagtattgactcacccatcaacaaccgctatgtatttcgtacattactgccagccaccatgaatattgtacggtaccataaatacttgaccacctgtagtacataaaaacccaatccacatcaaaaccccctccccatgcttacaagcaagtacagcaatcaaccctcaactatcacacatcaactgcaactccaaagccacccctcacccactaggataccaacaaacctacccaccctcaacagtacatagtacataaagccatttaccgtacatagcacattacagtcaaatcccttctcgtccccatggatgacccccctcagataggggtcccttgaccaccatcctccgtgaaatcaatatcccgcacaagagtgctactctcctcgctccgggcccataacacttgggggtagctaaagtgaactgtatccgacatctggttcctacttcagggtcataaagcctaaatagcccacacgttccccttaaataagacatcacgatg

SEQ ID NO: 26 - DNA, 16571 bp, Homo sapiens mitochondrial
  3109: "n" refers to a nucleotide at position 3107 of the Cambridge Reference Sequence (CRS, Anderson et al. 1981 Nature 290:457-465), later determined to be absent from the human mtDNA sequence according to the revised CRS (rCRS, Andrews et al. 1999 Nature Genetics 23:147); "n" therefore represents a single nucleotide deletion at a position corresponding to nucleotide 3107 of SEQ ID NO:1 as provided herein.
gatcacaggtctatcaccctattaaccactcacgggagctttccatgcatttggtattttcgtctggggggtatgcacgcgatagcattgcgagacgctggagccggagcaccctatgtcgcagtatctgtctttgattcctgcctcatcctattatttatcgcacctacgttcaatattacaggcgaacatacttactaaagtgtgttaattaattaatgcttgtaggacataataacaacaattgaatgtctgcacagccgctttccacacagacatcataacaaaaaatttccgccaaaccccccctcccccccgcttctggccacagcacttaaacacatctctgccaaaccccaaaaacaaagaaccctaacaccagcctaaccagatttcaaattttatcttttggcggtatgcacttttaacagtcaccccccaactaacacattattttcccctcccactcccatactactaatctcatcaatacaacccccgcccatcctacccagcacacacacaccgctgctaacccgataccccgaaccaaccaaaccccaaagacaccccccacagtttatgtagcttacctcctcaaagcaatacactgaaaatgtttagacgggctcacatcaccccataaacaaataggtttggtcctagcctttctattagctcttagtaagattacacatgcaagcatccccgttccagtgagttcaccctctaaatcaccacgatcaaaagggacaagcatcaagcacgcagcaatgcagctcaaaacgcttagcctagccacacccccacgggaaacagcagtgattaacctttagcaataaacgaaagtttaactaagctatactaaccccagggttggtcaatttcgtgccagccaccgcggtcacacgattaacccaagtcaatagaagccggcgtaaagagtgttttagatcaccccctccccaataaagctaaaacccacctgagttgtaaaaaactccagttgacacaaaatagactacgaaagtggctttaacatatctgaacacacaatagctaagacccaaactgggattagataccccactatgcttagccctaaacctcaacagttaaatcaacaaaactgctcgccagaacactacgagccacagcttaaaactcaaaggacctggcggtgcttcatatccctctagaggagcctgttctgtaatcgataaaccccgatcaacctcaccacctcttgctcagcctatataccgccatcttcagcaaaccctgatgaaggctacaaagtaagcgcaagtacccacgtaaagacgttaggtcaaggtgtagcccatgaggtggcaagaaatgggctacattttctaccccagaaaactacgatagcccttatgaaacttaagggtcgaaggtggatttagcagtaaactgagagtagagtgcttagttgaacagggccctgaagcgcgtacacaccgcccgtcaccctcctcaagtatacttcaaaggacatttaactaaaacccctacgcatttatatagaggagacaagtcgtaacatggtaagtgtactggaaagtgcacttggacgaaccagagtgtagcttaacacaaagcacccaacttacacttaggagatttcaacttaacttgaccgctctgagctaaacctagccccaaacccactccaccttactaccagacaaccttagccaaaccatttacccaaataaagtataggcgatagaaattgaaacctggcgcaatagatatagtaccgcaagggaaagatgaaaaattataaccaagcataatatagcaaggactaacccctataccttctgcataatgaattaactagaaataactttgcaaggagagccaaagctaagacccccgaaaccagacgagctacctaagaacagctaaaagagcacacccgtctatgtagcaaaatagtgggaagatttataggtagaggcgacaaacctaccgagcctggtgatagctggttgtccaagatagaatcttagttcaactttaaatttgcccacagaaccctctaaatccccttgtaaatttaactgttagtccaaagaggaacagctctttggacactaggaaaaaaccttgtagagagagtaaaaaatttaacacccatagtaggcctaaaagcagccaccaattaagaaagcgttcaagctcaacacccactacctaaaaaatcccaaacatataactgaactcctcacacccaattggaccaatctatcaccctatagaagaactaatgttagtataagtaacatgaaaacattctcctccgcataagcctgcgtcagattaaaacactgaactgacaattaacagcccaatatctacaatcaaccaacaagtcattattaccctcactgtcaacccaacacaggcatgctcataaggaaaggttaaaaaaagtaaaaggaactcggcaaatcttaccccgcctgtttaccaaaaacatcacctctagcatcaccagtattagaggcaccgcctgcccagtgacacatgtttaacggccgcggtaccctaaccgtgcaaaggtagcataatcacttgttccttaaatagggacctgtatgaatggctccacgagggttcagctgtctcttacttttaaccagtgaaattgacctgcccgtgaagaggcgggcataacacagcaagacgagaagaccctatggagctttaatttattaatgcaaacagtacctaacaaacccacaggtcctaaactaccaaacctgcattaaaaatttcggttggggcgacctcggagcagaacccaacctccgagcagtacatgctaagacttcaccagtcaaagcgaactactatactcaattgatccaataacttgaccaacggaacaagttaccctagggataacagcgcaatcctattctagagtccatatcaacaatagggtttacgacctcgatgttggatcaggacatcccgatggtgcagccgctattaaaggttcgtttgttcaacgattaaagtcctacgtgatctgagttcagaccggagtaatccaggtcggtttctatctacnttcaaattcctccctgtacgaaaggacaagagaaataaggcctacttcacaaagcgccttcccccgtaaatgatatcatctcaacttagtattatacccacacccacccaagaacagggtttgttaagatggcagagcccggtaatcgcataaaacttaaaactttacagtcagaggttcaattcctcttcttaacaacatacccatggccaacctcctactcctcattgtacccattctaatcgcaatggcattcctaatgcttaccgaacgaaaaattctaggctatatacaactacgcaaaggccccaacgttgtaggcccctacgggctactacaacccttcgctgacgccataaaactcttcaccaaagagcccctaaaacccgccacatctaccatcaccctctacatcaccgccccgaccttagctctcaccatcgctcttctactatgaacccccctccccatacccaaccccctggtcaacctcaacctaggcctcctatttattctagccacctctagcctagccgtttactcaatcctctgatcagggtgagcatcaaactcaaactacgccctgatcggcgcactgcgagcagtagcccaaacaatctcatatgaagtcaccctagccatcattctactatcaacattactaataagtggctcctttaacctctccacccttatcacaacacaagaacacctctgattactcctgccatcatgacccttggccataatatgatttatctccacactagcagagaccaaccgaacccccttcgaccttgccgaaggagagtccgaactagtctcaggcttcaacatcgaatacgccgcaggccccttcgccctattcttcatagccgaatacacaaacattattataataaacaccctcaccactacaatcttcctaggaacaacatatgacgcactctcccctgaactctacacaacatattttgtcaccaagaccctacttctaacctccctgttcttatgaattcgaacagcatacccccgattccgctacgaccaactcatacacctcctatgaaaaaacttcctaccactcaccctagcattacttatatgatatgtctccatacccattacaatctccagcattccccctcaaacctaagaaatatgtctgataaaagagttactttgatagagtaaataataggagcttaaacccccttatttctaggactatgagaatcgaacccatccctgagaatccaaaattctccgtgccacctatcacaccccatcctaaagtaaggtcagctaaataagctatcgggcccataccccgaaaatgttggttatacccttcccgtactaattaatcccctggcccaacccgtcatctactctaccatctttgcaggcacactcatcacagcgctaagctcgcactgattttttacctgagtaggcctagaaataaacatgctagcttttattccagttctaaccaaaaaaataaaccctcgttccacagaagctgccatcaagtatttcctcacgcaagcaaccgcatccataatccttctaatagctatcctcttcaacaatatactctccggacaatgaaccatgaccaatactaccaatcaatactcatcattaataatcataatggctatagcaataaaactaggaatagccccctttcacttctgagtcccagaggttacccaaggcacccctctgacatccggcctgcttcttctcacatgacaaaaactagcccccatctcaatcatataccaaatctctccctcactaaacgtaagccttctcctcactctctcaatcttatccatcatagcaggcagttgaggtggattaaaccaaacccagctacgcaaaatcttagcatactcctcaattacccacataggatgaataatagcagttctaccgtacaaccctaacataaccattcttaatttaactatttatattatcctaactactaccgcattcctactactcaacttaaactccagcaccacgaccctactactatctcgcacctgaaacaagctaacatgactaacacccttaattccatccaccctcctctccctaggaggcctgcccccgctaaccggctttttgcccaaatgggccattatcgaagaattcacaaaaaacaatagcctcatcatccccaccatcatagccaccatcaccctccttaacctctacttctacctacgcctaatctactccacctcaatcacactactccccatatctaacaacgtaaaaataaaatgacagtttgaacatacaaaacccaccccattcctccccacactcatcgcccttaccacgctactcctacctatctccccttttatactaataatcttatagaaatttaggttaaatacagaccaagagccttcaaagccctcagtaagttgcaatacttaatttctgtaacagctaaggactgcaaaaccccactctgcatcaactgaacgcaaatcagccactttaattaagctaagcccttactagaccaatgggacttaaacccacaaacacttagttaacagctaagcaccctaatcaactggcttcaatctacttctcccgccgccgggaaaaaaggcgggagaagccccggcaggtttgaagctgcttcttcgaatttgcaattcaatatgaaaatcacctcggagctggtaaaaagaggcctaacccctgtctttagatttacagtccaatgcttcactcagccattttacctcacccccactgatgttcgccgaccgttgactattctctacaaaccacaaagacattggaacactatacctattattcggcgcatgagctggagtcctaggcacagctctaagcctccttattcgagccgagctgggccagccaggcaaccttctaggtaacgaccacatctacaacgttatcgtcacagcccatgcatttgtaataatcttcttcatagtaatacccatcataatcggaggctttggcaactgactagttcccctaataatcggtgcccccgatatggcgtttccccgcataaacaacataagcttctgactcttacctccctctctcctactcctgctcgcatctgctatagtggaggccggagcaggaacaggttgaacagtctaccctcccttagcagggaactactcccaccctggagcctccgtagacctagccatcttctccttacacctagcaggtgtctcctctatcttaggggccatcaatttcatcacaacaattatcaatataaaaccccctgccataacccaataccaaacgcccctcttcgtctgatccgtcctaatcacagcagtcctacttctcctatctctcccagtcctagctgctggcatcactatactactaacagaccgcaacctcaacaccaccttcttcgaccccgccggaggaggagaccccattctataccaacacctattctgatttttcggtcaccctgaagtttatattcttatcctaccaggcttcggaataatctcccatattgtaacttactactccggaaaaaaagaaccatttggatacataggtatggtctgagctatgatatcaattggcttcctagggtttatcgtgtgagcacaccatatatttacagtaggaatagacgtagacacacgagcatatttcacctccgctaccataatcatcgctatccccaccggcgtcaaagtatttagctgactcgccacactccacggaagcaatatgaaatgatctgctgcagtgctctgagccctaggattcatctttcttttcaccgtaggtggcctgactggcattgtattagcaaactcatcactagacatcgtactacacgacacgtactacgttgtagcccacttccactatgtcctatcaataggagctgtatttgccatcataggaggcttcattcactgatttcccctattctcaggctacaccctagaccaaacctacgccaaaatccatttcactatcatattcatcggcgtaaatctaactttcttcccacaacactttctcggcctgtccggaatgccccgacgttactcggactaccccgatgcatacaccacatgaaacatcctatcatctgtaggctcattcatttctctaacagcagtaatattaataattttcatgatttgagaagccttcgcttcgaagcgaaaagtcctaatagtagaagaaccctccataaacctggagtgactatatggatgccccccaccctaccacacattcgaagaacccgtatacataaaatctagacaaaaaaggaaggaatcgaaccccccaaagctggtttcaagccaaccccatggcctccatgactttttcaaaaaggtattagaaaaaccatttcataactttgtcaaagttaaattataggctaaatcctatatatcttaatggcacatgcagcgcaagtaggtctacaagacgctacttcccctatcatagaagagcttatcacctttcatgatcacgccctcataatcattttccttatctgcttcctagtcctgtatgcccttttcctaacactcacaacaaaactaactaatactaacatctcagacgctcaggaaatagaaaccgtctgaactatcctgcccgccatcatcctagtcctcatcgccctcccatccctacgcatcctttacataacagacgaggtcaacgatccctcccttaccatcaaatcaattggccaccaatggtactgaacctacgagtacaccgactacggcggactaatcttcaactcctacatacttcccccattattcctagaaccaggcgacctgcgactccttgacgttgacaatcgagtagtactcccgattgaagcccccattcgtataataattacatcacaagacgtcttgcactcatgagctgtccccacattaggcttaaaaacagatgcaattcccggacgtctaaaccaaaccactttcaccgctacacgaccgggggtatactacggtcaatgctctgaaatctgtggagcaaaccacagtttcatgcccatcgtcctagaattaattcccctaaaaatctttgaaatagggcccgtatttaccctatagcaccccctctaccccctctagagcccactgtaaagctaacttagcattaaccttttaagttaaagattaagagaaccaacacctctttacagtgaaatgccccaactaaatactaccgtatggcccaccataattacccccatactccttacactattcctcatcacccaactaaaaatattaaacacaaactaccacctacctccctcaccaaagcccataaaaataaaaaattataacaaaccctgagaaccaaaatgaacgaaaatctgttcgcttcattcattgcccccacaatcctaggcctacccgccgcagtactgatcattctatttccccctctattgatccccacctccaaatatctcatcaacaaccgactaatcaccacccaacaatgactaatcaaactaacctcaaaacaaatgataaccatacacaacactaaaggacgaacctgatctcttatactagtatccttaatcatttttattgccacaactaacctcctcggactcctgcctcactcatttacaccaaccacccaactatctataaacctagccatggccatccccttatgagcgggcgcagtgattataggctttcgctctaagattaaaaatgccctagcccacttcttaccacaaggcacacctacaccccttatccccatactagttattatcgaaaccatcagcctactcattcaaccaatagccctggccgtacgcctaaccgctaacattactgcaggccacctactcatgcacctaattggaagcgccaccctagcaatatcaaccattaaccttccctctacacttatcatcttcacaattctaattctactgactatcctagaaatcgctgtcgccttaatccaagcctacgttttcacacttctagtaagcctctacctgcacgacaacacataatgacccaccaatcacatgcctatcatatagtaaaacccagcccatgacccctaacaggggccctctcagccctcctaatgacctccggcctagccatgtgatttcacttccactccataacgctcctcatactaggcctactaaccaacacactaaccatataccaatgatgacgcgatgtaacacgagaaagcacataccaaggccaccacacaccacctgtccaaaaaggccttcgatacgggataatcctatttattacctcagaagtttttttcttcgcaggatttttctgagccttttaccactccagcctagcccctaccccccaattaggagggcactggcccccaacaggcatcaccccgctaaatcccctagaagtcccactcctaaacacatccgtattactcgcatcaggagtatcaatcacctgagctcaccatagtctaatagaaaacaaccgaaaccaaataattcaagcactgcttattacaattttactgggtctctattttaccctcctacaagcctcagagtacttcgagtctcccttcaccatttccgacggcatctacggctcaacattttttgtagccacaggcttccacggacttcacgtcattattggctcaactttcctcactatctgcttcatccgccaactaatatttcactttacatccaaacatcactttggcttcgaagccgccgcctgatactggcattttgtagatgtggtttgactatttctgtatgtctccatctattgatgagggtcttactcttttagtataaatagtaccgttaacttccaattaactagttttgacaacattcaaaaaagagtaataaacttcgccttaattttaataatcaacaccctcctagccttactactaataattattacattttgactaccacaactcaacggctacatagaaaaatccaccccttacgagtgcggcttcgaccctatatcccccgcccgcgtccctttctccataaaattcttcttagtagctattaccttcttattatttgatctagaaattgccctccttttacccctaccatgagccctacaaacaactaacctgccactaatagttatgtcatccctcttattaatcatcatcctagccctaagtctggcctatgagtgactacaaaaaggattagactgaaccgaattggtatatagtttaaacaaaacgaatgatttcgactcattaaattatgataatcatatttaccaaatgcccctcatttacataaatattatactagcatttaccatctcacttctaggaatactagtatatcgctcacacctcatatcctccctactatgcctagaaggaataatactatcgctgttcattatagctactctcataaccctcaacacccactccctcttagccaatattgtgcctattgccatactagtctttgccgcctgcgaagcagcggtgggcctagccctactagtctcaatctccaacacatatggcctagactacgtacataacctaaacctactccaatgctaaaactaatcgtcccaacaattatattactaccactgacatgactttccaaaaaacacataatttgaatcaacacaaccacccacagcctaattattagcatcatccctctactattttttaaccaaatcaacaacaacctatttagctgttccccaaccttttcctccgaccccctaacaacccccctcctaatactaactacctgactcctacccctcacaatcatggcaagccaacgccacttatccagtgaaccactatcacgaaaaaaactctacctctctatactaatctccctacaaatctccttaattataacattcacagccacagaactaatcatattttatatcttcttcgaaaccacacttatccccaccttggctatcatcacccgatgaggcaaccagccagaacgcctgaacgcaggcacatacttcctattctacaccctagtaggctcccttcccctactcatcgcactaacttacactcacaacaccctaggctcactaaacattctactactcactctcactgcccaagaactatcaaactcctgagccaacaacttaatatgactagcttacacaatagcttttatagtaaagatacctctttacggactccacttatgactccctaaagcccatgtcgaagcccccatcgctgggtcaatagtacttgccgcagtactcttaaaactaggcggctatggtataatacgcctcacactcattctcaaccccctgacaaaacacatagcctaccccttccttgtactatccctatgaggcataattataacaagctccatctgcctacgacaaacagacctaaaatcgctcattgcatactcttcaatcagccacatagccctcgtagtaacagccattctcatccaaaccccctgaagcttcaccggcgcagtcattctcataatcgcccacgggcttacatcctcattactattctgcctagcaaactcaaactacgaacgcactcacagtcgcatcataatcctctctcaaggacttcaaactctactcccactaatagctttttgatgacttctagcaagcctcgctaacctcgccttaccccccactattaacctactgggagaactctctgtgctagtaaccacgttctcctgatcaaatatcactctcctacttacaggactcaacatactagtcacagccctatactccctctacatatttaccacaacacaatggggctcactcacccaccacattaacaacataaaaccctcattcacacgagaaaacaccctcatgttcatacacctatcccccattctcctcctatccctcaaccccgacatcattaccgggttttcctcttgtaaatatagtttaaccaaaacatcagattgtgaatctgacaacagaggcttacgaccccttatttaccgagaaagctcacaagaactgctaactcatgcccccatgtctaacaacatggctttctcaacttttaaaggataacagctatccattggtcttaggccccaaaaattttggtgcaactccaaataaaagtaataaccatgcacactactataaccaccctaaccctgacttccctaattccccccatccttaccaccctcgttaaccctaacaaaaaaaactcatacccccattatgtaaaatccattgtcgcatccacctttattatcagtctcttccccacaacaatattcatgtgcctagaccaagaagttattatctcgaactgacactgagccacaacccaaacaacccagctctccctaagcttcaaactagactacttctccataatattcatccctgtagcattgttcgttacatggtccatcatagaattctcactgtgatatataaactcagacccaaacattaatcagttcttcaaatatctactcatcttcctaattaccatactaatcttagttaccgctaacaacctattccaactgttcatcggctgagagggcgtaggaattatatccttcttgctcatcagttgatgatacgcccgagcagatgccaacacagcagccattcaagcaatcctatacaaccgtatcggcgatatcggtttcatcctcgccttagcatgatttatcctacactccaactcatgagacccacaacaaatagcccttctaaacgctaatccaagcctcaccccactactaggcctcctcctagcagcagcaggcaaatcagcccaattaggtctccacccctgactcccctcagccatagaaggccccaccccagtctcagccctactccactcaagcactatagttgtagcaggaatcttcttactcatccgcttccaccccctagcagaaaatagcccactaatccaaactctaacactatgcttaggcgctatcaccactctgttcgcagcagtctgcgcccttacacaaaatgacatcaaaaaaatcgtagccttctccacttcaagtcaactaggactcataatagttacaatcggcatcaaccaaccacacctagcattcctgcacatctgtacccacgccttcttcaaagccatactatttatgtgctccgggtccatcatccacaaccttaacaatgaacaagatattcgaaaaataggaggactactcaaaaccatacctctcacttcaacctccctcaccattggcagcctagcattagcaggaatacctttcctcacaggtttctactccaaagaccacatcatcgaaaccgcaaacatatcatacacaaacgcctgagccctatctattactctcatcgctacctccctgacaagcgcctatagcactcgaataattcttctcaccctaacaggtcaacctcgcttccccacccttactaacattaacgaaaataaccccaccctactaaaccccattaaacgcctggcagccggaagcctattcgcaggatttctcattactaacaacatttcccccgcatcccccttccaaacaacaatccccctctacctaaaactcacagccctcgctgtcactttcctaggacttctaacagccctagacctcaactacctaaccaacaaacttaaaataaaatccccactatgcacattttatttctccaacatactcggattctaccctagcatcacacaccgcacaatcccctatctaggccttcttacgagccaaaacctgcccctactcctcctagacctaacctgactagaaaagctattacctaaaacaatttcacagcaccaaatctccacctccatcatcacctcaacccaaaaaggcataattaaactttacttcctctctttcttcttcccactcatcctaaccctactcctaatcacataacctattcccccgagcaatctcaattacaatatatacaccaacaaacaatgttcaaccagtaactactactaatcaacgcccataatcatacaaagcccccgcaccaataggatcctcccgaatcaaccctgacccctctccttcataaattattcagcttcctacactattaaagtttaccacaaccaccaccccatcatactctttcacccacagcaccaatcctacctccatcgctaaccccactaaaacactcaccaagacctcaacccctgacccccatgcctcaggatactcctcaatagccatcgctgtagtatatccaaagacaaccatcattccccctaaataaattaaaaaaactattaaacccatataacctcccccaaaattcagaataataacacacccgaccacaccgctaacaatcaatactaaacccccataaataggagaaggcttagaagaaaaccccacaaaccccattactaaacccacactcaacagaaacaaagcatacatcattattctcgcacggactacaaccacgaccaatgatatgaaaaaccatcgttgtatttcaactacaagaacaccaatgaccccaatacgcaaaactaaccccctaataaaattaattaaccactcattcatcgacctccccaccccatccaacatctccgcatgatgaaacttcggctcactccttggcgcctgcctgatcctccaaatcaccacaggactattcctagccatgcactactcaccagacgcctcaaccgccttttcatcaatcgcccacatcactcgagacgtaaattgtggctgaatcatccgctaccttcacgccaatggcgcctcaatattctttatctgcctcttcctacacatcgggcgaggcctatattacggatcatttctctactcagaaacctgaaacatcggcattatcctcctgcttgcaactatagcaacagccttcataggctatgtcctcccgtgaggccaaatatcattctgaggggccacagtaattacaaacttactatccgccatcccatacattgggacagacctagttcaatgaatctgaggaggctactcagtagacagtcccaccctcacacgattctttacctttcacttcatcttgcccttcattattgcagccctagcagcactccacctcctattcttgcacgaaacgggatcaaacaaccccctaggaatcacctcccattccgataaaatcaccttccacccttactacacaatcaaagacgccctcggcttacttctcttccttctctccttaatgacattaacactattctcaccagacctcctaggcgacccagacaattataccctagccaaccccttaaacacccctccccacatcaagcccgaatgatatttcctattcgcctacacaattctccgatccgtccctaacaaactaggaggcgtccttgccctattactatccatcctcatcctagcaataatccccatcctccatatatccaaacaacaaagcataatatttcgcccactaagccaatcactttattgactcctagccgcagacctcctcattctaacctgaatcggaggacaaccagtaagctacccttttaccatcattggacaagtagcatccgtactatacttcacaacaatcctaatcctaataccaactatctccctaattgaaaacaaaatactcaaatgggcctgtccttgtagtataaactaatacaccagtcttgtaaaccggagatgaaaacctttttccaaggacaaatcagagaaaaagtctttaactccaccattagcacccaaagctaagattctaatttaaactattctctgttctttcatggggaagcagatttgggtaccacccaagtattgactcacccatcaacaaccgctatgtatttcgtacattactgccagccaccatgaatattgtacggtaccataaatacttgaccacctgtagtacataaaaacccaatccacatcaaaaccccctccccatgcttacaagcaagtacagcaatcaaccctcaactatcacacatcaactgcaactccaaagccacccctcacccactaggataccaacaaacctacccacccttaacagtacatagtacataaagccatttaccgtacatagcacattacagtcaaatcccttctcgcccccatggatgacccccctcagataggggtcccttgaccaccatcctccgtgaaatcaatatcccgcacaagagtgctactctcctcgctccgggcccataacacttgggggtagctaaagtgaactgtatccgacatctggttcctacttcagggtcataaagcctaaatagcccacacgttccccttaaataagacatcacgatg

SEQ ID NO: 27 - DNA, 16575 bp, Homo sapiens mitochondrial
  3113: "n" refers to a nucleotide at position 3107 of the Cambridge Reference Sequence (CRS, Anderson et al. 1981 Nature 290:457-465), later determined to be absent from the human mtDNA sequence according to the revised CRS (rCRS, Andrews et al. 1999 Nature Genetics 23:147); "n" therefore represents a single nucleotide deletion at a position corresponding to nucleotide 3107 of SEQ ID NO:1 as provided herein.
gatcacaggtctatcaccctattaaccactcacgggagctctccatgcatttggtattttcgtctggggggtatgcacgcgatagcattgcgagacgctggagccggagcaccctatgtcgcagtatctgtctttgattcctgcctcatcctattatttatcgcacctacgttcaatattacaggcgaacatacttactaaagtgtgttaattaattaatgcttgtaggacataataataacaattgaatgtctgcacagcccctttccacacagacatcataacaaaaaatttccaccaaaccccccctcccccccgcttctggccacagcacttaaacacatctctgccaaaccccaaaaacaaagaaccctaacaccagcctaaccagatttcaaattttatcttttggcggtatgcacttttaacagtcaccccccaactaacacattattttcccctcccactcccatactaccaatctcatcaatacaacccccgcccatcctacccagcacacacacaccacacgctgctaaccccataccccgaaccaaccaaaccccaaagacaccccccacagtttatgtagcttacctcctcaaagcaatacactgaaaatgtttagacgggctcacatcaccccataaacaaataggtttggtcctagcctttctattagctcttagtaagattacacatgcaagcatccccgttccagtgagttcaccctctaaatcaccacgatcaaaagggacaagcatcaagcacgcagcaatgcagctcaaaacgcttagcctagccacacccccacgggaaacagcagtgattaacctttagcaataaacgaaagtttaactaagctatactaaccccagggttggtcaatttcgtgccagccaccgcggtcacacgattaacccaagtcaatagaagccggcgtaaagagtgttttagatcaccccctccccaataaagctaaaactcacctgagttgtaaaaaactccagttgacacaaaatagactacgaaagtggctttaacatatctgaacacacaatagctaagacccaaactgggattagataccccactatgcttagccctaaacctcaacagttaaatcaacaaaactgctcgccagaacactacgagccacagcttaaaactcaaaggacctggcggtgcttcatatccctctagaggagcctgttctgtaatcgataaaccccgatcaacctcaccacctcttgctcagcctatataccgccatcttcagcaaaccctgatgaaggctacaaagtaagcgcaagtacccacgtaaagacgttaggtcaaggtgtagcccatgaggtggcaagaaatgggctacattttctaccccagaaaactacgatagcccttatgaaacttaagggtcgaaggtggatttagcagtaaactgagagtagagtgcttagttgaacagggccctgaagcgcgtacacaccgcccgtcaccctcctcaagtatacttcaaaggacatttaactaaaacccctacgcatttatatagaggagacaagtcgtaacatggtaagtgtactggaaagtgcacttggacgaaccagagtgtagcttaacacaaagcacccaacttacacttaggagatttcaacttaacttgaccgctctgagctaaacctagccccaaacccactccaccttactaccagacaaccttagccaaaccatttacccaaataaagtataggcgatagaaattgaaacctggcgcaatagatatagtaccgcaagggaaagatgaaaaattataaccaagcataatatagcaaggactaacccctataccttctgcataatgaattaactagaaataactttgcaaggagagccaaagctaagacccccgaaaccagacgagctacctaagaacagctaaaagagcacacccgtctatgtagcaaaatagtgggaagatttataggtagaggcgacaaacctaccgagcctggtgatagctggttgtccaagatagaatcttagttcaactttaaatttgcccacagaaccctctaaatccccttgtaaatttaactgttagtccaaagaggaacagctctttggacactaggaaaaaaccttgtagagagagtaaaaaatttaacacccatagtaggcctaaaagcagccaccaattaagaaagcgttcaagctcaacacccactacctaaaaaatcccaaacatataactgaactcctcacacccaattggaccaatctatcaccctatagaagaactaatgttagtataagtaacatgaaaacattctcctccgcataagcctgcgtcagattaaaacactgaactgacaattaacagcccaatatctacaatcaaccaacaagtcattattaccctcactgtcaacccaacacaggcatgctcataaggaaaggttaaaaaaagtaaaaggaactcggcaaatcttaccccgcctgtttaccaaaaacatcacctctagcatcaccagtattagaggcaccgcctgcccagtgacacatgtttaacggccgcggtaccctaaccgtgcaaaggtagcataatcacttgttccttaaatagggacctgtatgaatggctccacgagggttcagctgtctcttacttttaaccagtgaaattgacctgcccgtgaagaggcgggcataacacagcaagacgagaagaccctatggagctttaatttattaatgcaaacagtacctaacaaacccacaggtcctaaactaccaaacctgcattaaaaatttcggttggggcgacctcggagcagaacccaacctccgagcagtacatgctaagacttcaccagtcaaagcgaactactatactcaattgatccaataacttgaccaacggaacaagttaccctagggataacagcgcaatcctattctagagtccatatcaacaatagggtttacgacctcgatgttggatcaggacatcccaatggtgcagccgctattaaaggttcgtttgttcaacgattaaagtcctacgtgatctgagttcagaccggagtaatccaggtcggtttctatctacnttcaaattcctccctgtacgaaaggacaagagaaataaggcctacttcacaaagcgccttcccccgtaaatgatatcatctcaacttagtattatacccacacccacccaagaacagggtttgttaagatggcagagcccggtaatcgcataaaacttaaaactttacagtcagaggttcaattcctcttcttaacaacatacccatggccaacctcctactcctcattgtacccattctaatcgcaatggcattcctaatgcttaccgaacgaaaaattctaggctatatacaactacgcaaaggccccaacgttgtaggcccctacgggctactacaacccttcgctgacgccataaaactcttcaccaaagagcccctaaaacccgccacatctaccatcaccctctacatcaccgccccgaccttagctctcaccatcgctcttctactatgaacccccctccccatacccaaccccctggtcaacctcaacctaggcctcctatttattctagccacctctagcctagccgtttactcaatcctctgatcagggtgagcatcaaactcaaactacgccctgatcggggcactgcgagcagtagcccaaacaatctcatatgaagtcaccctagccatcattctactatcaacattactaataagtggctcctttaacctctccacccttatcacaacacaagaacacctctgattactcctgccatcatgacccttggccataatatgatttatctccacactagcagagaccaaccgaacccccttcgaccttgccgaaggggagtccgaactagtctcaggcttcaacatcgaatacgccgcaggccccttcgccctattcttcatagccgaatacacaaacattattataataaacaccctcaccactacaatcttcctaggaacaacatatgacgcactctcccctgaactctacacaacatattttgtcaccaagaccctacttctaacctccctgttcttatgaattcgaacagcatacccccgattccgctacgaccaactcatacacctcctatgaaaaaacttcctaccactcaccctagcattacttatatgatatgtctccatacccattacaatctccagcattccccctcaaacctaagaaatatgtctgataaaagagttactttgatagagtaaataataggagcttaaacccccttatttctaggactatgagaatcgaacccatccctgagaatccaaaattctccgtgccacctatcacaccccatcctaaagtaaggtcagctaaataagctatcgggcccataccccgaaaatgttggttatacccttcccgtactaattaatcccctggcccaacccgtcatctactctaccatctttgcaggcacactcatcacagcgctaagctcgcactgattttttacctgagtaggcctagaaataaacatgctagcttttattccagttctaaccaaaaaaataaaccctcgttccacagaagctgccatcaagtatttcctcacgcaagcaaccgcatccataatccttctaatagctatcctcttcaacaatatactctccggacaatgaaccataaccaatactaccaatcaatactcatcattaataatcataatggctatagcaataaaactaggaatagccccctttcacttctgagtcccagaggttacccaaggcacccctctgacatccggcctgcttcttctcacatgacaaaaactagcccccatctcaatcatataccaaatctctccctcactaaacgtaagccttctcctcactctctcaatcttatccatcatagcaggcagttgaggtggattaaaccaaacccagctacgcaaaatcttagcatactcctcaattacccacataggatgaataatagcagttctaccgtacaaccctaacataaccattcttaatttaactatttatattatcctaactactaccgcattcctactactcaacttaaactccagcaccacgaccctactactatctcgcacctgaaacaagctaacatgactaacacccttaattccatccaccctcctctccctaggaggcctgcccccgctaaccggctttttgcccaaatgggccattatcgaagaattcacaaaaaacaatagcctcatcatccccaccatcatagccaccatcaccctccttaacctctacttctacctacgcctaatctactccacctcaatcacactactccccatatctaacaacgtaaaaataaaatgacagtttgaacatacaaaacccaccccattcctccccacactcatcgcccttaccacgctactcctacctatctccccttttatactaataatcttatagaaatttaggttaaatacagaccaagagccttcaaagccctcagtaagttgcaatacttaatttctgtaacagctaaggactgcaaaaccccactctgcatcaactgaacgcaaatcagccactttaattaagctaagcccttactagaccaatgggacttaaacccacaaacacttagttaacagctaagcaccctaatcaactggcttcaatctacttctcccgccgccgggaaaaaaggcgggagaagccccggcaggtttgaagctgcttcttcgaatttgcaattcaatatgaaaatcacctcggagctggtaaaaagaggcctaacccctgtctttagatttacagtccaatgcttcactcagccattttacctcacccccactgatgttcgccgaccgttgactattctctacaaaccacaaagacattggaacactatacctattattcggcgcatgagctggagtcctaggcacagctctaagcctccttattcgagccgagctgggccagccaggcaaccttctaggtaacgaccacatctacaacgttatcgtcacagcccatgcatttgtaataatcttcttcatagtaatacccatcataatcggaggctttggcaactgactagttcccctaataatcggtgcccccgatatggcgtttccccgcataaacaacataagcttctgactcttacctccctctctcctactcctgctcgcatctgctatagtggaggccggagcaggaacaggttgaacagtctaccctcccttagcagggaactactcccaccctggagcctccgtagacctaaccatcttctccttacacctagcaggtgtctcctctatcttaggggccatcaatttcatcacaacaattatcaatataaaaccccctgccataacccaataccaaacgcccctcttcgtctgatccgtcctaatcacagcagtcctacttctcctatctctcccagtcctagctgctggcatcactatactactaacagaccgcaacctcaacaccaccttcttcgaccccgccggaggaggagaccccattctataccaacacctattctgatttttcggtcaccctgaagtttatattcttatcctaccaggcttcggaataatctcccatattgtaacttactactccggaaaaaaagaaccatttggatacataggtatggtctgagctatgatatcaattggcttcctagggtttatcgtgtgagcacaccatatatttacagtaggaatagacgtagacacacgagcatatttcacctccgctaccataatcatcgctatccccaccggcgtcaaagtatttagctgactcgccacactccacggaagcaatatgaaatgatctgctgcagtgctctgagccctaggattcatctttcttttcaccgtaggtggcctgactggcattgtattagcaaactcatcactagacatcgtactacacgacacgtactacgttgtagcccacttccactatgtcctatcaataggagctgtatttgccatcataggaggcttcattcactgatttcccctattctcaggctacaccctagaccaaacctacgccaaaatccatttcactatcatattcatcggcgtaaatctaactttcttcccacaacactttctcggcctatccggaatgccccgacgttactcggactaccccgatgcatacaccacatgaaacatcctatcatctgtaggctcattcatttctctaacagcagtaatattaataattttcatgatttgagaagccttcgcttcgaagcgaaaagtcctaatagtagaagaaccctccataaacctggagtgactatatggatgccccccaccctaccacacattcgaagaacccgtatacataaaatctagacaaaaaaggaaggaatcgaaccccccaaagctggtttcaagccaaccccatggcctccatgactttttcaaaaaggtattagaaaaaccatttcataactttgtcaaagttaaattataggctaaatcctatatatcttaatggcacatgcagcgcaagtaggtctacaagacgctacttcccctatcatagaagagcttatcacctttcatgatcacgccctcataatcattttccttatctgcttcctagtcctgtatgcccttttcctaacactcacaacaaaactaactaatactaacatctcagacgctcaggaaatagaaaccgtctgaactatcctgcccgccatcatcctagtcctcatcgccctcccatccctacgcatcctttacataacagacgaggtcaacgatccctcccttaccatcaaatcaattggccaccaatggtactgaacctacgagtacaccgactacggcggactaatcttcaactcctacatacttcccccattattcctagaaccaggcgacctgcgactccttgacgttgacaatcgagtagtactcccgattgaagcccccattcgtataataattacatcacaagacgtcttgcactcatgagctgtccccacattaggcttaaaaacagatgcaattcccggacgtctaaaccaaaccactttcaccgctacacgaccgggggtatactacggtcaatgctctgaaatctgtggagcaaaccacagtttcatgcccatcgtcctagaattaattcccctaaaaatctttgaaatagggcccgtatttaccctatagcaccccctctaccccctctagagcccactgtaaagctaacttagcattaaccttttaagttaaagattaagagaaccaacacctctttacagtgaaatgccccaactaaatactaccgtatggcccaccataattacccccatactccttacactattcctcatcacccaactaaaaatattaaacacaaactaccacctacctccctcaccaaagcccataaaaataaaaaattataacaaaccctgagaaccaaaatgaacgaaaatctgttcgcttcattcattgcccccacaatcctaggcctacccgccgcagtactgatcattctatttccccctctattgatccccacctccaaatatctcatcaacaaccgactaatcaccacccaacaatgactaatcaaactaacctcaaaacaaatgataaccatacacaacactaaaggacgaacctgatctcttatactagtatccttaatcatttttattgccacaactaacctcctcggactcctgcctcactcatttacaccaaccacccaactatctataaacctagccatggccatccccttatgagcgggcgcagtgattataggctttcgctctaagattaaaaatgccctagcccacttcttaccacaaggcacacctacaccccttatccccatactagttattatcgaaaccatcagcctactcattcaaccaatagccctggccgtacgcctaaccgctaacattactgcaggccacctactcatgcacctaattggaagcgccaccctagcaatatcaaccattaaccttccctctacacttatcatcttcacaattctaattctactgactatcctagaaatcgctgtcgccttaatccaagcctacgttttcacacttctagtaagcctctacctgcacgacaacacataatgacccaccaatcacatgcctatcatatagtaaaacccagcccatgacccctaacaggggccctctcagccctcctaatgacctccggcctagccatgtgatttcacttccactccataacgctcctcatactaggcctactaaccaacacactaaccatataccaatgatggcgcgatgtaacacgagaaagcacataccaaggccaccacacaccacctgtccaaaaaggccttcgatacgggataatcctatttattacctcagaagtttttttcttcgcaggatttttctgagccttttaccactccagcctagcccctaccccccaattaggagggcactggcccccaacaggcatcaccccgctaaatcccctagaagtcccactcctaaacacatccgtattactcgcatcaggagtatcaatcacctgagctcaccatagtctaatagaaaacaaccgaaaccaaataattcaagcactgcttattacaattttactgggtctctattttaccctcctacaagcctcagagtacttcgagtctcccttcaccatttccgacggcatctacggctcaacattttttgtagccacaggcttccacggacttcacgtcattattggctcaactttcctcactatctgcttcatccgccaactaatatttcactttacatccaaacatcactttggcttcgaagccgccgcctgatactggcattttgtagatgtggtttgactatttctgtatgtctccatctattgatgagggtcttactcttttagtataaatagtaccgttaacttccaattaactagttttgacaacattcaaaaaagagtaataaacttcgccttaattttaataatcaacaccctcctagccttactactaataattattacattttgactaccacaactcaacggctacatagaaaaatccaccccttacgagtgcggcttcgaccctatatcccccgcccgcgtccctttctccataaaattcttcttagtagctattaccttcttattatttgatctagaaattgccctccttttacccctaccatgagccctacaaacaactaacctgccactaatagttatgtcatccctcttattaatcatcatcctagccctaagtctggcctatgagtgactacaaaaaggattagactgaaccgaattggtatatagtttaaacaaaacgaatgatttcgactcattaaattatgataatcatatttaccaaatgcccctcatttacataaatattatactagcatttaccatctcacttctaggaatactagtatatcgctcacacctcatatcctccctactatgcctagaaggaataatactatcgctgttcattatagctactctcataaccctcaacacccactccctcttagccaatattgtgcctattgccatactagtctttgccgcctgcgaagcagcggtgggcctagccctactagtctcaatctccaacacatatggcctagactacgtacataacctaaacctactccaatgctaaaactaatcgtcccaacaattatattactaccactgacatgactttccaaaaaacacataatttgaatcaacacaaccacccacagcctaattattagcatcatccctctactattttttaaccaaatcaacaacaacctatttagctgttccccaaccttttcctccgaccccctaacaacccccctcctaatactaactacctgactcctacccctcacaatcatggcaagccaacgccacttatccagtgaaccactatcacgaaaaaaactctacctctctatactaatctccctacaaatctccttaattataacattcacagccacagaactaatcatattttatatcttcttcgaaaccacacttatccccaccttggctatcatcacccgatgaggcaaccagccagaacgcctgaacgcaggcacatacttcctattctacaccctagtaggctcccttcccctactcatcgcactaatttacactcacaacaccctaggctcactaaacattctactactcactctcactgcccaagaactatcaaactcctgagccaacaacttaatatgactagcttacacaatagcttttatagtaaagatacctctttacggactccacttatgactccctaaagcccatgtcgaagcccccatcgctgggtcaatagtacttgccgcagtactcttaaaactaggcggctatggtataatacgcctcacactcattctcaaccccctgacaaaacacatagcctaccccttccttgtactatccctatgaggcataattataacaagctccatctgcctacgacaaacagacctaaaatcgctcattgcatactcttcaatcagccacatagccctcgtagtaacagccattctcatccaaaccccctgaagcttcaccggcgcagtcattctcataatcgcccacgggcttacatcctcattactattctgcctagcaaactcaaactacgaacgcactcacagtcgcatcataatcctctctcaaggacttcaaactctactcccactaatagctttttgatgacttctagcaagcctcgctaacctcgccttaccccccactattaacctactgggagaactctctgtgctagtaaccacgttctcctgatcaaatatcactctcctacttacaggactcaacatactagtcacagccctatactccctctacatatttaccacaacacaatggggctcactcacccaccacattaacaacataaaaccctcattcacacgagaaaacaccctcatgttcatacacctatcccccattctcctcctatccctcaaccccgacatcattaccgggttttcctcttgtaaatatagtttaaccaaaacatcagattgtgaatctgacaacagaggcttacgaccccttatttaccgagaaagctcacaagaactgctaactcatgcccccatgtctaacaacatggctttctcaacttttaaaggataacagctatccattggtcttaggccccaaaaattttggtgcaactccaaataaaagtaataaccatgcacactactataaccaccctaaccctgacttccctaattccccccatccttaccaccctcgttaaccctaacaaaaaaaactcatacccccattatgtaaaatccattgtcgcatccacctttattatcagtctcttccccacaacaatattcatgtgcctagaccaagaagttattatctcgaactgacactgagccacaacccaaacaacccagctctccctaagcttcaaactagactacttctccataatattcatccctgtagcattgttcgttacatggtccatcatagaattctcactgtgatatataaactcagacccaaacattaatcagttcttcaaatatctactcatcttcctaattaccatactaatcttagttaccgctaacaacctattccaactgttcatcggctgagagggcgtaggaattatatccttcttgctcatcagttgatgatacgcccgagcagatgccaacacagcagccattcaagcaatcctatacaaccgtatcggcgatatcggtttcatcctcgccttagcatgatttatcctacactccaactcatgagacccacaacaaatagcccttctaaacgctaatccaagcctcaccccactactaggcctcctcctagcagcagcaggcaaatcagcccaattaggtctccacccctgactcccctcagccatagaaggccccaccccagtctcagccctactccactcaagcactatagttgtagcaggaatcttcttactcatccgcttccaccccctagcagaaaatagcccactaatccaaactctaacactatgcttaggcgctatcaccactctgttcgcagcagtctgcgcccttacacaaaatgacatcaaaaaaatcgtagccttctccacttcaagtcaactaggactcataatagttacaatcggcatcaaccaaccacacctagcattcctgcacatctgtacccacgccttcttcaaagccatactatttatgtgctccgggtccatcatccacaaccttaacaatgaacaagatattcgaaaaataggaggactactcaaaaccatacctctcacttcaacctccctcaccattggcagcctagcattagcaggaatacctttcctcacaggtttctactccaaagaccacatcatcgaaaccgcaaacatatcatacacaaacgcctgagccctatctattactctcatcgctacctccctgacaagcgcctatagcactcgaataattcttctcaccctaacaggtcaacctcgcttccccacccttactaacattaacgaaaataaccccaccctactaaaccccattaaacgcctggcagccggaagcctattcgcaggatttctcattactaacaacatttcccccgcatcccccttccaaacaacaatccccctctacctaaaactcacagccctcgctgtcactttcctaggacttctaacagccctagacctcaactacctaaccaacaaacttaaaataaaatccccactatgcacattttatttctccaacatactcggattctaccctagcatcacacaccgcacaatcccctatctaggccttcttacgagccaaaacctgcccctactcctcctagacctaacctgactagaaaagctattacctaaaacaatttcacagcaccaaatctccacctccatcatcacctcaacccaaaaaggcataattaaactttacttcctctctttcttcttcccactcatcctaaccctactcctaatcacataacctattcccccgagcaatctcaattacaatatatacaccaacaaacaatgttcaaccagtaactactactaatcaacgcccataatcatacaaagcccccgcaccaataggatcctcccgaatcaaccctgacccctctccttcataaattattcagcttcctacactattaaagtttaccacaaccaccaccccatcatattctttcacccacagcaccaatcctacctccatcgctaaccccactaaaacactcaccaagacctcaacccctgacccccatgcctcaggatactcctcaatagccatcgctgtagtatatccaaagacaaccatcattccccctaaataaattaaaaaaactattaaacccatataacctcccccaaaattcagaataataacacacccgaccacaccgctaacaatcaatactaaacccccataaataggagaaggcttagaagaaaaccccacaaaccccattactaaacccacactcaacagaaacaaagcatacatcattattctcgcacggactacaaccacgaccaatgatatgaaaaaccatcgttgtatttcaactacaagaacaccaatgaccccaatacgcaaaactaaccccctaataaaattaattaaccactcattcatcgacctccccaccccatccaacatctccgcatgatgaaacttcggctcactccttggcgcctgcctgatcctccaaatcaccacaggactattcctagccatgcactactcaccagacgcctcaaccgccttttcatcaatcgcccacatcactcgagacgtaaattatggctgaatcatccgctaccttcacgccaatggcgcctcaatattctttatctgcctcttcctacacatcgggcgaggcctatattacggatcatttctctactcagaaacctgaaacatcggcattatcctcctgcttgcaactatagcaacagccttcataggctatgtcctcccgtgaggccaaatatcattctgaggggccacagtaattacaaacttactatccgccatcccatacattgggacagacctagttcaatgaatctgaggaggctactcagtagacagtcccaccctcacacgattctttacctttcacttcatcttgcccttcattattgcagccctagcagcactccacctcctattcttgcacgaaacgggatcaaacaaccccctaggaatcacctcccattccgataaaatcaccttccacccttactacacaatcaaagacgccctcggcttacttctcttccttctctccttaatgacattaacactattctcaccagacctcctaggcgacccagacaattataccctagccaaccccttaaacacccctccccacatcaagcccgaatgatatttcctattcgcctacacaattctccgatccgtccctaacaaactaggaggcgtccttgccctattactatccatcctcatcctagcaataatccccatcctccatatatccaaacaacaaagcataatatttcgcccactaagccaatcactttattgactcctagccgcagacctcctcattctaacctgaatcggaggacaaccagtaagctacccttttaccatcattggacaagtagcatccgtactatacttcacaacaatcctaatcctaataccaactatctccctaattgaaaacaaaatactcaaatgggcctgtccttgtagtataaactaatacaccagtcttgtaaaccggagatgaaaacctttttccaaggacaaatcagagaaaaagtctttaactccaccattagcacccaaagctaagattctaatttaaactattctctgttctttcatggggaagcagatttgggtaccacccaagtattgactcacccatcaacaaccgctatgtatttcgtacattactgccagccaccatgaatattgtacggtaccataaatacttgaccacctgtagtacataaaaacccaatccacatcaaaaccccctccccatgcttacaagcaagtacagcaatcaaccctcaactatcacacatcaactgcaactccaaagccacccctcacccactaggataccaacaaacctacccacccttaacagtacatagtacataaagccatttaccgtacatagcacattacagtcaaatcccttctcgtccccatggatgacccccctcagataggggtcccttgaccaccatcctccgtgaaatcaatatcccgcacaagagtgctactctcctcgctccgggcccataacacttgggggtagctaaagtgaactgtatccgacatctggttcctacttcagggccataaagcctaaatagcccacacgttccccttaaataagacatcacgatg

SEQ ID NO: 28 - DNA, 16570 bp, Homo sapiens mitochondrial
  3108: "n" refers to a nucleotide at position 3107 of the Cambridge Reference Sequence (CRS, Anderson et al. 1981 Nature 290:457-465), later determined to be absent from the human mtDNA sequence according to the revised CRS (rCRS, Andrews et al. 1999 Nature Genetics 23:147); "n" therefore represents a single nucleotide deletion at a position corresponding to nucleotide 3107 of SEQ ID NO:1 as provided herein.
gatcacaggtctatcaccctattaaccactcacgggagctctccatgcatttggtattttcgtctggggggtatgcacgcgatagcattgcgagacgctggagccggagcaccctatgtcgcagtatctgtctttgattcctgcctcatcccattatttatcgcacctacgttcaatattacaggcgaacatacttactaaagtgtgttaattaattaatgcttgtaggacataataataacaattgaatgtctgcacagccgctttccacacagacatcataacaaaaaatttccaccaaaccccccctcccccgccttctggccacagcacttaaacacatctctgccaaaccccaaaaacaaagaaccctaacaccagcctaaccagatttcaaattttatcttttggcggtatgcacttttaacagtcaccccccaactaacacattatttttccctcccactcccatactactaatctcatcaatacaacccccgcccatcctacccagcacacacacaccgctgctaaccccataccccgaaccaaccaaaccccaaagacaccccccacagtttatgtagcttacctcctcaaagcaatacactgaaaatgtttagacgggctcacatcaccccataaacaaataggtttggtcctagcctttctattagctcttagtaagattacacatgcaagcatccccgttccagtgagttcaccctctaaatcaccacgatcaaaagggacaagcatcaagcacgcagcaatgcagctcaaaacgcttagcctagccacacccccacgggaaacagcagtgattaacctttagcaataaacgaaagtttaactaagctatactaaccccagggttggtcaatttcgtgccagccaccgcggtcacacgattaacccaagtcaatagaagccggcgtaaagagtgttttagatcaccccctccccaataaagctaaaactcacctgagttgtaaaaaactccagttgacacaaaatagactacgaaagtggctttaacatatctgaacacacaatagctaagacccaaactgggattagataccccactatgcttagccctaaacctcaacagttaaatcaacaaaactgctcgccagaacactacgagccacagcttaaaactcaaaggacctggcggtgcttcatatccctctagaggagcctgttctgtaatcgataaaccccgatcaacctcaccacctcttgctcagcctatataccgccatcttcagcaaaccctgatgaaggctacaaagtaagcgcaagtacccacgtaaagacgttaggtcaaggtgtagcccatgaggtggcaagaaatgggctacattttctaccccagaaaactacgatagcccttatgaaacttaagggtcgaaggtggatttagcagtaaactgagagtagagtgcttagttgaacagggccctgaagcgcgtacacaccgcccgtcaccctcctcaagtatacttcaaaggacatttaactaaaacccctacgcatttatatagaggagacaagtcgtaacatggtaagtgtactggaaagtgcacttggacgaaccagagtgtagcttaacacaaagcacccaacttacacttaggagatttcaacttaacttgaccgctctgagctaaacctagccccaaacccactccaccttactaccagacaaccttagccaaaccatttacccaaataaagtataggcgatagaaattgaaacctggcgcaatagatatagtaccgcaagggaaagatgaaaaattataaccaagcataatatagcaaggactaacccctataccttctgcataatgaattaactagaaataactttgcaaggagagccaaagctaagacccccgaaaccagacgagctacctaagaacagctaaaagagcacacccgtctatgtagcaaaatagtgggaagatttataggtagaggcgacaaacctaccgagcctggtgatagctggttgtccaagatagaatcttagttcaactttaaatttgcccacagaaccctctaaatccccttgtaaatttaactgttagtccaaagaggaacagctctttggacactaggaaaaaaccttgtagagagagtaaaaaatttaacacccatagtaggcctaaaagcagccaccaattaagaaagcgttcaagctcaacacccactacctaaaaaatcccaaacatataactgaactcctcacacccaattggaccaatctatcaccctatagaagaactaatgttagtataagtaacatgaaaacattctcctccgcataagcctgcgtcagattaaaacactgaactgacaattaacagcccaatatctacaatcaaccaacaagtcattattaccctcactgtcaacccaacacaggcatgctcataaggaaaggttaaaaaaagtaaaaggaactcggcaaatcttaccccgcctgtttaccaaaaacatcacctctagcatcaccagtattagaggcaccgcctgcccagtgacacatgtttaacggccgcggtaccctaaccgtgcaaaggtagcataatcacttgttccttaaatagggacctgtatgaatggctccacgagggttcagctgtctcttacttttaaccagtgaaattgacctgcccgtgaagaggcgggcataacacagcaagacgagaagaccctatggagctttaatttattaatgcaaacagtacctaacaaacccacaggtcctaaactaccaaacctgcattaaaaatttcggttggggcgacctcggagcagaacccaacctccgagcagtacatgctaagacttcaccagtcaaagcgaactactatactcaattgatccaataacttgaccaacggaacaagttaccctagggataacagcgcaatcctattctagagtccatatcaacaatagggtttacgacctcgatgttggatcaggacatcccgatggtgcagccgctatcaaaggttcgtttgttcaacgattaaagtcctacgtgatctgagttcagaccggagtaatccaggtcggtttctatctacnttcaaattcctccctgtacgaaaggacaagagaaataaggcctacttcacaaagcgccttcccccgtaaatgatatcatctcaacttagtattatacccacacccacccaagaacagggtttgttaagatggcagagcccggtaatcgcataaaacttaaaactttacagtcagaggttcaattcctcttcttaacaacatacccatggccaacctcctactcctcattgtacccattctaatcgcaatggcattcctaatgcttaccgaacgaaaaattctaggctatatacaactacgcaaaggccccaacgttgtaggcccctacgggctactacaacccttcgctgacgccataaaactcttcaccaaagagcccctaaaacccgccacatctaccatcaccctctacatcaccgccccgaccttagctctcaccatcgctcttctactatgaacccccctccccatacccaaccccctggtcaacctcaacctaggcctcctatttattctagccacctctagcctagccgtttactcaatcctctgatcagggtgagcatcaaactcaaactacgccctgatcggcgcactgcgagcagtagcccaaacaatctcatatgaagtcaccctagccatcattctactatcaacattactaataagtggctcctttaacctctccacccttatcacaacacaagaacacctctgattactcctgccatcatgacccttggccataatatgatttatctccacactagcagagaccaaccgaacccccttcgaccttgccgaaggggagtccgaactagtctcaggcttcaacatcgaatacgccgcaggccccttcgccctattcttcatagccgaatacacaaacattattataataaacaccctcaccactacaatcttcctaggaacaacatatgacgcactctcccctgaactctacacaacatattttgtcaccaagaccctacttctaacctccctgttcttatgaattcgaacagcatacccccgattccgctacgaccaactcatacacctcctatgaaaaaacttcctaccactcaccctagcattacttatatgatatgtctccatacccattacaatctccagcattccccctcaaacctaagaaatatgtctgataaaagagttactttgatagagtaaataataggagcttaaacccccttatttctaggaccatgagaatcgaacccatccctgagaatccaaaattctccgtgccacctatcacaccccatcctaaagtaaggtcagctaaataagctatcgggcccataccccgaaaatgttggttatacccttcccgtactaattaatcccctggcccaacccgtcatctactctaccatctttgcaggcacactcatcacagcgctaagctcgcactgattttttacctgagtaggcctagaaataaacatgctagcttttattccagttctaaccaaaaaaataaaccctcgttccacagaagctgccatcaagtatttcctcacgcaagcaaccgcatccataatccttctaatagctatcctcttcaacaatatactctccggacaatgaaccataaccaatactaccaatcaatactcatcattaataatcataatggctatagcaataaaactaggaatagccccctttcacttctgagtcccagaggttacccaaggcacccctctgacatccggcctgcttcttctcacatgacaaaaactagcccccatctcaatcatataccaaatctctccctcactaaacgtaagccttctcctcactctctcaatcttatccatcatagcaggcagttgaggtggattaaaccaaacccagctacgcaaaatcttagcatactcctcaattacccacataggatgaataatagcagttctaccgtacaaccctaacataaccattcttaatttaactatttatattatcctaactactaccgcattcctactactcaacttaaactccagcaccacgaccctactactatctcgcacctgaaacaagctaacatgactaacacccttaattccatccaccctcctctccctaggaggcctgcccccgctaaccggctttttgcccaaatgggccattatcgaagaattcacaaaaaacaatagcctcatcatccccaccatcatagccgccatcaccctccttaacctctacttctacctacgcctaatctactccacctcaatcacactactccccatatctaacaacgtaaaaataaaatgacagtttgaacatacaaaacccaccccattcctccccacactcatcgcccttaccacgctactcctacctatctccccttttatactaataatcttatagaaatttaggttaaatacagaccaagagccttcaaagccctcagtaagttgcaatacttaatttctgtaacagctaaggactgcaaaaccccactctgcatcaactgaacgcaaatcagccactttaattaagctaagcccttactagaccaatgggacttaaacccacaaacacttagttaacagctaagcaccctaatcaactggcttcaatctacttctcccgccgccgggaaaaaaggcgggagaagccccggcaggtttgaagctgcttcttcgaatttgcaattcaatatgaaaatcacctcggagctggtaaaaagaggcctaacccctgtctttagatttacagtccaatgcttcactcagccattttacctcacccccactgatgttcgccgaccgttgactattctctacaaaccacaaagacattggaacactatacctattattcggcgcatgagctggagtcctaggcacagctctaagcctccttattcgagccgagctgggccagccaggcaaccttctaggtaacgaccacatctacaacgttatcgtcacagcccatgcatttgtaataatcttcttcatagtaatacccatcataatcggaggctttggcaactgactagttcccctaataatcggtgcccccgatatggcgtttccccgcataaacaacataagcttctgactcttacctccctctctcctactcctgctcgcatctgctatagtggaggccggagcaggaacaggttgaacagtctaccctcccttagcagggaactactcccaccctggagcctccgtagacctaaccatcttctccttacacctagcaggtgtctcctctatcttaggggccatcaatttcatcacaacaattatcaatataaaaccccctgccataacccaataccaaacgcccctcttcgtctgatccgtcctaatcacagcagtcctacttctcctatctctcccagtcctagctgctggcatcactatactactaacagaccgcaacctcaacaccaccttcttcgaccccgccggaggaggagaccccattctataccaacacctattctgatttttcggtcaccctgaagtttatattcttatcctaccaggcttcggaataatctcccatattgtaacttactactccggaaaaaaagaaccatttggatacataggtatggtctgagctatgatatcaattggcttcctagggtttatcgtgtgagcacaccatatatttacagtaggaatagacgtagacacacgagcatatttcacctccgctaccataatcatcgctatccccaccggcgtcaaagtatttagctgactcgccacactccacggaagcaatatgaaatgatctgctgcagtgctctgagccctaggattcatctttcttttcaccgtaggtggcctgactggcattgtattagcaaactcatcactagacatcgtactacacgacacgtactacgttgtagcccacttccactatgtcctatcaataggagctgtatttgccatcataggaggcttcattcactgatttcccctattctcaggctacaccctagaccaaacctacgccaaaatccatttcactatcatattcatcggcgtaaatctaactttcttcccacaacactttctcggcctatccggaatgccccgacgttactcggactaccccgatgcatacaccacatgaaacatcctatcatctgtaggctcattcatttctctaacagcagtaatattaataattttcatgatttgagaagccttcgcttcgaagcgaaaagtcctaatagtagaagaaccctccataaacctggagtgactatatggatgccccccaccctaccacacattcgaagaacccgtatacataaaatctagacaaaaaaggaaggaatcgaaccccccaaagctggtttcaagccaaccccatggcctccatgactttttcaaaaaggtattagaaaaaccatttcataactttgtcaaagttaaattataggctaaatcctatatatcttaatggcacatgcagcgcaagtaggtctacaagacgctacttcccctatcatagaagagcttatcacctttcatgatcacgccctcataatcattttccttatctgcttcctagtcctgtatgcccttttcctaacactcacaacaaaactaactaatactaacatctcagacgctcaggaaatagaaaccgtctgaactatcctgcccgccatcatcctagtcctcatcgccctcccatccctacgcatcctttacataacagacgaggtcaacgatccctcccttaccatcaaatcaattggccaccaatggtactgaacctacgagtacaccgactacggcggactaatcttcaactcctacatacttcccccattattcctagaaccaggcgacctgcgactccttgacgttgacaatcgagtagtactcccgattgaagcccccattcgtataataattacatcacaagacgtcttgcactcatgagctgtccccacattaggcttaaaaacagatgcaattcccggacgtctaaaccaaaccactttcaccgctacacgaccgggggtatactacggtcaatgctctgaaatctgtggagcaaaccacagtttcatgcccatcgtcctagaattaattcccctaaaaatctttgaaatagggcccgtatttaccctatagcaccccctctaccccctctagagcccactgtaaagctaacttagcattaaccttttaagttaaagattaagagaaccaacacctctttacagtgaaatgccccaactaaatactaccgtatggcccaccataattacccccatactccttacactattcctcatcacccaactaaaaatattaaacacaaactaccacctacctccctcaccaaagcccataaaaataaaaaattataacaaaccctgagaaccaaaatgaacgaaaatctgttcgcttcattcattgcccccgcaatcctaggcctacccgccgcagtactgatcattctatttccccctctattgatccccacctccaaatatctcatcaacaaccgactaatcaccacccaacaatgactaatcaaactaacctcaaaacaaatgataaccatacacaacactaaaggacgaacctgatctcttatactagtatccttaatcatttttattgccacaactaacctcctcggactcctgcctcactcatttacaccaaccacccaactatctataaacctagccatggccatccccttatgagcgggcgcagtgattataggctttcgctctaagattaaaaatgccctagcccacttcttaccacaaggcacacctacaccccttatccccatactagttattatcgaaaccatcagcctactcattcaaccaatagccctggccgtacgcctaaccgctaacattactgcaggccacctactcatgcacctaattggaagcgccaccctagcaatatcaaccattaaccttccctctacacttatcatcttcacaattctaattctactgactatcctagaaatcgctgtcgccttaatccaagcctacgttttcacacttctagtaagcctctacctgcacgacaacacataatgacccaccaatcacatgcctatcatatagtaaaacccagcccatgacccctaacaggggccctctcagccctcctaatgacctccggcctagccatgtgatttcacttccactccataacgctcctcatactaggcctactaaccaacacactaaccatataccaatgatggcgcgatgtaacacgagaaagcacataccaaggccaccacacaccacctgtccaaaaaggccttcgatacgggataatcctatttattacctcagaagtttttttcttcgcaggatttttctgagccttttaccactccagcctagcccctaccccccaattaggagggcactggcccccaacaggcatcaccccgctaaatcccctagaagtcccactcctaaacacatccgtattactcgcatcaggagtatcaatcacctgagctcaccatagtctaatagaaaacaaccgaaaccaaataattcaagcactgcttattacaattttactgggtctctattttaccctcctacaagcctcagagtacttcgagtctcccttcaccatttccgacggcatctacggctcaacattttttgtagccacaggcttccacggacttcacgtcattattggctcaactttcctcactatctgcttcatccgccaactaatatttcactttacatccaaacatcactttggcttcgaagccgccgcctgatactggcattttgtagatgtggtttgactatttctgtatgtctccatctattgatgagggtcttactcttttagtataaatagtaccgttaacttccaattaactagttttgacaacattcaaaaaagagtaataaacttcgccttaattttaataatcaacaccctcctagccttactactaataattattacattttgactaccacaactcaacggctacatagaaaaatccaccccttacgagtgcggcttcgaccctatatcccccgcccgcgtccctttctccataaaattcttcttagtagctattaccttcttattatttgatctagaaattgccctccttttacccctaccatgagccctacaaacaactaacctgccactaatagttatgtcatccctcttattaatcatcatcctagccctaagtctggcctatgagtgactacaaaaaggattagactgaaccgaattggtatatagtttaaacaaaacgaatgatttcgactcattaaattatgataatcatatttaccaaatgcccctcatttacataaatattatactagcatttaccatctcacttctaggaatactagtatatcgctcacacctcatatcctccctactatgcctagaaggaataatactatcgctgttcattatagctactctcataaccctcaacacccactccctcttagccaatattgtgcctattgccatactagtctttgccgcctgcgaagcagcggtgggcctagccctactagtctcaatctccaacacatatggcctagactacgtacataacctaaacctactccaatgctaaaactaatcgtcccaacaattatattactaccactgacatgactttccaaaaaacacataatttgaatcaacacaaccacccacagcctaattattagcatcatccctctactattttttaaccaaatcaacaacaacctatttagctgttccccaaccttttcctccgaccccctaacaacccccctcctaatactaactacctgactcctacccctcacaatcatggcaagccaacgccacttatccagtgaaccactatcacgaaaaaaactctacctctctatactaatctccctacaaatctccttaattataacattcacagccacagaactaatcatattttatatcttcttcgaaaccacacttatccccaccttggctatcatcacccgatgaggcaaccagccagaacgcctgaacgcaggcacatacttcctattctacaccctagtaggctcccttcccctactcatcgcactaatttacactcacaacaccctaggctcactaaacattctactactcactctcactgcccaagaactatcaaactcctgagccaacaacttaatatgactagcttacacaatagcttttatagtaaagatacctctttacggactccacttatgactccctaaagcccatgtcgaagcccccatcgctgggtcaatagtacttgccgcagtactcttaaaactaggcggctatggtataatacgcctcacactcattctcaaccccctgacaaaacacatagcctaccccttccttgtactatccctatgaggcataattataacaagctccatctgcctacgacaaacagacctaaaatcgctcattgcatactcttcaatcagccacatagccctcgtagtaacagccattctcatccaaaccccctgaagcttcaccggcgcagtcattctcataatcgcccacgggcttacatcctcattactattctgcctagcaaactcaaactacgaacgcactcacagtcgcatcataatcctctctcaaggacttcaaactctactcccactaatagctttttgatgacttctagcaagcctcgctaacctcgccttaccccccactattaacctactgggagaactctctgtgctagtaaccacgttctcctgatcaaatatcactctcctacttacaggactcaacatactagtcacagccctatactccctctacatatttaccacaacacaatggggctcactcacccaccacattaacaacataaaaccctcattcacacgagaaaacaccctcatgttcatacacctatcccccattctcctcctatccctcaaccccgacatcattaccgggttttcctcttgtaaatatagtttaaccaaaacatcagattgtgaatctgacaacagaggcttacgaccccttatttaccgagaaagctcacaagaactgctaactcatgcccccatgtctaacaacatggctttctcaacttttaaaggataacagctatccattggtcttaggccccaaaaattttggtgcaactccaaataaaagtaataaccatgcacactactataaccaccctaaccctgacttccctaattccccccatccttaccaccctcgttaaccctaacaaaaaaaactcatacccccattatgtaaaatccattgtcgcatccacctttattatcagtctcttccccacaacaatattcatgtgcctagaccaagaagttattatctcgaactgacactgagccacaacccaaacaacccagctctccctaagcttcaaactagactacttctccataatattcatccctgtagcattgttcgttacatggtccatcatagaattctcactgtgatatataaactcagacccaaacattaatcagttcttcaaatatctactcatcttcctaattaccatactaatcttagttaccgctaacaacctattccaactgttcatcggctgagagggcgtaggaattatatccttcttgctcatcagttgatgatacgcccgagcagatgccaacacagcagccattcaagcaatcctatacaaccgtatcggcgatatcggtttcatcctcgccttagcatgatttatcctacactccaactcatgagacccacaacaaatagcccttctaaacgctaatccaagcctcaccccactactaggcctcctcctagcagcagcaggcaaatcagcccaattaggtctccacccctgactcccctcagccatagaaggccccaccccagtctcagccctactccactcaagcactatagttgtagcaggaatcttcttactcatccgcttccaccccctagcagaaaatagcccactaatccaaactctaacactatgcttaggcgctatcaccactctgttcgcagcagtctgcgcccttacacaaaatgacatcaaaaaaatcgtagccttctccacttcaagtcaactaggactcataatagttacaatcggcatcaaccaaccacacctagcattcctgcacatctgtacccacgccttcttcaaagccatactatttatgtgctccgggtccatcatccacaaccttaacaatgaacaagatattcgaaaaataggaggactactcaaaaccatacctctcacttcaacctccctcaccattggcagcctagcattagcaggaatacctttcctcacaggtttctactccaaagaccacatcatcgaaaccgcaaacatatcatacacaaacgcctgagccctatctattactctcatcgctacctccctgacaagcgcctatagcactcgaataattcttctcaccctaacaggtcaacctcgcttccccacccttactaacattaacgaaaataaccccaccctactaaaccccattaaacgcctggcagccggaagcctattcgcaggatttctcattactaacaacatttcccccgcatcccccttccaaacaacaatccccctctacctaaaactcacagccctcgctgtcactttcctaggacttctaacagccctagacctcaactacctaaccaacaaacttaaaataaaatccccactatgcacattttatttctccaacatactcggattctaccctagcatcacacaccgcacaatcccctatctaggccttcttacgagccaaaacctgcccctactcctcctagacctaacctgactagaaaagctattacctaaaacaatttcacagcaccaaatctccacctccatcatcacctcaacccaaaaaggcataattaaactttacttcctctctttcttcttcccactcatcctaaccctactcctaatcacataacctattcccccgagcaatctcaattacaatatatacaccaacaaacaatgttcaaccagtaactactactaatcaacgcccataatcatacaaagcccccgcaccaataggatcctcccgaatcaaccctgacccctctccttcataaattattcagcttcctacactattaaagtttaccacaaccaccaccccatcatactctttcacccacagcaccaatcctacctccatcgctaaccccactaaaacactcaccaagacctcaacccctgacccccatgcctcaggatactcctcaatagccatcgctgtagtatatccaaagacaaccatcattccccctaaataaattaaaaaaactattaaacccatataacctcccccaaaattcagaataataacacacccgaccacaccgctaacaatcaatactaaacccccataaataggagaaggcttagaagaaaaccccacaaaccccattactaaacccacactcaacagaaacaaagcatacatcattattctcgcacggactacaaccacgaccaatgatatgaaaaaccatcgttgtatttcaactacaagaacaccaatgaccccaatacgcaaaactaaccccctaataaaattaattaaccactcattcatcgacctccccaccccatccaacatctccgcatgatgaaacttcggctcactccttggcgcctgcctgatcctccaaatcaccacaggactattcctagccatgcactactcaccagacgcctcaaccgccttttcatcaatcgcccacatcactcgagacgtaaattatggctgaatcatccgctaccttcacgccaatggcgcctcaatattctttatctgcctcttcctacacatcgggcgaggcctatattacggatcatttctctactcagaaacctgaaacatcggcattatcctcctgcttgcaactatagcaacagccttcataggctatgtcctcccgtgaggccaaatatcattctgaggggccacagtaattacaaacttactatccgccatcccatacattgggacagacctagttcaatgaatctgaggaggctactcagtagacagtcccaccctcacacgattctttacctttcacttcatcttgcccttcattattgcagccctagcagcactccacctcctattcttgcacgaaacgggatcaaacaaccccctaggaatcacctcccattccgataaaatcaccttccacccttactacacaatcaaagacgccctcggcttacttctcttccttctctccttaatgacattaacactattctcaccagacctcctaggcgacccagacaattataccctagccaaccccttaaacacccctccccacatcaagcccgaatgatatttcctattcgcctacacaattctccgatccgtccctaacaaactaggaggcgtccttgccctattactatccatcctcatcctagcaataatccccatcctccatatatccaaacaacaaagcataatatttcgcccactaagccaatcactttattgactcctagccgcagacctcctcattctaacctgaatcggaggacaaccaataagctacccttttaccatcattggacaagtagcatccgtactatacttcacaacaatcctaatcctaataccaactatctccctaattgaaaacaaaatactcaaatgggcctgtccttgtagtataaactaatacaccagtcttgtaaaccggagatgaaaacctttttccaaggacaaatcagagaaaaagtctttaactccaccattagcacccaaagctaagattctaatttaaactattctctgttctttcatggggaagcagatttgggtaccacccaagtattgactcacccatcaacaaccgctatgtatttcgtacattactgccagccaccatgaatattgtacggtaccataaatacttgaccacctgtagtacataaaaacccaatccacatcaaaaccccctccccatgcttacaagcaagtacagcaatcaaccctcaactatcacacatcaactgcaactccaaagccacccctcacccactaggataccaacaaacctacccacccttaacagcacatagtacataaagccatttaccgtacatagcacattacagtcaaatcccttctcgtccccatggatgacccccctcagataggggtcccttgaccaccatcctccgtgaaatcaatatcccgcacaagagtgctactctcctcgctccgggcccataacacttgggggtagctaaagtgaactgtatccgacatctggttcctacttcagggtcataaagcctaaatagcccacacgttccccttaaataagacatcacgatg

SEQ ID NO: 29 - DNA, 16570 bp, Homo sapiens mitochondrial
  3108: "n" refers to a nucleotide at position 3107 of the Cambridge Reference Sequence (CRS, Anderson et al. 1981 Nature 290:457-465), later determined to be absent from the human mtDNA sequence according to the revised CRS (rCRS, Andrews et al. 1999 Nature Genetics 23:147); "n" therefore represents a single nucleotide deletion at a position corresponding to nucleotide 3107 of SEQ ID NO:1 as provided herein.
gatcacaggtctatcaccctattaaccactcacgggagctctccatgcatttggtattttcgtctggggggtatgcacgcgatagcattgcgagacgctggagccggagcaccctatgtcgcagtatctgtctttgattcctgcctcatcccattatttatcgcacctacgttcaatattacaggcgaacatacttactaaagtgtgttaattaattaatgcttgtaggacataataataacaattgaatgtctgcacagccgctttccacacagacatcataacaaaaaatttccaccaaaccccccctcccccgccttctggccacagcacttaaacacatctctgccaaaccccaaaaacaaagaaccctaacaccagcctaaccagatttcaaattttatcttttggcggtatgcacttttaacagtcaccccccaactaacacattattttcccctcccactcccatactactaatctcatcaatacaacccccgcccatcctacccagcacacacacaccgctgctaaccccataccccgaaccaaccaaaccccaaagacaccccccacagtttatgtagcttacctcctcaaagcaatacactgaaaatgtttagacgggctcacatcaccccataaacaaataggtttggtcctagcctttctattagctcttagtaagattacacatgcaagcatccccgttccagtgagttcaccctctaaatcaccacgatcaaaagggacaagcatcaagcacgcagcaatgcagctcaaaacgcttagcctagccacacccccacgggaaacagcagtgattaacctttagcaataaacgaaagtttaactaagctatactaaccccagggttggtcaatttcgtgccagccaccgcggtcacacgattaacccaagtcaatagaagccggcgtaaagagtgttttagatcaccccctccccaataaagctaaaactcacctgagttgtaaaaaactccagttgacacaaaatagactacgaaagtggctttaacatatctgaacacacaatagctaagacccaaactgggattagataccccactatgcttagccctaaacctcaacagttaaatcaacaaaactgctcgccagaacactacgagccacagcttaaaactcaaaggacctggcggtgcttcatatccctctagaggagcctgttctgtaatcgataaaccccgatcaacctcaccacctcttgctcagcctatataccgccatcttcagcaaaccctgatgaaggctacaaagtaagcgcaagtacccacgtaaagacgttaggtcaaggtgtagcccatgaggtggcaagaaatgggctacattttctaccccagaaaactacgatagcccttatgaaacttaagggtcgaaggtggatttagcagtaaactgagagtagagtgcttagttgaacagggccctgaagcgcgtacacaccgcccgtcaccctcctcaagtatacttcaaaggacatttaactaaaacccctacgcatttatatagaggagacaagtcgtaacatggtaagtgtactggaaagtgcacttggacgaaccagagtgtagcttaacacaaagcacccaacttacacttaggagatttcaacttaacttgaccgctctgagctaaacctagccccaaacccactccaccttactaccagacaaccttagccaaaccatttacccaaataaagtataggcgatagaaattgaaacctggcgcaatagatatagtaccgcaagggaaagatgaaaaattataaccaagcataatatagcaaggactaacccctataccttctgcataatgaattaactagaaataactttgcaaggagagccaaagctaagacccccgaaaccagacgagctacctaagaacagctaaaagagcacacccgtctatgtagcaaaatagtgggaagatttataggtagaggcgacaaacctaccgagcctggtgatagctggttgtccaagatagaatcttagttcaactttaaatttgcccacagaaccctctaaatccccttgtaaatttaactgttagtccaaagaggaacagctctttggacactaggaaaaaaccttgtagagagagtaaaaaatttaacacccatagtaggcctaaaagcagccaccaattaagaaagcgttcaagctcaacacccactacctaaaaaatcccaaacatataactgaactcctcacacccaattggaccaatctatcaccctatagaagaactaatgttagtataagtaacatgaaaacattctcctccgcataagcctgcgtcagattaaaacactgaactgacaattaacagcccaatatctacaatcaaccaacaagtcattattaccctcactgtcaacccaacacaggcatgctcataaggaaaggttaaaaaaagtaaaaggaactcggcaaatcttaccccgcctgtttaccaaaaacatcacctctagcatcaccagtattagaggcaccgcctgcccagtgacacatgtttaacggccgcggtaccctaaccgtgcaaaggtagcataatcacttgttccttaaatagggacctgtatgaatggctccacgagggttcagctgtctcttacttttaaccagtgaaattgacctgcccgtgaagaggcgggcataacacagcaagacgagaagaccctatggagctttaatttattaatgcaaacagtacctaacaaacccacaggtcctaaactaccaaacctgcattaaaaatttcggttggggcgacctcggagcagaacccaacctccgagcagtacatgctaagacttcaccagtcaaagcgaactactatactcaattgatccaataacttgaccaacggaacaagttaccctagggataacagcgcaatcctattctagagtccatatcaacaatagggtttacgacctcgatgttggatcaggacatcccaatggtgcagccgctattaaaggttcgtttgttcaacgattaaagtcctacgtgatctgagttcagaccggagtaatccaggtcggtttctatctacnttcaaattcctccctgtacgaaaggacaagagaaataaggcctacttcacaaagcgccttcccccgtaaatgatatcatctcaacttagtattatacccacacccacccaagaacagggtttgttaagatggcagagcccggtaatcgcataaaacttaaaactttacagtcagaggttcaattcctcttcttaacaacatacccatggccaacctcctactcctcattgtacccattctaatcgcaatggcattcctaatgcttaccgaacgaaaaattctaggctatatacaactacgcaaaggccccaacgttgtaggcccctacgggctactacaacccttcgctgacgccataaaactcttcaccaaagagcccctaaaacccgccacatctaccatcaccctctacatcaccgccccgaccttagctctcaccatcgctcttctactatgaacccccctccccatacccaaccccctggtcaacctcaacctaggcctcctatttattctagccacctctagcctagccgtttactcaatcctctgatcagggtgagcatcaaactcaaactacgccctgatcggcgcactgcgagcagtagcccaaacaatctcatatgaagtcaccctagccatcattctactatcaacattactaataagtggctcctttaacctctccacccttatcacaacacaagaacacctctgattactcctgccatcatgacccttggccataatatgatttatctccacactagcagagaccaaccgaacccccttcgaccttgccgaaggggagtccgaactagtctcaggcttcaacatcgaatacgccgcaggccccttcgccctattcttcatagccgaatacacaaacattattataataaacaccctcaccactacaatcttcctaggaacaacatatgacgcactctcccctgaactctacacaacatattttgtcaccaagaccctacttctaacctccctgttcttatgaattcgaacagcatacccccgattccgctacgaccaactcatacacctcctatgaaaaaacttcctaccactcaccctagcattacttatatgatatgtctccatacccattacaatctccagcattccccctcaaacctaagaaatatgtctgataaaagagttactttgatagagtaaataataggagcttaaacccccttatttctaggactatgagaatcgaacccatccctgagaatccaaaattctccgtgccacctatcacaccccatcctaaagtaaggtcagctaaataagctatcgggcccataccccgaaaatgttggttatacccttcccgtactaattaatcccctggcccaacccgtcatctactctaccatctttgcaggcacactcatcacagcgctaagctcgcactgattttttacctgagtaggcctagaaataaacatgctagcttttattccagttctaaccaaaaaaataaaccctcgttccacagaagctgccatcaagtatttcctcacgcaagcaaccgcatccataatccttctaatagctatcctcttcaacaatatactctccggacaatgaaccataaccaatactaccaatcaatactcatcattaataatcataatggctatagcaataaaactaggaatagccccctttcacttctgagtcccagaggttacccaaggcacccctctgacatccggcctgcttcttctcacatgacaaaaactagcccccatctcaatcatataccaaatctctccctcactaaacgtaagccttctcctcactctctcaatcttatccatcatagcaggcagttgaggtggattaaaccaaacccagctacgcaaaatcttagcatactcctcaattacccacataggatgaataatagcagttctaccgtacaaccctaacataaccattcttaatttaactatttatattatcctaactactaccgcattcctactactcaacttaaactccagcaccacgaccctactactatctcgcacctgaaacaagctaacatgactaacacccttaattccatccaccctcctctccctaggaggcctgcccccgctaaccggctttttgcccaaatgggccattatcgaagaattcacaaaaaacaatagcctcatcatccccaccatcatagccaccatcaccctccttaacctctacttctacctacgcctaatctactccacctcaatcacactactccccatatctaacaacgtaaaaataaaatgacagtttgaacatacaaaacccaccccattcctccccacactcatcgcccttaccacgctactcctacctatctccccttttatactaataatcttatagaaatttaggttaaatacagaccaagagccttcaaagccctcagtaagttgcaatacttaatttctgtaacagctaaggactgcaaaaccccactctgcatcaactgaacgcaaatcagccactttaattaagctaagcccttactagaccaatgggacttaaacccacaaacacttagttaacagctaagcaccctaatcaactggcttcaatctacttctcccgccgccgggaaaaaaggcgggagaagccccggcaggtttgaagctgcttcttcgaatttgcaattcaatatgaaaatcacctcggagctggtaaaaagaggcctaacccctgtctttagatttacagtccaatgcttcactcagccattttacctcacccccactgatgttcgccgaccgttgactattctctacaaaccacaaagacattggaacactatacctattattcggcgcatgagctggagtcctaggcacagctctaagcctccttattcgagccgagctgggccagccaggcaaccttctaggtaacgaccacatctacaacgttatcgtcacagcccatgcatttgtaataatcttcttcatagtaatacccatcataatcggaggctttggcaactgactagttcccctaataatcggtgcccccgatatggcgtttccccgcataaacaacataagcttctgactcttacctccctctctcctactcctgctcgcatctgctatagtggaggccggagcaggaacaggttgaacagtctaccctcccttagcagggaactactcccaccctggagcctccgtagacctaaccatcttctccttacacctagcaggtgtctcctctatcttaggggccatcaatttcatcacaacaattatcaatataaaaccccctgccataacccaataccaaacgcccctcttcgtctgatccgtcctaatcacagcagtcctacttctcctatctctcccagtcctagctgctggcatcactatactactaacagaccgcaacctcaacaccaccttcttcgaccccgccggaggaggagaccccattctataccaacacctattctgatttttcggtcaccctgaagtttatattcttatcctaccaggcttcggaataatctcccatattgtaacttactactccggaaaaaaagaaccatttggatacataggtatggtctgagctatgatatcaattggcttcctagggtttatcgtgtgagcacaccatatatttacagtaggaatagacgtagacacacgagcatatttcacctccgctaccataatcatcgctatccccaccggcgtcaaagtatttagctgactcgccacactccacggaagcaatatgaaatgatctgctgcagtgctctgagccctaggattcatctttcttttcaccgtaggtggcctgactggcattgtattagcaaactcatcactagacatcgtactacacgacacgtactacgttgtagcccacttccactatgtcctatcaataggagctgtatttgccatcataggaggcttcattcactgatttcccctattctcaggctacaccctagaccaaacctacgccaaaatccatttcactatcatattcatcggcgtaaatctaactttcttcccacaacactttctcggcctatccggaatgccccgacgttactcggactaccccgatgcatacaccacatgaaacatcctatcatctgtaggctcattcatttctctaacagcagtaatattaataattttcatgatttgagaagccttcgcttcgaagcgaaaagtcctaatagtagaagaaccctccataaacctggagtgactatatggatgccccccaccctaccacacattcgaagaacccgtatacataaaatctagacaaaaaaggaaggaatcgaaccccccaaagctggtttcaagccaaccccatggcctccatgactttttcaaaaaggtattagaaaaaccatttcataactttgtcaaagttaaattataggctaaatcctatatatcttaatggcacatgcagcgcaagtaggtctacaagacgctacttcccctatcatagaagagcttatcacctttcatgatcacgccctcataatcattttccttatctgcttcctagtcctgtatgcccttttcctaacactcacaacaaaactaactaatactaacatctcagacgctcaggaaatagaaaccgtctgaactatcctgcccgccatcatcctagtcctcatcgccctcccatccctacgcatcctttacataacagacgaggtcaacgatccctcccttaccatcaaatcaattggccaccaatggtactgaacctacgagtacaccgactacggcggactaatcttcaactcctacatacttcccccattattcctagaaccaggcgacctgcgactccttgacgttgacaatcgagtagtactcccgattgaagcccccattcgtataataattacatcacaagacgtcttgcactcatgagctgtccccacattaggcttaaaaacagatgcaattcccggacgtctaaaccaaaccactttcaccgctacacgaccgggggtatactacggtcaatgctctgaaatctgtggagcaaaccacagtttcatgcccatcgtcctagaattaattcccctaaaaatctttgaaatagggcccgtatttaccctatagcaccccctctaccccctctagagcccactgtaaagctaacttagcattaaccttttaagttaaagattaagagaaccaacacctctttacagtgaaatgccccaactaaatactaccgtatggcccaccataattacccccatactccttacactattcctcatcacccaactaaaaatattaaacacaaactaccacctacctccctcaccaaagcccataaaaataaaaaattataacaaaccctgagaaccaaaatgaacgaaaatctgttcgcttcattcattgcccccacaatcctaggcctacccgccgcagtactgatcattctatttccccctctattgatccccacctccaaatatctcatcaacaaccgactaatcaccacccaacaatgactaatcaaactaacctcaaaacaaatgataaccatacacaacactaaaggacgaacctgatctcttatactagtatccttaatcatttttattgccacaactaacctcctcggactcctgcctcactcatttacaccaaccacccaactatctataaacctagccatggccatccccttatgagcgggcgcagtgattataggctttcgctctaagattaaaaatgccctagcccacttcttaccacaaggcacacctacaccccttatccccatactagttattatcgaaaccatcagcctactcattcaaccaatagccctggccgtacgcctaaccgctaacattactgcaggccacctactcatgcacctaattggaagcgccaccctagcaatatcaaccattaaccttccctctacacttatcatcttcacaattctaattctactgactatcctagaaatcgctgtcgccttaatccaagcctacgttttcacacttctagtaagcctctacctgcacgacaacacataatgacccaccaatcacatgcctatcatatagtaaaacccagcccatgacccctaacaggggccctctcagccctcctaatgacctccggcctagccatgtgatttcacttccactccataacgctcctcatactaggcctactaaccaacacactaaccatataccaatgatggcgcgatgtaacacgagaaagcacataccaaggccaccacacaccacctgtccaaaaaggccttcgatacgggataatcctatttattacctcagaagtttttttcttcgcaggatttttctgagccttttaccactccagcctagcccctaccccccaattaggagggcactggcccccaacaggcatcaccccgctaaatcccctagaagtcccactcctaaacacatccgtattactcgcatcaggagtatcaatcacctgagctcaccatagtctaatagaaaacaaccgaaaccaaataattcaagcactgcttattacaattttactgggtctctattttaccctcctacaagcctcagagtacttcgagtctcccttcaccatttccgacggcatctacggctcaacattttttgtagccacaggcttccacggacttcacgtcattattggctcaactttcctcactatctgcttcatccgccaactaatatttcactttacatccaaacatcactttggcttcgaagccgccgcctgatactggcattttgtagatgtggtttgactatttctgtatgtctccatctattgatgagggtcttactcttttagtataaatagtaccgttaacttccaattaactagttttgacaacattcaaaaaagagtaataaacttcgccttaattttaataatcaacaccctcctagccttactactaataattattacattttgactaccacaactcaacggctacatagaaaaatccaccccttacgagtgcggcttcgaccctatatcccccgcccgcgtccctttctccataaaattcttcttagtagctattaccttcttattatttgatctagaaattgccctccttttacccctaccatgagccctacaaacaactaacctgccactaatagttatgtcatccctcttattaatcatcatcctagccctaagtctggcctatgagtgactacaaaaaggattagactgaaccgaattggtatatagtttaaacaaaacgaatgatttcgactcattaaattatgataatcatatttaccaaatgcccctcatttacataaatattatactagcatttaccatctcacttctaggaatactagtatatcgctcacacctcatatcctccctactatgcctagaaggaataatactatcgctgttcattatagctactctcataaccctcaacacccactccctcttagccaatattgtgcctattgccatactagtctttgccgcctgcgaagcagcggtgggcctagccctactagtctcaatctccaacacatatggcctagactacgtacataacctaaacctactccaatgctaaaactaatcgtcccaacaattatattactaccactgacatgactttccaaaaaacacataatttgaatcaacacaaccacccacagcctaattattagcatcatccctctactattttttaaccaaatcaacaacaacctatttagctgttccccaaccttttcctccgaccccctaacaacccccctcctaatactaactacctgactcctacccctcacaatcatggcaagccaacgccacttatccagtgaaccactatcacgaaaaaaactctacctctctatactaatctccctacaaatctccttaattataacattcacagccacagaactaatcatattttatatcttcttcgaaaccacacttatccccaccttggctatcatcacccgatgaggcaaccagccagaacgcctgaacgcaggcacatacttcctattctacaccctagtaggctcccttcccctactcatcgcactaatttacactcacaacaccctaggctcactaaacattctactactcactctcactgcccaagaactatcaaactcctgagccaacaacttaatatgactagcttacacaatagcttttatagtaaagatacctctttacggactccacttatgactccctaaagcccatgtcgaagcccccatcgctgggtcaatagtacttgccgcagtactcttaaaactaggcggctatggtataatacgcctcacactcattctcaaccccctgacaaaacacatagcctaccccttccttgtactatccctatgaggcataattataacaagctccatctgcctacgacaaacagacctaaaatcgctcattgcatactcttcaatcagccacatagccctcgtagtaacagccattctcatccaaaccccctgaagcttcaccggcgcagtcattctcataatcgcccacgggcttacatcctcattactattctgcctagcaaactcaaactacgaacgcactcacagtcgcatcataatcctctctcaaggacttcaaactctactcccactaatagctttttgatgacttctagcaagcctcgctaacctcgccttaccccccactattaacctactgggagaactctctgtgctagtaaccacgttctcctgatcaaatatcactctcctacttacaggactcaacatactagtcacagccctatactccctctacatatttaccacaacacaatggggctcactcacccaccacattaacaacataaaaccctcattcacacgagaaaacaccctcatgttcatacacctatcccccattctcctcctatccctcaaccccgacatcattaccgggttttcctcttgtaaatatagtttaaccaaaacatcagattgtgaatctgacaacagaggcttacgaccccttatttaccgagaaagctcacaagaactgctaactcatgcccccatgtctaacaacatggctttctcaacttttaaaggataacagctatccattggtcttaggccccaaaaattttggtgcaactccaaataaaagtaataaccatgcacactactataaccaccctaaccctgacttccctaattccccccatccttaccaccctcgttaaccctaacaaaaaaaactcatacccccattatgtaaaatccattgtcgcatccacctttattatcagtctcttccccacaacaatattcatgtgcctagaccaagaagttattatctcgaactgacactgagccacaacccaaacaacccagctctccctaagcttcaaactagactacttctccataatattcatccctgtagcattgttcgttacatggtccatcatagaattctcactgtgatatataaactcagacccaaacattaatcagttcttcaaatatctactcatcttcctaattaccatactaatcttagttaccgctaacaacctattccaactgttcatcggctgagagggcgtaggaattatatccttcttgctcatcagttgatgatacgcccgagcagatgccaacacagcagccattcaagcaatcctatacaaccgtatcggcgatatcggtttcatcctcgccttagcatgatttatcctacactccaactcatgagacccacaacaaatagcccttctaaacgctaatccaagcctcaccccactactaggcctcctcctagcagcagcaggcaaatcagcccaattaggtctccacccctgactcccctcagccatagaaggccccaccccagtctcagccctactccactcaagcactatagttgtagcaggaatcttcttactcatccgcttccaccccctagcagaaaatagcccactaatccaaactctaacactatgcttaggcgctatcaccactctgttcgcagcagtctgcgcccttacacaaaatgacatcaaaaaaatcgtagccttctccacttcaagtcaactaggactcataatagttacaatcggcatcaaccaaccacacctagcattcctgcacatctgtacccacgccttcttcaaagccatactatttatgtgctccgggtccatcatccacaaccttaacaatgaacaagatattcgaaaaataggaggactactcaaaaccatacctctcacttcaacctccctcaccattggcagcctagcattagcaggaatacctttcctcacaggtttctactccaaagaccacatcatcgaaaccgcaaacatatcatacacaaacgcctgagccctatctattactctcatcgctacctccctgacaagcgcctatagcactcgaataattcttctcaccctaacaggtcaacctcgcttccccacccttactaacattaacgaaaataaccccaccctactaaaccccattaaacgcctggcagccggaagcctattcgcaggatttctcattactaacaacatttcccccgcatcccccttccaaacaacaatccccctctacctaaaactcacagccctcgctgtcactttcctaggacttctaacagccctagacctcaactacctaaccaacaaacttaaaataaaatccccactatgcacattttatttctccaacatactcggattctaccctagcatcacacaccgcacaatcccctatctaggccttcttacgagccaaaacctgcccctactcctcctagacctaacctgactagaaaagctattacctaaaacaatttcacagcaccaaatctccacctccatcatcacctcaacccaaaaaggcataattaaactttacttcctctctttcttcttcccactcatcctaaccctactcctaatcacataacctattcccccgagcaatctcaattacaatatatacaccaacaaacaatgttcaaccagtaactactactaatcaacgcccataatcatacaaagcccccgcaccaataggatcctcccgaatcaaccctgacccctctccttcataaattattcagcttcctacactattaaagtttaccacaaccaccaccccatcatactctttcacccacagcaccaatcctacctccatcgctaaccccactaaaacactcaccaagacctcaacccctgacccccatgcctcaggatactcctcaatagccatcgctgtagtatatccaaagacaaccatcattccccctaaataaattaaaaaaactattaaacccatataacctcccccaaaattcagaataataacacacccgaccacaccgctaacaatcaatactaaacccccataaataggagaaggcttagaagaaaaccccacaaaccccattactaaacccacactcaacagaaacaaagcatacatcattattctcgcacggactacaaccacgaccaatgatatgaaaaaccatcgttgtatttcaactacaagaacaccaatgaccccaatacgcaaaactaaccccctaataaaattaattaaccactcattcatcgacctccccaccccatccaacatctccgcatgatgaaacttcggctcactccttggcgcctgcctgatcctccaaatcaccacaggactattcctagccatgcactactcaccagacgcctcaaccgccttttcatcaatcgcccacatcactcgagacgtaaattatggctgaatcatccgctaccttcacgccaatggcgcctcaatattctttatctgcctcttcctacacatcgggcgaggcctatattacggatcatttctctactcagaaacctgaaacatcggcattatcctcctgcttgcaactatagcaacagccttcataggctatgtcctcccgtgaggccaaatatcattctgaggggccacagtaattacaaacttactatccgccatcccatacattgggacagacctagttcaatgaatctgaggaggctactcagtagacagtcccaccctcacacgattctttacctttcacttcatcttgcccttcattattgcagccctagcagcactccacctcctattcttgcacgaaacgggatcaaacaaccccctaggaatcacctcccattccgataaaatcaccttccacccttactacacaatcaaagacgccctcggcttacttctcttccttctctccttaatgacattaacactattctcaccagacctcctaggcgacccagacaattataccctagccaaccccttaaacacccctccccacatcaagcccgaatgatatttcctattcgcctacacaattctccgatccgtccctaacaaactaggaggcgtccttgccctattactatccatcctcatcctagcaataatccccatcctccatatatccaaacaacaaagcataatatttcgcccactaagccaatcactttattgactcctagccgcagacctcctcattctaacctgaatcggaggacaaccagtaagctacccttttaccatcattggacaagtagcatccgtactatacttcacaacaatcctaatcctaataccaactatctccctaattgaaaacaaaatactcaaatgggcctgtccttgtagtataaactaatacaccagtcttgtaaaccggagatgaaaacctttttccaaggacaaatcagagaaaaagtctttaactccaccattagcacccaaagctaagattctaatttaaactattctctgttctttcatggggaagcagatttgggtaccacccaagtattgactcacccatcaacaaccgctatgtatttcgtacattactgccagccaccatgaatattgtacggtaccataaatacttgaccacctgtagtacataaaaacccaatctacatcaaaaccccccccccatgcttacaagcaagtacagcaatcaaccctcaactatcacacatcaactgcaactccaaagccacccctcacccactaggataccaacaaacctacccacccttaacagtacatagtacataaagccatttaccgtacatagcacattacagtcaaatcccttctcgtccccatggatgacccccctcagataggggtcccttgaccaccatcctccgtgaaatcaatatcccgcacaagagtgctactctcctcgctccgggcccataacacttgggggtagctaaagtgaactgtatccgacatctggttcctacttcagggccataaagcctaaatagcccacacgttccccttaaataagacatcacgatg

SEQ ID NO: 30 - DNA, 16570 bp, Homo sapiens mitochondrial
  3108: "n" refers to a nucleotide at position 3107 of the Cambridge Reference Sequence (CRS, Anderson et al. 1981 Nature 290:457-465), later determined to be absent from the human mtDNA sequence according to the revised CRS (rCRS, Andrews et al. 1999 Nature Genetics 23:147); "n" therefore represents a single nucleotide deletion at a position corresponding to nucleotide 3107 of SEQ ID NO:1 as provided herein.
gatcacaggtctatcaccctattaaccactcacgggagctctccatgcatttggtattttcgtctggggggtgtgcacgcgatagcattgcgagacgctggagccggagcaccctatgtcgcagtatctgtctttgattcctgcctcatcctgttatttatcgcacctacgttcaatattacaggcgaacatacctactaaagtgtgttaattaattaatgcttatgggacataataataacaattgaatgtctgcacagccgctttccacacagacatcataacaaaaaatttccaccaaaccccccctcccccgccttctggccacagcacttaaacacatctctgccaaaccccaaaaacaaagaaccctaacaccagcctaaccagatttcaaattttatcttttggcggtatgcacttttaacagtcaccccccaactaacacattattttcccctcccactcccatactactaatctcatcaatacaacccccgcccatcctacccagcacacacacaccgctgctaaccccataccccgaaccaaccaaaccccaaagacaccccccacagtttatgtagcttacctcctcaaagcaatacactgaaaatgtttagacgggctcacatcaccccataaacaaataggtttggtcctagcctttctattagctcttagtaagattacacatgcaagcatccccgttccagtgagttcaccctctaaatcaccacgatcaaaagggacaagcatcaagcacgcagcaatgcagctcaaaacgcttagcctagccacacccccacgggaaacagcagtgattaacctttagcaataaacgaaagtttaactaagctatactaaccccagggttggtcaatttcgtgccagccaccgcggtcacacgattaacccaagtcaatagaagccggcgtaaagagtgttttagatcaccccctccccaataaagctaaaactcacctgagttgtaaaaaactccagttgacacaaaatagactacgaaagtggctttaacatatctgaacacacaatagctaagacccaaactgggattagataccccactatgcttagccctaaacctcaacagttaaatcaacaaaactgctcgccagaacactacgagccacagcttaaaactcaaaggacctggcggtgcttcatatccctctagaggagcctgttctgtaatcgataaaccccgatcaacctcaccacctcttgctcagcctatataccgccatcttcagcaaaccctgatgaaggctacaaagtaagcgcaagtacccacgtaaagacgttaggtcaaggtgtagcccatgaggtggcaagaaatgggctacattttctaccccagaaaactacgatagcccttatgaaacttaagggtcgaaggtggatttagcagtaaactgagagtagagtgcttagttgaacagggccctgaagcgcgtacacaccgcccgtcaccctcctcaagtatacttcaaaggacatttaactaaaacccctacgcatttatatagaggagacaagtcgtaacatggtaagtgtactggaaagtgcacttggacgaaccagagtgtagcttaacacaaagcacccaacttacacttaggagatttcaacttaacttgaccgctctgagctaaacctagccccaaacccactccaccttactaccagacaaccttaaccaaaccatttacccaaataaagtataggcgatagaaattgaaacctggcgcaatagatatagtaccgcaagggaaagatgaaaaattataaccaagcataatatagcaaggactaacccctataccttctgcataatgaattaactagaaataactttgcaaggagagccaaagctaagacccccgaaaccagacgagctacctaagaacagctaaaagagcacacccgtctatgtagcaaaatagtgggaagatttataggtagaggcgacaaacctaccgagcctggtgatagctggttgtccaagatagaatcttagttcaactttaaatttgcccacagaaccctctaaatccccttgtaaatttaactgttagtccaaagaggaacagctctttggacactaggaaaaaaccttgtagagagagtaaaaaatttaacacccatagtaggcctaaaagcagccaccaattaagaaagcgttcaagctcaacacccactacctaaaaaatcccaaacatataactgaactcctcacacccaattggaccaatctatcaccctatagaagaactaatgttagtataagtaacatgaaaacattctcctccgcataagcctgcgtcagattaaaacactgaactgacaattaacagcccaatatctacaatcaaccaacaagtcattattaccctcactgtcaacccaacacaggcatgctcataaggaaaggttaaaaaaagtaaaaggaactcggcaaatcttaccccgcctgtttaccaaaaacatcacctctagcatcaccagtattagaggcaccgcctgcccagtgacacatgtttaacggccgcggtaccctaaccgtgcaaaggtagcataatcacttgttccttaaatagggacctgtatgaatggctccacgagggttcagctgtctcttacttttaaccagtgaaattgacctgcccgtgaagaggcgggcatgacacagcaagacgagaagaccctatggagctttaatttattaatgcaaacagtacctaacaaacccacaggtcctaaactaccaaacctgcattaaaaatttcggttggggcgacctcggagcagaacccaacctccgagcagtacatgctaagacttcaccagtcaaagcgaactactatactcaattgatccaataacttgaccaacggaacaagttaccctagggataacagcgcaatcctattctagagtccatatcaacaatagggtttacgacctcgatgttggatcaggacatcccgatggtgcagccgctattaaaggttcgtttgttcaacgattaaagtcctacgtgatctgagttcagaccggagtaatccaggtcggtttctatctacnttcaaattcctccctgtacgaaaggacaagagaaataaggcctacttcacaaagcgccttcccccgtaaatgatatcatctcaacttagtattatacccacacccacccaagaacagggtttgttaagatggcagagcccggtaatcgcataaaacttaaaactttacagtcagaggttcaattcctcttcttaacaacatacccatggccaacctcctactcctcattgtacccattctaatcgcaatggcattcctaatgcttaccgaacgaaaaattctaggctatatacaactacgcaaaggccccaacgttgtaggcccctacgggctactacaacccttcgctgacgccataaaactcttcaccaaagagcccctaaaacccgccacatctaccatcaccctctacatcaccgccccgaccttagctctcaccatcgctcttctactatgaacccccctccccatacccaaccccctggtcaacctcaacctaggcctcctatttattctagccacctctagcctagccgtttactcaatcctctgatcagggtgagcatcaaactcaaactacgccctgatcggcgcactgcgagcagtagcccaaacaatctcatatgaagtcaccctagccatcattctactatcaacattactaataagtggctcctttaacctctccacccttatcacaacacaagaacacctctgattactcctgccatcatgacccttggccataatatgatttatctccacactagcagagaccaaccgaacccccttcgaccttgccgaaggggagtccgaactagtctcaggcttcaacatcgaatacgccgcaggccccttcgccctattcttcatagccgaatacacaaacattattataataaacaccctcaccactacaatcttcctaggaacaacatatgacgcactctcccctgaactctacacaacatattttgtcaccaagaccctacttctaacctccctgttcttatgaattcgaacagcatacccccgattccgctacgaccaactcatacacctcctatgaaaaaacttcctaccactcaccctagcattacttatatgatatgtctccatacccattacaatctccagcattccccctcaaacctaagaaatatgtctgataaaagagttactttgatagagtaaataataggagcttaaacccccttatttctaggactatgagaatcgaacccatccctgagaatccaaaattctccgtgccacctatcacaccccatcctaaagtaaggtcagctaaataagctatcgggcccataccccgaaaatgttggttatacccttcccgtactaattaatcccctggcccaacccgtcatctactctaccatctttgcaggcacactcatcacagcgctaagctcgcactgattttttacctgagtaggcctagaaataaacatgctagcttttattccagttctaaccaaaaaaataaaccctcgttccacagaagctgccatcaagtatttcctcacgcaagcaaccgcatccataatccttctaatagctatcctcttcaacaatatactctccggacaatgaaccataaccaatactaccaatcaatactcatcattaataatcataatggctatagcaataaaactaggaatagccccctttcacttctgagtcccagaggttacccaaggcacccctctgacatccggcctgcttcttctcacatgacaaaaactagcccccatctcaatcatataccaaatctctccctcactaaacgtaagccttctcctcactctctcaatcttatccatcatagcaggcagttgaggtggattaaaccaaacccagctacgcaaaatcttagcatactcctcaattacccacataggatgaataatagcagttctaccgtacaaccctaacataaccattcttaatttaactatttatattatcctaactactaccgcattcctactactcaacttaaactccagcaccacgaccctactactatctcgcacctgaaacaagctaacatgactaacacccttaattccatccaccctcctctccctaggaggcctgcccccgctaaccggctttttgcccaaatgggccattatcgaagaattcacaaaaaacaatagcctcatcatccccaccatcatagccaccatcaccctccttaacctctacttctacctacgcctaatctactccacctcaatcacactactccccatatctaacaacgtaaaaataaaatgacagtttgaacatacaaaacccaccccattcctccccacactcatcgcccttaccacgctactcctacctatctccccttttatactaataatcttatagaaatttaggttaaatacagaccaagagccttcaaagccctcagtaagttgcaatacttaatttctgtaacagctaaggactgcaaaaccccactctgcatcaactgaacgcaaatcagccactttaattaagctaagcccttactagaccaatgggacttaaacccacaaacacttagttaacagctaagcaccctaatcaactggcttcaatctacttctcccgccgccgggaaaaaaggcgggagaagccccggcaggtttgaagctgcttcttcgaatttgcaattcaatatgaaaatcacctcggagctggtaaaaagaggcctaacccctgtctttagatttacagtccaatgcttcactcagccattttacctcacccccactgatgttcgccgaccgttgactattctctacaaaccacaaagacattggaacactatacctattattcggcgcatgagctggagtcctaggcacagctctaagcctccttattcgagccgagctgggccagccaggcaaccttctaggtaacgaccacatctacaacgttatcgtcacagcccatgcatttgtaataatcttcttcatagtaatacccatcataatcggaggctttggcaactgactagttcccctaataatcggtgcccccgatatggcgtttccccgcataaacaacataagcttctgactcttacccccctctctcctactcctgctcgcatctgctatagtggaggccggagcaggaacaggttgaacagtctaccctcccttagcagggaactactcccaccctggagcctccgtagacctaaccatcttctccttacacctagcaggtgtctcttctatcttaggggccatcaatttcatcacaacaattatcaatataaaaccccctgccataacccaataccaaacgcccctcttcgtctgatccgtcctaatcacagcagtcctacttctcctatctctcccagtcctagctgctggcatcactatactactaacagaccgcaacctcaacaccaccttcttcgaccccgccggaggaggagaccccattctataccaacacctattctgatttttcggtcaccctgaagtttatattcttatcctaccaggcttcggaataatctcccatattgtaacttactactccggaaaaaaagaaccatttggatacataggtatggtctgagctatgatatcaattggcttcctagggtttatcgtgtgagcacaccatatatttacagtaggaatagacgtagacacacgagcatatttcacctccgctaccataatcatcgctatccccaccggcgtcaaagtatttagctgactcgccacactccacggaagcaatatgaaatgatctgctgcagtgctctgagccctaggattcatctttcttttcaccgtaggtggcctgactggcattgtattagcaaactcatcactagacatcgtactacacgacacgtactacgttgtagctcacttccactatgtcctatcaataggagctgtatttgccatcataggaggcttcattcactgatttcccctattctcaggctacaccctagaccaaacctacgccaaaatccatttcactatcatattcatcggcgtaaatctaactttcttcccacaacactttctcggcctatccggaatgccccgacgttactcggactaccccgatgcatacaccacatgaaacatcctatcatctgtaggctcattcatttctctaacagcagtaatattaataattttcatgatttgagaagccttcgcttcgaagcgaaaagtcctaatagtagaagaaccctccataaacctggagtgactatatggatgccccccaccctaccacacattcgaagaacccgtatacataaaatctagacaaaaaaggaaggaatcgaaccccccaaagctggtttcaagccaaccccatggcctccatgactttttcaaaaaggtattagaaaaaccatttcataactttgtcaaagttaaattataggctaaatcctatatatcttaatggcacatgcagcgcaagtaggtctacaagacgctacttcccctatcatagaagagcttatcacctttcatgatcacgccctcataatcattttccttatctgcttcctagtcctgtatgcccttttcctaacactcacaacaaaactaactaatactaacatctcagacgctcaggaaatagaaaccgtctgaactatcctgcccgccatcatcctagtcctcatcgccctcccatccctacgcatcctttacataacagacgaggtcaacgatccctcccttaccatcaaatcaattggccaccaatggtactgaacctacgagtacaccgactacggcggactaatcttcaactcctacatacttcccccattattcctagaaccaggcgacctgcgactccttgacgttgacaatcgagtagtactcccgattgaagcccccattcgtataataattacatcacaagacgtcttgcactcatgagctgtccccacattaggcttaaaaacagatgcaattcccggacgtctaaaccaaaccactttcaccgctacacgaccgggggtatactacggtcaatgctctgaaatctgtggagcaaaccacagtttcatgcccatcgtcctagaattaattcccctaaaaatctttgaaatagggcccgtatttaccctatagcaccccctctaccccctctagagcccactgtaaagctaacttagcattaaccttttaagttaaagattaagagaaccaacacctctttacagtgaaatgccccaactaaatactaccgtatggcccaccataattacccccatactccttacactattcctcatcacccaactaaaaatattaaacacaaactaccacctacctccctcaccaaagcccataaaaataaaaaattataacaaaccctgagaaccaaaatgaacgaaaatctgttcgcttcattcattgcccccacaatcctaggcctacccgccgcagtactgatcattctatttccccctctattgatccccacctccaaatatctcatcaacaaccgactaatcaccacccaacaatgactaatcaaactaacctcaaaacaaatgataaccacacacaacactaaaggacgaacctgatctcttatactagtatccttaatcatttttattgccacaactaacctcctcggactcctgcctcactcatttacaccaaccacccaactatctataaacctagccatggccatccccttatgagcgggcgcagtgattataggctttcgctctaagattaaaaatgccctagcccacttcttaccacaaggcacacctacaccccttatccccatactagttattatcgaaaccatcagcctactcattcaaccaatagccctggccgtacgcctaaccgctaacattactgcaggccacctactcatgcacctaattggaagcgccaccctagcaatatcaaccattaaccttccctctacacttatcatcttcacaattctaattctactgactatcctagaaatcgctgtcgccttaatccaagcctacgttttcacacttctagtaagcctctacctgcacgacaacacataatgacccaccaatcacatgcctatcatatagtaaaacccagcccatgacccctaacaggggccctctcagccctcctaatgacctccggcctagccatgtgatttcacttccactccataacgctcctcatactaggcctactaaccaacacactaaccatataccaatgatggcgcgatgtaacacgagaaagcacataccaaggccaccacacaccacctgtccaaaaaggccttcgatacgggataatcctatttattacctcagaagtttttttcttcgcaggatttttctgagccttttaccactccagcctagcccctaccccccaattaggagggcactggcccccaacaggcatcaccccgctaaatcccctagaagtcccactcctaaacacatccgtattactcgcatcaggagtatcaatcacctgagctcaccatagtctaatagaaaacaaccgaaaccaaataattcaagcactgcttattacaattttactgggtctctattttaccctcctacaagcctcagagtacttcgagtctcccttcaccatttccgacggcatctacggctcaacattttttgtagccacaggcttccacggacttcacgtcattattggctcaactttcctcactatctgcttcatccgccaactaatatttcactttacatccaaacatcactttggcttcgaagccgccgcctgatactggcattttgtagatgtggtttgactatttctgtatgtctccatctattgatgagggtcttactcttttagtataaatagtaccgttaacttccaattaactagttttgacaacattcaaaaaagagtaataaacttcgccttaattttaataatcaacaccctcctagccttactactaataattattacattttgactaccacaactcaacggctacatagaaaaatccaccccttacgagtgcggcttcgaccctatatcccccgcccgcgtccctttctccataaaattcttcttagtagctattaccttcttattatttgatctagaaattgccctccttttacccctaccatgagccctacaaacaactaacctgccactaatagttatgtcatccctcttattaatcatcatcctagccctaagtctggcctatgagtgactacaaaaaggattagactgaaccgaattggtatatagtttaaacaaaacgaatgatttcgactcattaaattatgataatcatatttaccaaatgcccctcatttacataaatattatactagcatttaccatctcacttctaggaatactagtatatcgctcacacctcatatcctccctactatgcctagaaggaataatactatcgctgttcattatagctactctcataaccctcaacacccactccctcttagccaatattgtgcctattgccatactagtctttgccgcctgcgaagcagcggtgggcctagccctactagtctcaatctccaacacatatggcctagactacgtacataacctaaacctactccaatgctaaaactaatcgtcccaacaattatattactaccactgacatgactttccaaaaaacacataatttgaatcaacacaaccacccacagcctaattattagcatcatccctctactattttttaaccaaatcaacaacaacctatttagctgttccccaaccttttcctccgaccccctaacaacccccctcctaatactaactacctgactcctacccctcacaatcatggcaagccaacgccacttatccagtgaaccactatcacgaaaaaaactctacctctctatactaatctccctacaaatctccttaattataacattcacagccacagaactaatcatattttatatcttcttcgaaaccacacttatccccaccttggctatcatcacccgatgaggcaaccagccagaacgcctgaacgcaggcacatacttcctattctacaccctagtaggctcccttcccctactcatcgcactaatttacactcacaacaccctaggctcactaaacattctactactcactctcactgcccaagaactatcaaactcctgagccaacaacttaatatgactagcttacacaatagcttttatagtaaagatacctctttacggactccacttatgactccctaaagcccatgtcgaagcccccatcgctgggtcaatagtacttgccgcagtactcttaaaactaggcggctatggtataatacgcctcacactcattctcaaccccctgacaaaacacatagcctaccccttccttgtactatccctatgaggcataattataacaagctccatctgcctacgacaaacagacctaaaatcgctcattgcatactcttcaatcagccacatagccctcgtagtaacagccattctcatccaaaccccctgaagcttcaccggcgcagtcattctcataatcgcccacggacttacatcctcattactattctgcctagcaaactcaaactacgaacgcactcacagtcgcatcataatcctctctcaaggacttcaaactctactcccactaatagctttttgatgacttctagcaagcctcgctaacctcgccttaccccccactattaacctactgggagaactctctgtgctagtaaccacgttctcctgatcaaatatcactctcctacttacaggactcaacatactagtcacagccctatactccctctacatatttaccacaacacaatggggctcactcacccaccacattaacaacataaaaccctcattcacacgagaaaacaccctcatgttcatacacctatcccccattctcctcctatccctcaaccccgacatcattaccgggttttcctcttgtaaatatagtttaaccaaaacatcagattgtgaatctgacaacagaggcttacgaccccttatttaccgagaaagctcacaagaactgctaactcatgcccccatgtctaacaacatggctttctcaacttttaaaggataacagctatccattggtcttaggccccaaaaattttggtgcaactccaaataaaagtaataaccatgcacactactataaccaccctaaccctgacttccctaattccccccatccttaccaccctcgttaaccctaacaaaaaaaactcatacccccattatgtaaaatccattgtcgcatccacctttattatcagtctcttccccacaacaatattcatgtgcctagaccaagaagttattatctcgaactgacactgagccacaacccaaacaacccagctctccctaagcttcaaactagactacttctccataatattcatccctgtagcattgttcgttacatggtccatcatagaattctcactgtgatatataaactcagacccaaacattaatcagttcttcaaatatctactcattttcctaattaccatactaatcttagttaccgctaacaacctattccaactgttcatcggctgagagggcgtaggaattatatccttcttgctcatcagttgatgatacgcccgagcagatgccaacacagcagccattcaagcaatcctatacaaccgtatcggcgatatcggtttcatcctcgccttagcatgatttatcctacactccaactcatgagacccacaacaaatagcccttctaaacgctaatccaagcctcaccccactactaggcctcctcctagcagcagcaggcaaatcagcccaattaggtctccacccctgactcccctcagccatagaaggccccaccccagtctcagccctactccactcaagcactatagttgtagcaggaatcttcttactcatccgcttccaccccctagcagaaaatagcccactaatccaaactctaacactatgcttaggcgctatcaccactctgttcgcagcagtctgcgcccttacacaaaatgacatcaaaaaaatcgtagccttctccacttcaagtcaactaggactcataatagttacaatcggcatcaaccaaccacacctagcattcctgcacatctgtacccacgccttcttcaaagccatactatttatgtgctccgggtccatcatccacaaccttaacaatgaacaagatattcgaaaaataggaggactactcaaaaccatacctctcacttcaacctccctcaccattggcagcctagcattagcaggaatacctttcctcacaggtttctactccaaagaccacatcatcgaaaccgcaaacatatcatacacaaacgcctgagccctatctattactctcatcgctacctccctgacaagcgcctatagcactcgaataattcttctcaccctaacaggtcaacctcgcttccccacccttactaacattaacgaaaataaccccaccctactaaaccccattaaacgcctggcagccggaagcctattcgcaggatttctcattactaacaacatttcccccgcatcccccttccaaacaacaatccccctctacctaaaactcacagccctcgctgtcactttcctaggacttctaacagccctagacctcaactacctaaccaacaaacttaaaataaaatccccactatgcacattttatttctccaacatactcggattctaccctagcatcacacaccgcacaatcccctatctaggccttcttgcgagccaaaacctgcccctactcctcctagacctaacctgactagaaaagctattacctaaaacaatttcacagcaccaaatctccacctccatcatcacctcaacccaaaaaggcataattaaactttacttcctctctttcttcttcccactcatcctaaccctactcctaatcacataacctattcccccgagcaatctcaattacaatatatacaccaacaaacaatgttcaaccagtaactactactaatcaacgcccataatcatacaaagcccccgcaccaataggatcctcccgaatcaaccctgacccctctccttcataaattattcagcttcctacactattaaagtttaccacaaccaccaccccatcatactctttcacccacagcaccaatcctacctccatcgctaaccccactaaaacactcaccaagacctcaacccctgacccccatgcctcaggatactcctcaatagccatcgctgtagtatacccaaagacaaccatcattccccctaaataaattaaaaaaactattaaacccatataacctcccccaaaattcagaataataacacacccgaccacaccgctaacaatcaatactaaacccccataaataggagaaggcttagaagaaaaccccacaaaccccattactaaacccacactcaacagaaacaaagcatacatcattattctcgcacggactacaaccacgaccaatgatatgaaaaaccatcgttgtatttcaactacaagaacaccaatgaccccaatacgcaaaattaaccccctaataaaattaattaaccactcattcatcgacctccccaccccatccaacatctccgcatgatgaaacttcggctcactccttggcgcctgcctgatcctccaaatcaccacaggactattcctagccatgcactactcaccagacgcctcaaccgccttttcatcaatcgcccacatcactcgagacgtaaattatggctgaatcatccgctaccttcacgccaatggcgcctcaatattctttatctgcctcttcctacacatcgggcgaggcctatattacggatcatttctctactcagaaacctgaaacatcggcattatcctcctgcttgcaactatagcaacagccttcataggctatgtcctcccgtgaggccaaatatcattctgaggggccacagtaattacaaacttactatccgccatcccatacattgggacagacctagttcaatgaatctgaggaggctactcagtagacagtcccaccctcacacgattctttacctttcacttcatcttgcccttcattattgcagccctagcagcactccacctcctattcttgcacgaaacgggatcaaacaaccccctaggaatcacctcccattccgataaaatcaccttccacccttactacacaatcaaagacgccctcggcttacttctcttccttctctccttaatgacattaacactattctcaccagacctcctaggcgacccagacaattataccctagccaaccccttaaacacccctccccacatcaagcccgaatgatatttcctattcgcctacacaattctccgatccgtccctaacaaactaggaggcgtccttgccctattactatccatcctcatcctagcaataatccccatcctccatatatccaaacaacaaagcataatatttcgcccactaagccaatcactttattgactcctagccgcagacctcctcattctaacctgaatcggaggacaaccagtaagctacccttttaccatcattggacaagtagcatccgtactatacttcacaacaatcctaatcctaataccaactatctccctaattgaaaacaaaatactcaaatgggcctgtccttgtagtataaactaatacaccagtcttgtaaaccggagatgaaaacctttttccaaggacaaatcagagaaaaagtctttaactccaccattagcacccaaagctaagattctaatttaaactattctctgttctttcatggggaagcagatttgggtaccacccaagtattgactcacccatcaacaaccgctatgtatttcgtacattactgctagccaccatgaatattgtacggtaccataaatacttgaccacctgtagtacataaaaacccaatccacatcaaacccccccccccatgcttacaagcaagtacagcaatcaaccttcaactatcacacatcaactgcaactccaaaaccacccctcacccactaggatatcaacaaacctacccacccttaacagtacatagtacataaagccatttaccgtacatagcacattacagtcaaatcccttctcgtccccatggatgacccccctcagataggggtcccttgaccaccatcctccgtgaaatcaatatcccgcacaagagtgctactctcctcgctccgggcccataacacttgggggtagctaaagtgaactgtatccgacatctggttcctacttcagggccataaagcctaaatagcccacacgttccccttaaataagacatcacgatg

SEQ ID NO: 31 - DNA, 16570 bp, Homo sapiens mitochondrial
  3108: "n" refers to a nucleotide at position 3107 of the Cambridge Reference Sequence (CRS, Anderson et al. 1981 Nature 290:457-465), later determined to be absent from the human mtDNA sequence according to the revised CRS (rCRS, Andrews et al. 1999 Nature Genetics 23:147); "n" therefore represents a single nucleotide deletion at a position corresponding to nucleotide 3107 of SEQ ID NO:1 as provided herein.
gatcacaggtctatcaccctattaaccactcacgggagctctccatgcatttggtattttcgtctggggggtatgcacgcgatagcattgcgagacgctggagccggagcaccctatgtcgcagtatctgtctttgattcctgcctcatcctattatttatcgcacctacgttcaatattacaggcgaacatacttactaaagtgtgttaattaattaatgcttgtaggacataataataacaattgaatgtctgcacagccgctttccacacagacatcataacaaaaaatttccaccaaaccccccctcccccgccttctggccacagcacttaaacacatctctgccaaaccccaaaaacaaagaaccctaacaccagcctaaccagatttcaaattttatcttttggcggtatgcacttttaacagtcaccccccaactaacacattattttcccctcccactcccatactactaatctcatcaatacaacccccgcccatcctacccagcacacacacaccgctgctaaccccataccccgaaccaaccaaaccccaaagacaccccccacagtttatgtagcttacctcctcaaagcaatacactgaaaatgtttagacgggctcacatcaccccataaacaaataggtttggtcctagcctttctattagctcttagtaagattacacatgcaagcatccccgttccagtgagttcaccctctaaatcaccacgatcaaaagggacaagcatcaagcacgcagcaatgcagctcaaaacgcttagcctagccacacccccacgggaaacagcagtgattaacctttagcaataaacgaaagtttaactaagctatactaaccccagggttggtcaatttcgtgccagccaccgcggtcacacgattaacccaagtcaatagaagccggcgtaaagagtgttttagatcaccccctccccaataaagctaaaactcacctgagttgtaaaaaactccagttgacacaaaatagactacgaaagtggctttaacatatctgaacacacaatagctaagacccaaactgggattagataccccactatgcttagccctaaacctcaacagttaaatcaacaaaactgctcgccagaacactacgagccacagcttaaaactcaaaggacctggcggtgcttcatatccctctagaggagcctgttctgtaatcgataaaccccgatcaacctcaccacctcttgctcagcctatataccgccatcttcagcaaaccctgatgaaggctacaaagtaagcgcaagtacccacgtaaagacgttaggtcaaggtgtagcccatgaggtggcaagaaatgggctacattttctaccccagaaaactacgatagcccttatgaaacttaagggtcgaaggtggatttagcagtaaactgagagtagagtgcttagttgaacagggccctgaagcgcgtacacaccgcccgtcaccctcctcaagtatacttcaaaggacatttaactaaaacccctacgcatttatatagaggagacaagtcgtaacatggtaagtgtactggaaagtgcacttggacgaaccagagtgtagcttaacacaaagcacccaacttacacttaggagatttcaacttaacttgaccgctctgagctaaacctagccccaaacccactccaccttactaccagacaaccttagccaaaccatttacccaaataaagtataggcgatagaaattgaaacctggcgcaatagatatagtaccgcaagggaaagatgaaaaattataaccaagcataatatagcaaggactaacccctataccttctgcataatgaattaactagaaataactttgcaaggagagccaaagctaagacccccgaaaccagacgagctacctaagaacagctaaaagagcacacccgtctatgtagcaaaatagtgggaagatttataggtagaggcgacaaacctaccgagcctggtgatagctggttgtccaagatagaatcttagttcaactttaaatttgcccacagaaccctctaaatccccttgtaaatttaactgttagtccaaagaggaacagctctttggacactaggaaaaaaccttgtagagagagtaaaaaatttaacacccatagtaggcctaaaagcagccaccaattaagaaagcgttcaagctcaacacccactacctaaaaaatcccaaacatataactgaactcctcacacccaattggaccaatctatcaccctatagaagaactaatgttagtataagtaacatgaaaacattctcctccgcataagcctgcgtcagattaaaacactgaactgacaattaacagcccaatatctacaatcaaccaacaagtcattattaccctcactgtcaacccaacacaggcatgctcataaggaaaggttaaaaaaagtaaaaggaactcggcaaatcttaccccgcctgtttaccaaaaacatcacctctagcatcaccagtattagaggcaccgcctgcccagtgacacatgtttaacggccgcggtaccctaaccgtgcaaaggtagcataatcacttgttccttaaatagggacctgtatgaatggctccacgagggttcagctgtctcttacttttaaccagtgaaattgacctgcccgtgaagaggcgggcataacacagcaagacgagaagaccctatggagctttaatttattaatgcaaacagtacctaacaaacccacaggtcctaaactaccaaacctgcattaaaaatttcggttggggcgacctcggagcagaacccaacctccgagcagtacatgctaagacttcaccagtcaaagcgaactactatactcaattgatccaataacttgaccaacggaacaagttaccctagggataacagcgcaatcctattctagagtccatatcaacaatagggtttacgacctcgatgttggatcaggacatcccgatggtgcagccgctattaaaggttcgtttgttcaacgattaaagtcctacgtgatctgagttcagaccggagtaatccaggtcggtttctatctacnttcaaattcctccctgtacgaaaggacaagagaaataaggcctacttcacaaagcgccttcccccgtaaatgatatcatctcaacttagtattatacccacacccacccaagaacagggtttgttaagatggcagagcccggtaatcgcataaaacttaaaactttacagtcagaggttcaattcctcttcttaacaacatacccatggccaacctcctactcctcattgtacccattctaatcgcaatggcattcctaatgcttaccgaacgaaaaattctaggctatatacaactacgcaaaggccccaacgttgtaggcccctacgggctactacaacccttcgctgacgccataaaactcttcaccaaagagcccctaaaacccgccacatctaccatcaccctctacatcaccgccccgaccttagctctcaccatcgctcttctactatgaacccccctccccatacccaaccccctggtcaacctcaacctaggcctcctatttattctagccacctctagcctagccgtttactcaatcctctgatcagggtgagcatcaaactcaaactacgccctgatcggcgcactgcgagcagtagcccaaacaatctcatatgaagtcaccctagccatcattctactatcaacattactaataagtggctcctttaacctctccacccttatcacaacacaagaacacctctgattactcctgccatcatgacccttggccataatatgatttatctccacactagcagagaccaaccgaacccccttcgaccttgccgaaggggagtccgaactagtctcaggcttcaacatcgaatacgccgcaggccccttcgccctattcttcatagccgaatacacaaacattattataataaacaccctcaccactacaatcttcctaggaacaacatatgacgcactctcccctgaactctacacaacatattttgtcaccaagaccctacttctaacctccctgttcttatgaattcgaacagcatacccccgattccgctacgaccaactcatacacctcctatgaaaaaacttcctaccactcaccctagcattacttatatgatatgtctccatacccattacaatctccagcattccccctcaaacctaagaaatatgtctgataaaagagttactttgatagagtaaataataggagcttaaacccccttatttctaggactatgagaatcgaacccatccctgagaatccaaaattctccgtgccacctatcacaccccatcctaaagtaaggtcagctaaataagctatcgggcccataccccgaaaatgttggttatacccttcccgtactaattaatcccctggcccaacccgtcatctactctaccatctttgcaggcacactcatcacagcgctaagctcgcactgattttttacctgagtaggcctagaaataaacatgctagcttttattccagttctaaccaaaaaaataaaccctcgttccacagaagctgccatcaagtatttcctcacgcaagcaaccgcatccataatccttctaatagctatcctcttcaacaatatactctccggacaatgaaccataaccaatactaccaatcaatactcatcattaataatcataatggctatagcaataaaactaggaatagccccctttcacttctgagtcccagaggttacccaaggcacccctctgacatccggcctgcttcttctcacatgacaaaaactagcccccatctcaatcatataccaaatctctccctcactaaacgtaagccttctcctcactctctcaatcttatccatcatagcaggcagttgaggtggattaaaccaaacccagctacgcaaaatcttagcatactcctcaattacccacataggatgaataatagcagttctaccgtacaaccctaacataaccattcttaatttaactatttatattatcctaactactaccgcattcctactactcaacttaaactccagcaccacgaccctactactatctcgcacctgaaacaagctaacatgactaacacccttaattccatccaccctcctctccctaggaggcctgcccccgctaaccggctttttgcccaaatgggccattatcgaagaattcacaaaaaacaatagcctcatcatccccaccatcatagccaccatcaccctccttaacctctacttctacctacgcctaatctactccacctcaatcacactactccccatatctaacaacgtaaaaataaaatgacagtttgaacatacaaaacccaccccattcctccccacactcatcgcccttaccacgctactcctacctatctccccttttatactaataatcttatagaaatttaggttaaatacagaccaagagccttcaaagccctcagtaagttgcaatacttaatttctgtaacagctaaggactgcaaaaccccactctgcatcaactgaacgcaaatcagccactttaattaagctaagcccttactagaccaatgggacttaaacccacaaacacttagttaacagctaagcaccctaatcaactggcttcaatctacttctcccgccgccgggaaaaaaggcgggagaagccccggcaggtttgaagctgcttcttcgaatttgcaattcaatatgaaaatcacctcggagctggtaaaaagaggcctaacccctgtctttagatttacagtccaatgcttcactcagccattttacctcacccccactgatgttcgccgaccgttgactattctctacaaaccacaaagacattggaacactatacctattattcggcgcatgagctggagtcctaggcacagctctaagcctccttattcgagccgagctgggccagccaggcaaccttctaggtaacgaccacatctacaacgttatcgtcacagcccatgcatttgtaataatcttcttcatagtaatacccatcataatcggaggctttggcaactgactagttcccctaataatcggtgcccccgatatggcgtttccccgcataaacaacataagcttctgactcttacctccctctctcctactcctgctcgcatctgctatagtggaggccggagcaggaacaggttgaacagtctaccctcccttagcagggaactactcccaccctggagcctccgtagacctaaccatcttctccttacacctagcaggtgcctcctctatcttaggggccatcaatttcatcacaacaattatcaatataaaaccccctgccataacccaataccaaacgcccctcttcgtctgatccgtcctaatcacagcagtcctacttctcctatctctcccagtcctagctgctggcatcactatactactaacagaccgcaacctcaacaccaccttcttcgaccccgccggaggaggagaccccattctataccaacacctattctgatttttcggtcaccctgaagtttatattcttatcctaccaggcttcggaataatctcccatattgtaacttactactccggaaaaaaagaaccatttggatacataggtatggtctgagctatgatatcaattggcttcctagggtttatcgtgtgagcacaccatatatttacagtaggaatagacgtagacacacgagcatatttcacctccgctaccataatcatcgctatccccaccggcgtcaaagtatttagctgactcgccacactccacggaagcaatatgaaatgatctgctgcagtgctctgagccctaggattcatctttcttttcaccgtaggtggcctgactggcattgtattagcaaactcatcactagacatcgtactacacgacacgtactacgttgtagcccacttccactatgtcctatcaataggagctgtatttgccatcataggaggcttcattcactgatttcccctattctcaggctacaccctagaccaaacctacgccaaaatccatttcactatcatattcatcggcgtaaatctaactttcttcccacaacactttctcggcctatccggaatgccccgacgttactcggactaccccgatgcatacaccacatgaaacatcctatcatctgtaggctcattcatttctctaacagcagtaatattaataattttcatgatttgagaagccttcgcttcgaagcgaaaagtcctaatagtagaagaaccctccataaacctggagtgactatatggatgccccccaccctaccacacattcgaagaacccgtatacataaaatctagacaaaaaaggaaggaatcgaaccccccaaagctggtttcaagccaaccccatggcctccatgactttttcaaaaaggtattagaaaaaccatttcataactttgtcaaagttaaattataggctaaatcctatatatcttaatggcacatgcagcgcaagtaggtctacaagacgctacttcccctatcatagaagagcttatcacctttcatgatcacgccctcataatcattttccttatctgcttcctagtcctgtatgcccttttcctaacactcacaacaaaactaactaatactaacatctcagacgctcaggaaatagaaaccgtctgaactatcctgcccgccatcatcctagtcctcatcgccctcccatccctacgcatcctttacataacagacgaggtcaacgatccctcccttaccatcaaatcaattggccaccaatggtactgaacctacgagtacaccgactacggcggactaatcttcaactcctacatacttcccccattattcctagaaccaggcgacctgcgactccttgacgttgacaatcgagtagtactcccgattgaagcccccattcgtataataattacatcacaagacgtcttgcactcatgagctgtccccacattaggcttaaaaacagatgcaattcccggacgtctaaaccaaaccactttcaccgctacacgaccgggggtatactacggtcaatgctctgaaatctgtggagcaaaccacagtttcatgcccatcgtcctagaattaattcccctaaaaatctttgaaatagggcccgtatttaccctatagcaccccctctaccccctctagagcccactgtaaagctaacttagcattaaccttttaagttaaagattaagagaaccaacacctctttacagtgaaatgccccaactaaatactaccgtatggcccaccataattacccccatactccttacactattcctcatcacccaactaaaaatattaaacacaaactaccacctacctccctcaccaaagcccataaaaataaaaaattataacaaaccctgagaaccaaaatgaacgaaaatctgttcgcttcattcattgcccccacaatcctaggcctacccgccgcagtactgatcattctatttccccctctattgatccccacctccaaatatctcatcaacaaccgactaatcaccacccaacaatgactaatcaaactaacctcaaaacaaatgataaccatacacaacactaaaggacgaacctgatctcttatactagtatccttaatcatttttattgccacaactaacctcctcggactcctgcctcactcatttacaccaaccacccaactatctataaacctagccatggccatccccttatgagcgggcgcagtgattataggctttcgctctaagattaaaaatgccctagcccacttcttaccacaaggcacacctacaccccttatccccatactagttattatcgaaaccatcagcctactcattcaaccaatagccctggccgtacgcctaaccgctaacattactgcaggccacctactcatgcacctaattggaagcgccaccctagcaatatcaaccattaaccttccctctacacttatcatcttcacaattctaattctactgactatcctagaaatcgctgtcgccttaatccaagcctacgttttcacacttctagtaagcctctacctgcacgacaacacataatgacccaccaatcacatgcctatcatatagtaaaacccagcccatgacccctaacaggggccctctcagccctcctaatgacctccggcctagccatgtgatttcacttccactccataacgctcctcatactaggcctactaaccaacacactaaccatataccaatgatggcgcgatgtaacacgagaaagcacataccaaggccaccacacaccacctgtccaaaaaggccttcgatacgggataatcctatttattacctcagaagtttttttcttcgcaggatttttctgagccttttaccactccagcctagcccctaccccccaattaggagggcactggcccccaacaggcatcaccccgctaaatcccctagaagtcccactcctaaacacatccgtattactcgcatcaggagtatcaatcacctgagctcaccatagtctaatagaaaacaaccgaaaccaaataattcaagcactgcttattacaattttactgggtctctattttaccctcctacaagcctcagagtacttcgagtctcccttcaccatttccgacggcatctacggctcaacattttttgtagccacaggcttccacggacttcacgtcattattggctcaactttcctcactatctgcttcatccgccaactaatatttcactttacatccaaacatcactttggcttcgaagccgccgcctgatactggcattttgtagatgtggtttgactatttctgtatgtctccatctattgatgagggtcttactcttttagtataaatagtaccgttaacttccaattaactagttttgacaacattcaaaaaagagtaataaacttcgccttaattttaataatcaacaccctcctagccttactactaataattattacattttgactaccacaactcaacggctacatagaaaaatccaccccttacgagtgcggcttcgaccctatatcccccgcccgcgtccctttctccataaaattcttcttagtagctattaccttcttattatttgatctagaaattgccctccttttacccctaccatgagccctacaaacaactaacctgccactaatagttatgtcatccctcttattaatcatcatcctagccctaagtctggcctatgagtgactacaaaaaggattagactgaaccgaattggtatatagtttaaacaaaacgaatgatttcgactcattaaattatgataatcatatttaccaaatgcccctcatttacataaatattatactagcatttaccatctcacttctaggaatactagtatatcgctcacacctcatatcctccctactatgcctagaaggaataatactatcgctgttcattatagctactctcataaccctcaacacccactccctcttagccaatattgtgcctattgccatactagtctttgccgcctgcgaagcagcggtgggcctagccctactagtctcaatctccaacacatatggcctagactacgtacataacctaaacctactccaatgctaaaactaatcgtcccaacaattatattactaccactgacatgactttccaaaaaacacataatttgaatcaacacaaccacccacagcctaattattagcatcatccctctactattttttaaccaaatcaacaacaacctatttagctgttccccaaccttttcctccgaccccctaacaacccccctcctaatactaactacctgactcctacccctcacaatcatggcaagccaacgccacttatccagtgaaccactatcacgaaaaaaactctacctctctatactaatctccctacaaatctccttaattataacattcacagccacagaactaatcatattttatatcttcttcgaaaccacacttatccccaccttggctatcatcacccgatgaggcaaccagccagaacgcctgaacgcaggcacatacttcctattctacaccctagtaggctcccttcccctactcatcgcactaatttacactcacaacaccctaggctcactaaacattctactactcactctcactgcccaagaactatcaaactcctgagccaacaacttaatatgactagcttacacaatagcttttatagtaaagatacctctttacggactccacttatgactccctaaagcccatgtcgaagcccccatcgctgggtcaatagtacttgccgcagtactcttaaaactaggcggctatggtataatacgcctcacactcattctcaaccccctgacaaaacacatagcctaccccttccttgtactatccctatgaggcataattataacaagctccatctgcctacgacaaacagacctaaaatcgctcattgcatactcttcaatcagccacatagccctcgtagtaacagccattctcatccaaaccccctgaagcttcaccggcgcagtcattctcataatcgcccacgggcttacatcctcattactattctgcctagcaaactcaaactacgaacgcactcacagtcgcatcataatcctctctcaaggacttcaaactctactcccactaatagctttttgatgacttctagcaagcctcgctaacctcgccttaccccccactattaacctactgggagaactctctgtgctagtaaccacgttctcctgatcaaatatcactctcctacttacaggactcaacatactagtcacagccctatactccctctacatatttaccacaacacaatggggctcactcacccaccacattaacaacataaaaccctcattcacacgagaaaacaccctcatgttcatacacctatcccccattctcctcctatccctcaaccccgacatcattaccgggttttcctcttgtaaatatagtttaaccaaaacatcagattgtgaatctgacaacagaggcttacgaccccttatttaccgagaaagctcacaagaactgctaactcatgcccccatgtctaacaacatggctttctcaacttttaaaggataacagctatccattggtcttaggccccaaaaattttggtgcaactccaaataaaagtaataaccatgcacactactataaccaccctaaccctgacttccctaattccccccatccttaccaccctcgttaaccctaacaaaaaaaactcatacccccattatgtaaaatccattgtcgcatccacctttattatcagtctcttccccacaacaatattcatgtgcctagaccaagaagttattatctcgaactgacactgagccacaacccaaacaacccagctctccctaagcttcaaactagactacttctccataatattcatccctgtagcattgttcgttacatggtccatcatagaattctcactgtgatatataaactcagacccaaacattaatcagttcttcaaatatctactcatcttcctaattaccatactaatcttagttaccgctaacaacctattccaactgttcatcggctgagagggcgtaggaattatatccttcttgctcatcagttgatgatacgcccgagcagatgccaacacagcagccattcaagcaatcctatacaaccgtatcggcgatatcggtttcatcctcgccttagcatgatttatcctacactccaactcatgagacccacaacaaatagcccttctaaacgctaatccaagcctcaccccactactaggcctcctcctagcagcagcaggcaaatcagcccaattaggtctccacccctgactcccctcagccatagaaggccccaccccagtctcagccctactccactcaagcactatagttgtagcaggaatcttcttactcatccgcttccaccccctagcagaaaatagcccactaatccaaactctaacactatgcttaggcgctatcaccactctgttcgcagcagtctgcgcccttacacaaaatgacatcaaaaaaatcgtagccttctccacttcaagtcaactaggactcataatagttacaatcggcatcaaccaaccacacctagcattcctgcacatctgtacccacgccttcttcaaagccatactatttatgtgctccgggtccatcatccacaaccttaacaatgaacaagatattcgaaaaataggaggactactcaaaaccatacctctcacttcaacctccctcaccattggcagcctagcattagcaggaatacctttcctcacaggtttctactccaaagaccacatcatcgaaaccgcaaacatatcatacacaaacgcctgagccctatctattactctcatcgctacctccctgacaagcgcctatagcactcgaataattcttctcaccctaacaggtcaacctcgcttccccacccttactaacattaacgaaaataaccccaccctactaaaccccattaaacgcctggcagccggaagcctattcgcaggatttctcattactaacaacatttcccccgcatcccccttccaaacaacaatccccctctacctaaaactcacagccctcgctgtcactttcctaggacttctaacagccctagacctcaactacctaaccaacaaacttaaaataaaatccccactatgcacattttatttctccaacatactcggattctaccctagcatcacacaccgcacaatcccctatctaggccttcttacgagccaaaacctgcccctactcctcctagacctaacctgactagaaaagctattacctaaaacaatttcacagcaccaaatctccacctccatcatcacctcaacccaaaaaggcataattaaactttacttcctctctttcttcttcccactcatcctaaccctactcctaatcacataacctattcccccgagcaatctcaattacaatatatacaccaacaaacaatgttcaaccagtaactactactaatcaacgcccataatcatacaaagcccccgcaccaataggatcctcccgaatcaaccctgacccctctccttcataaattattcagcttcctacactattaaagtttaccacaaccaccaccccatcatactctttcacccacagcaccaatcctacctccatcgctaaccccactaaaacactcaccaagacctcaacccctgacccccatgcctcaggatactcctcaatagccatcgctgtagtatatccaaagacaaccatcattccccctaaataaattaaaaaaactattaaacccatataacctcccccaaaattcagaataataacacacccgaccacaccgctaacaatcaatactaaacccccataaataggagaaggcttagaagaaaaccccacaaaccccattactaaacccacactcaacagaaacaaagcatacatcattattctcgcacggactacaaccacgaccaatgatatgaaaaaccatcgttgtatttcaactacaagaacaccaatgaccccaatacgcaaaactaaccccctaataaaattaattaaccactcattcatcgacctccccaccccatccaacatctccgcatgatgaaacttcggctcactccttggcgcctgcctgatcctccaaatcaccacaggactattcctagccatgcactactcaccagacgcctcaaccgccttttcatcaatcgcccacatcactcgagacgtaaattatggctgaatcatccgctaccttcacgccaatggcgcctcaatattctttatctgcctcttcctacacatcgggcgaggcctatattacggatcatttctctactcagaaacctgaaacatcggcattatcctcctgcttgcaactatagcaacagccttcataggctatgtcctcccgtgaggccaaatatcattctgaggggccacagtaattacaaacttactatccgccatcccatacattgggacagacctagttcaatgaatctgaggaggctactcagtagacagtcccaccctcacacgattctttacctttcacttcatcttgcccttcattattgcagccctagcagcactccacctcctattcttgcacgaaacgggatcaaacaaccccctaggaatcacctcccattccgataaaatcaccttccacccttactacacaatcaaagacgccctcggcttacttctcttccttctctccttaatgacattaacactattctcaccagacctcctaggcgacccagacaattataccctagccaaccccttaaacacccctccccacatcaagcccgaatgatatttcctattcgcctacacaattctccgatccgtccctaacaaactaggaggcgtccttgccctattactatccatcctcatcctagcaataatccccatcctccatatatccaaacaacaaagcataatatttcgcccactaagccaatcactttattgactcctagccgcagacctcctcattctaacctgaatcggaggacaaccagtaagctacccttttaccatcattggacaagtagcatccgtactatacttcacaacaatcctaatcctaataccaactatctccctaattgaaaacaaaatactcaaatgggcctgtccttgtagtataaactaatacaccagtcttgtaaaccggagatgaaaacctttttccaaggacaaatcagagaaaaagtctttaactccaccattagcacccaaagctaagattctaatttaaactattctctgttctttcatggggaagcagatttgggtaccacccaagtattgactcacccatcaacaaccgctatgtatttcgtacattactgccagccaccatgaatattgtacggtaccataaatacttgaccacctgtagtacataaaaacccaatccacatcaaaaccccctcctcatgcttacaagcaagtacagcaatcaaccctcaactatcacacatcaactgcaactccaaagccacccctcacccactaggataccaacaaacctacccacccttaacagtacatagtacataaagccatttaccgtacatagcacattacagtcaaatcccttctcgtccccatggatgacccccctcagataggggtcccttgaccaccatcctccgtgaaatcaatatcccgcacaagagtgctactctcctcgctccgggcccataacacttgggggtagctaaagtgaactgtatccgacatctggttcctacttcagggccataaagcctaaatagcccacacgttccccttaaataagacatcacgatg

SEQ ID NO: 32 - DNA, 16572 bp, Homo sapiens mitochondrial
  3110: "n" refers to a nucleotide at position 3107 of the Cambridge Reference Sequence (CRS, Anderson et al. 1981 Nature 290:457-465), later determined to be absent from the human mtDNA sequence according to the revised CRS (rCRS, Andrews et al. 1999 Nature Genetics 23:147); "n" therefore represents a single nucleotide deletion at a position corresponding to nucleotide 3107 of SEQ ID NO:1 as provided herein.
gatcacaggtctatcaccctattaaccactcacgggagctctccatgcatttggtattttcgtctggggggtatgcacgcgatagcattgcgagacgctggagccggagcaccctatgtcgcagtatctgtctttgattcctgcctcatcctattatttatcgcacctacgttcaatattacaggcgaacatacttactaaagtgtgttaattaattaatgcttgtaggacataataataacaattgaatgtctgcacagccgctttccacacagacatcataacaaaaaatttccaccaaaccccccctccccccccgcttctggccacagcacttaaacacatctctgccaaaccccaaaaacaaagaaccctaacaccagcctaaccagatttcaaattttatcttttggcggtatgcacttttaacagtcaccccccaactaacacattattttcccctcccactcccatactactaatctcatcaatacaacccccgcccatcctacccagcacacacacaccgctgctaaccccataccccgaaccaaccaaaccccaaagacaccccccacagtttatgtagcttacctcctcaaagcaatacactgaaaatgtttagacgggctcacatcaccccataaacaaataggtttggtcctagcctttctattagctcttagtaagattacacatgcaagcatccccgttccagtgagttcaccctctaaatcaccacgatcaaaagggacaagcatcaagcacgcagcaatgcagctcaaaacgcttagcctagccacacccccacgggaaacagcagtgattaacctttagcaataaacgaaagtttaactaagctatactaaccccagggttggtcaatttcgtgccagccaccgcggtcacacgattaacccaagtcaatagaagccggcgtaaagagtgttttagatcaccccctccccaataaagctaaaactcacctgagttgtaaaaaactccagttgacacaaaatagactacgaaagtggctttaacatatctgaacacacaatagctaagacccaaactgggattagataccccactatgcttagccctaaacctcaacagttaaatcaacaaaactgctcgccagaacactacgagccacagcttaaaactcaaaggacctggcggtgcttcatatccctctagaggagcctgttctgtaatcgataaaccccgatcaacctcaccacctcttgctcagcctatataccgccatcttcagcaaaccctgatgaaggctacaaagtaagcgcaagtacccacgtaaagacgttaggtcaaggtgtagcccatgaggtggcaagaaatgggctacattttctaccccagaaaactacgatagcccttatgaaacttaagggtcgaaggtggatttagcagtaaactgagagtagagtgcttagttgaacagggccctgaagcgcgtacacaccgcccgtcaccctcctcaagtatacttcaaaggacatttaactaaaacccctacgcatttatatagaggagacaagtcgtaacatggtaagtgtactggaaagtgcacttggacgaaccagagtgtagcttaacacaaagcacccaacttacacttaggagatttcaacttaacttgaccgctctgagctaaacctagccccaaacccactccaccttactaccagacaaccttagccaaaccatttacccaaataaagtataggcgatagaaattgaaacctggcgcaatagatatagtaccgcaagggaaagatgaaaaattataaccaagcataatatagcaaggactaacccctataccttctgcataatgaattaactagaaataactttgcaaggagagccaaagctaagacccccgaaaccagacgagctacctaagaacagctaaaagagcacacccgtctatgtagcaaaatagtgggaagatttataggtagaggcgacaaacctaccgagcctggtgatagctggttgtccaagatagaatcttagttcaactttaaatttgcccacagaaccctctaaatccccttgtaaatttaactgttagtccaaagaggaacagctctttggacactaggaaaaaaccttgtagagagagtaaaaaatttaacacccatagtaggcctaaaagcagccaccaattaagaaagcgttcaagctcaacacccactacctaaaaaatcccaaacatataactgaactcctcacacccaattggaccaatctatcaccctatagaagaactaatgttagtataagtaacatgaaaacattctcctccgcataagcctgcgtcagattaaaacactgaactgacaattaacagcccaatatctacaatcaaccaacaagtcattattaccctcactgtcaacccaacacaggcatgctcataaggaaaggttaaaaaaagtaaaaggaactcggcaaatcttaccccgcctgtttaccaaaaacatcacctctagcatcaccagtattagaggcaccgcctgcccagtgacacatgtttaacggccgcggtaccctaaccgtgcaaaggtagcataatcacttgttccttaaatagggacctgtatgaatggctccacgagggttcagctgtctcttacttttaaccagtgaaattgacctgcccgtgaagaggcgggcataacacagcaagacgagaagaccctatggagctttaatttattaatgcaaacagtacctaacaaacccacaggtcctaaactaccaaacctgcattaaaaatttcggttggggcgacctcggagcagaacccaacctccgagcagtacatgctaagacttcaccagtcaaagcgaactactatactcaattgatccaataacttgaccaacggaacaagttaccctagggataacagcgcaatcctattctagagtccatatcaacaatagggtttacgacctcgatgttggatcaggacatcccaatggtgcagccgctattaaaggttcgtttgttcaacgattaaagtcctacgtgatctgagttcagaccggagtaatccaggtcggtttctatctacnttcaaattcctccctgtacgaaaggacaagagaaataaggcctacttcacaaagcgccttcccccgtaaatgatatcatctcaacttagtattatacccacacccacccaagaacagggtttgttaagatggcagagcccggtaatcgcataaaacttaaaactttacagtcagaggttcaattcctcttcttaacaacatacccatggccaacctcctactcctcattgtacccattctaatcgcaatggcattcctaatgcttaccgaacgaaaaattctaggctatatacaactacgcaaaggccccaacgttgtaggcccctacgggctactacaacccttcgctgacgccataaaactcttcaccaaagagcccctaaaacccgccacatctaccatcaccctctacatcaccgccccgaccttagctctcaccatcgctcttctactatgaacccccctccccatacccaaccccctggtcaacctcaacctaggcctcctatttattctagccacctctagcctagccgtttactcaatcctctgatcagggtgagcatcaaactcaaactacgccctgatcggcgcactgcgagcagtagcccaaacaatctcatatgaagtcaccctagccatcattctactatcaacattactaataagtggctcctttaacctctccacccttatcacaacacaagaacacctctgattactcctgccatcatgacccttggccataatatgatttatctccacactagcagagaccaaccgaacccccttcgaccttgccgaaggggagtccgaactagtctcaggcttcaacatcgaatacgccgcaggccccttcgccctattcttcatagccgaatacacaaacattattataataaacaccctcaccactacaatcttcctaggaacaacatatgacgcactctcccctgaactctacacaacatattttgtcaccaagaccctacttctaacctccctgttcttatgaattcgaacagcatacccccgattccgctacgaccaactcatacacctcctatgaaaaaacttcctaccactcaccctagcattacttatatgatatgtctccatacccattacaatctccagcattccccctcaaacctaagaaatatgtctgataaaagagttactttgatagagtaaataataggagcttaaacccccttatttctaggactatgagaatcgaacccatccctgagaatccaaaattctccgtgccacctatcacaccccatcctaaagtaaggtcagctaaataagctatcgggcccataccccgaaaatgttggttatacccttcccgtactaattaatcccctggcccaacccgtcatctactctaccatctttgcaggcacactcatcacagcgctaagctcgcactgattttttacctgagtaggcctagaaataaacatgctagcttttattccagttctaaccaaaaaaataaaccctcgttccacagaagctgccatcaagtatttcctcacgcaagcaaccgcatccataatccttctaatagctatcctcttcaacaatatactctccggacaatgaaccataaccaatactaccaatcaatactcatcattaataatcataatggctatagcaataaaactaggaatagccccctttcacttctgagtcccagaggttacccaaggcacccctctgacatccggcctgcttcttctcacatgacaaaaactagcccccatctcaatcatataccaaatctctccctcactaaacgtaagccttctcctcactctctcaatcttatccatcatagcaggcagttgaggtggattaaaccaaacccagctacgcaaaatcttagcatactcctcaattacccacataggatgaataatagcagttctaccgtacaaccctaacataaccattcttaatttaactatttatattatcctaactactaccgcattcctactactcaacttaaactccagcaccacgaccctactactatctcgcacctgaaacaagctaacatgactaacacccttaattccatccaccctcctctccctaggaggcctgcccccgctaaccggctttttgcccaaatgggccattatcgaagaattcacaaaaaacaatagcctcatcatccccaccatcatagccaccatcaccctccttaacctctacttctacctacgcctaatctactccacctcaatcacactactccccatatctaacaacgtaaaaataaaatgacagtttgaacatacaaaacccaccccattcctccccacactcatcgcccttaccacgctactcctacctatctccccttttatactaataatcttatagaaatttaggttaaatacagaccaagagccttcaaagccctcagtaagttgcaatacttaatttctgtaacagctaaggactgcaaaaccccactctgcatcaactgaacgcaaatcagccactttaattaagctaagcccttactagaccaatgggacttaaacccacaaacacttagttaacagctaagcaccctaatcaactggcttcaatctacttctcccgccgccgggaaaaaaggcgggagaagccccggcaggtttgaagctgcttcttcgaatttgcaattcaatatgaaaatcacctcggagctggtaaaaagaggcctaacccctgtctttagatttacagtccaatgcttcactcagccattttacctcacccccactgatgttcgccgaccgttgactattctctacaaaccacaaagacattggaacactatacctattattcggcgcatgagctggagtcctaggcacagctctaagcctccttattcgagccgagctgggccagccaggcaaccttctaggtaacgaccacatctacaacgttatcgtcacagcccatgcatttgtaataatcttcttcatagtaatacccatcataatcggaggctttggcaactgactagttcccctaataatcggtgcccccgatatggcgtttccccgcataaacaacataagcttctgactcttacctccctctctcctactcctgctcgcatctgctatagtggaggccggagcaggaacaggttgaacagtctaccctcccttagcagggaactactcccaccctggagcctccgtagacctaaccatcttctccttacacctagcaggtgtctcctctatcttaggggccatcaatttcatcacaacaattatcaatataaaaccccctgccataacccaataccaaacgcccctcttcgtctgatccgtcctaatcacagcagtcctacttctcctatctctcccagtcctagctgctggcatcactatactactaacagaccgcaacctcaacaccaccttcttcgaccccgccggaggaggagaccccattctataccaacacctattctgatttttcggtcaccctgaagtttatattcttatcctaccaggcttcggaataatctcccatattgtaacttactactccggaaaaaaagaaccatttggatacataggtatggtctgagctatgatatcaattggcttcctagggtttatcgtgtgagcacaccatatatttacagtaggaatagacgtagacacacgagcatatttcacctccgctaccataatcatcgctatccccaccggcgtcaaagtatttagctgactcgccacactccacggaagcaatatgaaatgatctgctgcagtgctctgagccctaggattcatctttcttttcaccgtaggtggcctgactggcattgtattagcaaactcatcactagacatcgtactacacgacacgtactacgttgtagcccacttccactatgtcctatcaataggagctgtatttgccatcataggaggcttcattcactgatttcccctattctcaggctacaccctagaccaaacctacgccaaaatccatttcactatcatattcatcggcgtaaatctaactttcttcccacaacactttctcggcctatccggaatgccccgacgttactcggactaccccgatgcatacaccacatgaaacatcctatcatctgtaggctcattcatttctctaacagcagtaatattaataattttcatgatttgagaagccttcgcttcgaagcgaaaagtcctaatagtagaagaaccctccataaacctggagtgactatatggatgccccccaccctaccacacattcgaagaacccgtatacataaaatctagacaaaaaaggaaggaatcgaaccccccaaagctggtttcaagccaaccccatggcctccatgactttttcaaaaaggtattagaaaaaccatttcataactttgtcaaagttaaattataggctaaatcctatatatcttaatggcacatgcagcgcaagtaggtctacaagacgctacttcccctatcatagaagagcttatcacctttcatgatcacgccctcataatcattttccttatctgcttcctagtcctgtatgcccttttcctaacactcacaacaaaactaactaatactaacatctcagacgctcaggaaatagaaaccgtctgaactatcctgcccgccatcatcctagtcctcatcgccctcccatccctacgcatcctttacataacagacgaggtcaacgatccctcccttaccatcaaatcaattggccaccaatggtactgaacctacgagtacaccgactacggcggactaatcttcaactcctacatacttcccccattattcctagaaccaggcgacctgcgactccttgacgttgacaatcgagtagtactcccgattgaagcccccattcgtataataattacatcacaagacgtcttgcactcatgagctgtccccacattaggcttaaaaacagatgcaattcccggacgtctaaaccaaaccactttcaccgctacacgaccgggggtatactacggtcaatgctctgaaatctgtggagcaaaccacagtttcatgcccatcgtcctagaattaattcccctaaaaatctttgaaatagggcccgtatttaccctatagcaccccctctaccccctctagagcccactgtaaagctagcttagcattaaccttttaagttaaagattaagagaaccaacacctctttacagtgaaatgccccaactaaatactaccgtatggcccaccataattacccccatactccttacactattcctcatcacccaactaaaaatattaaacacaaactaccacctacctccctcaccaaagcccataaaaataaaaaattataacaaaccctgagaaccaaaatgaacgaaaatctgttcgcttcattcattgcccccacaatcctaggcctacccgccgcagtactgatcattctatttccccctctattgatccccacctccaaatatctcatcaacaaccgactaatcaccacccaacaatgactaatcaaactaacctcaaaacaaatgataaccatacacaacactaaaggacgaacctgatctcttatactagtatccttaatcatttttattgccacaactaacctcctcggactcctgcctcactcatttacaccaaccacccaactatctataaacctagccatggccatccccttatgagcgggcgcagtgattataggctttcgctctaagattaaaaatgccctagcccacttcttaccacaaggcacacctacaccccttatccccatactagttattatcgaaaccatcagcctactcattcaaccaatagccctggccgtacgcctaaccgctaacattactgcaggccacctactcatgcacctaattggaagcgccaccctagcaatatcaaccattaaccttccctctacacttatcatcttcacaattctaattctactgactatcctagaaatcgctgtcgccttaatccaagcctacgttttcacacttctagtaagcctctacctgcacgacaacacataatgacccaccaatcacatgcctatcatatagtaaaacccagcccatgacccctaacaggggccctctcagccctcctaatgacctccggcctagccatgtgatttcacttccactccataacgctcctcatactaggcctactaaccaacacactaaccatataccaatgatggcgcgatgtaacacgagaaagcacataccaaggccaccacacaccacctgtccaaaaaggccttcgatacgggataatcctatttattacctcagaagtttttttcttcgcaggatttttctgagccttttaccactccagcctagcccctaccccccaattaggagggcactggcccccaacaggcatcaccccgctaaatcccctagaagtcccactcctaaacacatccgtattactcgcatcaggagtatcaatcacctgagctcaccatagtctaatagaaaacaaccgaaaccaaataattcaagcactgcttattacaattttactgggtctctattttaccctcctacaagcctcagagtacttcgagtctcccttcaccatttccgacggcatctacggctcaacattttttgtagccacaggcttccacggacttcacgtcattattggctcaactttcctcactatctgcttcatccgccaactaatatttcactttacatccaaacatcactttggcttcgaagccgccgcctgatactggcattttgtagatgtggtttgactatttctgtatgtctccatctattgatgagggtcttactcttttagtataaatagtaccgttaacttccaattaactagttttgacaacattcaaaaaagagtaataaacttcgccttaattttaataatcaacaccctcctagccttactactaataattattacattttgactaccacaactcaacggctacatagaaaaatccaccccttacgagtgcggcttcgaccctatatcccccgcccgcgtccctttctccataaaattcttcttagtagctattaccttcttattatttgatctagaaattgccctccttttacccctaccatgagccctacaaacaactaacctgccactaatagttatgtcatccctcttattaatcatcatcctagccctaagtctggcctatgagtgactacaaaaaggattagactgaaccgaattggtatatagtttaaacaaaacgaatgatttcgactcattaaattatgataatcatatttaccaaatgcccctcatttacataaatattatactagcatttaccatctcacttctaggaatactagtatatcgctcacacctcatatcctccctactatgcctagaaggaataatactatcgctgttcattatagctactctcataaccctcaacacccactccctcttagccaatattgtgcctattgccatactagtctttgccgcctgcgaagcagcggtgggcctagccctactagtctcaatctccaacacatatggcctagactacgtacataacctaaacctactccaatgctaaaactaatcgtcccaacaattatattactaccactgacatgactttccaaaaaacacataatttgaatcaacacaaccacccacagcctaattattagcatcatccctctactattttttaaccaaatcaacaacaacctatttagctgttccccaaccttttcctccgaccccctaacaacccccctcctaatactaactacctgactcctacccctcacaatcatggcaagccaacgccacttatccagtgaaccactatcacgaaaaaaactctacctctctatactaatctccctacaaatctccttaattataacattcacagccacagaactaatcatattttatatcttcttcgaaaccacacttatccccaccttggctatcatcacccgatgaggcaaccagccagaacgcctgaacgcaggcacatacttcctattctacaccctagtaggctcccttcccctactcatcgcactaatttacactcacaacaccctaggctcactaaacattctactactcactctcactgcccaagaactatcaaactcctgagccaacaacttaatatgactagcttacacaatagcttttatagtaaagatacctctttacggactccacttatgactccctaaagcccatgtcgaagcccccatcgctgggtcaatagtacttgccgcagtactcttaaaactaggcggctatggtataatacgcctcacactcattctcaaccccctgacaaaacacatagcctaccccttccttgtactatccctatgaggcataattataacaagctccatctgcctacgacaaacagacctaaaatcgctcattgcatactcttcaatcagccacatagccctcgtagtaacagccattctcatccaaaccccctgaagcttcaccggcgcagtcattctcataatcgcccacgggcttacatcctcattactattctgcctagcaaactcaaactacgaacgcactcacagtcgcatcataatcctctctcaaggacttcaaactctactcccactaatagctttttgatgacttctagcaagcctcgctaacctcgccttaccccccactattaacctactgggagaactctctgtgctagtaaccacgttctcctgatcaaatatcactctcctacttacaggactcaacatactagtcacagccctatactccctctacatatttaccacaacacaatggggctcactcacccaccacattaacaacataaaaccctcattcacacgagaaaacaccctcatgttcatacacctatcccccattctcctcctatccctcaaccccgacatcattaccgggttttcctcttgtaaatatagtttaaccaaaacatcagattgtgaatctgacaacagaggcttacgaccccttatttaccgagaaagctcacaagaactgctaactcatgcccccatgtctaacaacatggctttctcaacttttaaaggataacagctatccattggtcttaggccccaaaaattttggtgcaactccaaataaaagtaataaccatgcacactactataaccaccctaaccctgacttccctaattccccccatccttaccaccctcgttaaccctaacaaaaaaaactcatacccccattatgtaaaatccattgtcgcatccacctttattatcagtctcttccccacaacaatattcatgtgcctagaccaagaagttattatctcgaactgacactgagccacaacccaaacaacccagctctccctaagcttcaaactagactacttctccataatattcatccctgtagcattgttcgttacatggtccatcatagaattctcactgtgatatataaactcagacccaaacattaatcagttcttcaaatatctactcatcttcctaattaccatactaatcttagttaccgctaacaacctattccaactgttcatcggctgagagggcgtaggaattatatccttcttgctcatcagttgatgatacgcccgagcagatgccaacacagcagccattcaagcaatcctatacaaccgtatcggcgatatcggtttcatcctcgccttagcatgatttatcctacactccaactcatgagacccacaacaaatagcccttctaaacgctaatccaagcctcaccccactactaggcctcctcctagcagcagcaggcaaatcagcccaattaggtctccacccctgactcccctcagccatagaaggccccaccccagtctcagccctactccactcaagcactatagttgtagcaggaatcttcttactcatccgcttccaccccctagcagaaaatagcccactaatccaaactctaacactatgcttaggcgctatcaccactctgttcgcagcagtctgcgcccttacacaaaatgacatcaaaaaaatcgtagccttctccacttcaagtcaactaggactcataatagttacaatcggcatcaaccaaccacacctagcattcctgcacatctgtacccacgccttcttcaaagccatactatttatgtgctccgggtccatcatccacaaccttaacaatgaacaagatattcgaaaaataggaggactactcaaaaccatacctctcacttcaacctccctcaccattggcagcctagcattagcaggaatacctttcctcacaggtttctactccaaagaccacatcatcgaaaccgcaaacatatcatacacaaacgcctgagccctatctattactctcatcgctacctccctgacaagcgcctatagcactcgaataattcttctcaccctaacaggtcaacctcgcttccccacccttactaacattaacgaaaataaccccaccctactaaaccccattaaacgcctggcagccggaagcctattcgcaggatttctcattactaacaacatttcccccgcatcccccttccaaacaacaatccccctctacctaaaactcacagccctcgctgtcactttcctaggacttctaacagccctagacctcaactacctaaccaacaaacttaaaataaaatccccactatgcacattttatttctccaacatactcggattctaccctagcatcacacaccgcacaatcccctatctaggccttcttacgagccaaaacctgcccctactcctcctagacctaacctgactagaaaagctattacctaaaacaatttcacagcaccaaatctccacctccatcatcacctcaacccaaaaaggcataattaaactttacttcctctctttcttcttcccactcatcctaaccctactcctaatcacataacctattcccccgagcaatctcaattacaatatatacaccaacaaacaatgttcaaccagtaactactactaatcaacgcccataatcatacaaagcccccgcaccaataggatcctcccgaatcaaccctgacccctctccttcataaattattcagcttcctacactattaaagtttaccacaaccaccaccccatcatactctttcacccacagcaccaatcctacctccatcgctaaccccactaaaacactcaccaagacctcaacccctgacccccatgcctcaggatactcctcaatagccatcgctgtagtatatccaaagacaaccatcattccccctaaataaattaaaaaaactattaaacccatataacctcccccaaaattcagaataataacacacccgaccacaccgctaacaatcaatactaaacccccataaataggagaaggcttagaagaaaaccccacaaaccccattactaaacccacactcaacagaaacaaagcatacatcattattctcgcacggactacaaccacgaccaatgatatgaaaaaccatcgttgtatttcaactacaagaacaccaatgaccccaatacgcaaaactaaccccctaataaaattaattaaccactcattcatcgacctccccaccccatccaacatctccgcatgatgaaacttcggctcactccttggcgcctgcctgatcctccaaatcaccacaggactattcctagccatgcactactcaccagacgcctcaaccgccttttcatcaatcgcccacatcactcgagacgtaaattatggctgaatcatccgctaccttcacgccaatggcgcctcaatattctttatctgcctcttcctacacatcgggcgaggcctatattacggatcatttctctactcagaaacctgaaacatcggcattatcctcctgcttgcaactatagcaacagccttcataggctatgtcctcccgtgaggccaaatatcattctgaggggccacagtaattacaaacttactatccgccatcccatacattgggacagacctagttcaatgaatctgaggaggctactcagtagacagtcccaccctcacacgattctttacctttcacttcatcttgcccttcattattgcagccctagcagcactccacctcctattcttgcacgaaacgggatcaaacaaccccctaggaatcacctcccattccgataaaatcaccttccacccttactacacaatcaaagacgccctcggcttacttctcttccttctctccttaatgacattaacactattctcaccagacctcctaggcgacccagacaattataccctagccaaccccttaaacacccctccccacatcaagcccgaatgatatttcctattcgcctacacaattctccgatccgtccctaacaaactaggaggcgtccttgccctattactatccatcctcatcctagcaataatccccatcctccatatatccaaacaacaaagcataatatttcgcccactaagccaatcactttattgactcctagccgcagacctcctcattctaacctgaatcggaggacaaccagtaagctacccttttaccatcattggacaagtagcatccgtactatacttcacaacaatcctaatcctaataccaactatctccctaattgaaaacaaaatactcaaatgggcctgtccttgtagtataaactaatacaccagtcttgtaaaccggagatgaaaacctttttccaaggacaaatcagagaaaaagtctttaactccaccattagcacccaaagctaagattctaatttaaactattctctgttctttcatggggaagcagatttgggtaccacccaagtattgactcacccatcaacaaccgctatgtatttcgtacattactgccagccaccatgaatattgtacggtaccataaatacttgaccacctgtagtacataaaaacccaatccacatcaaaaccccctccccatgcttacaagcaagtacagcaatcaaccctcaactatcacacatcaactgcaactccaaagccacccctcacccactaggataccaacaaacctacccacccttaacagtacatagtacataaagccatttaccgtacatagcacattacagtcaaatcccttctcgtccccatggatgacccccctcagataggggtcccttgaccaccatcctccgtgaaatcaatatcccgcacaagagtgctactctcctcgctccgggcccataacacttgggggtagctaaagtgaactgtatccgacatctggttcctacttcagggccataaagcctaaatagcccacacgttccccttaaataagacatcacgatg

SEQ ID NO: 33 - DNA, 16569 bp, Homo sapiens mitochondrial
  3107: "n" refers to a nucleotide at position 3107 of the Cambridge Reference Sequence (CRS, Anderson et al. 1981 Nature 290:457-465), later determined to be absent from the human mtDNA sequence according to the revised CRS (rCRS, Andrews et al. 1999 Nature Genetics 23:147); "n" therefore represents a single nucleotide deletion at a position corresponding to nucleotide 3107 of SEQ ID NO:1 as provided herein.
gatcacaggtctatcaccctattaaccactcacgggagctctccatgcatttggtattttcgtctggggggtatgcacgcgatagcattgcgagacgctggagccggagcaccctatgtcgcagtatctgtctttgattcctgcctcatcctattatttatcgcacctacgttcaatattacaggcgaacatacttactaaagcgtgttaattaattaatgcttgtaggacataataataacaattgaatgtctgcacagccgctttccacacagacatcataacaaaaaatttccaccaaaccccccctccccccattctggccacagcacttaaacacatctctgccaaaccccaaaaacaaagaaccctaacaccagcctaaccagatttcaaattttatcttttggcggtatgcacttttaacagtcaccccccaactaacacattatttttccctcccactcccatactactaatctcatcaatacaacccccggccatcctacccagcacacacacaccgctgctaaccccataccccgaaccaaccaaaccccaaagacaccccccacagtttatgtagcttacctcctcaaagcaatacactgaaaatgtttagacgggctcacatcaccccataaacaaataggtttggtcctagcctttctattagctcttagtaagattacacatgcaagcatccccgttccagtgagttcaccctctaaatcaccacgatcaaaagggacaagcatcaagcacgcagcaatgcagctcaaaacgcttagcctagccacacccccacgggaaacagcagtgattaacctttagcaataaacgaaagtttaactaagctatactaaccccagggttggtcaatttcgtgccagccaccgcggtcacacgattaacccaagtcaatagaagccggcgtaaagagtgttttagatcaccccctccccaataaagctaaaactcacctgagttgtaaaaaactccagttgacacaaaatagactacgaaagtggctttaacatatctgaacacacaatagctaagacccaaactgggattagataccccactatgcttagccctaaacctcaacagttaaatcaacaaaactgctcgccagaacactacgagccacagcttaaaactcaaaggacctggcggtgcttcatatccctctagaggagcctgttctgtaatcgataaaccccgatcaacctcaccacctcttgctcagcctatataccgccatcttcagcaaaccctgatgaaggctacaaagtaagcgcaagtacccacgtaaagacgttaggtcaaggtgtagcccatgaggtggcaagaaatgggctacattttctaccccagaaaactacgatagcccttatgaaacttaagggtcgaaggtggatttagcagtaaactgagagtagagtgcttagttgaacagggccctgaagcgcgtacacaccgcccgtcaccctcctcaagtatacttcaaaggacatttaactaaaacccctacgcatttatatagaggagacaagtcgtaacatggtaagtgtactggaaagtgcacttggacgaaccagagtgtagcttaacacaaagcacccaacttacacttaggagatttcaacttaacttgaccgctctgagctaaacctagccccaaacccactccaccttactaccagacaaccttagccaaaccatttacccaaataaagtataggcgatagaaattgaaacctggcgcaatagatatagtaccgcaagggaaagatgaaaaattataaccaagcataatatagcaaggactaacccctataccttctgcataatgaattaactagaaataactttgcaaggagagccaaagctaagacccccgaaaccagacgagctacctaagaacagctaaaagagcacacccgtctatgtagcaaaatagtgggaagatttataggtagaggcgacaaacctaccgagcctggtgatagctggttgtccaagatagaatcttagttcaactttaaatttgcccacagaaccctctaaatccccttgtaaatttaactgttagtccaaagaggaacagctctttggacactaggaaaaaaccttgtagagagagtaaaaaatttaacacccatagtaggcctaaaagcagccaccaattaagaaagcgttcaagctcaacacccactacctaaaaaatcccaaacatataactgaactcctcacacccaattggaccaatctatcaccctatagaagaactaatgttagtataagtaacatgaaaacattctcctccgcataagcctgcgtcagattaaaacactgaactgacaattaacagcccaatatctacaatcaaccaacaagtcattattaccctcactgtcaacccaacacaggcatgctcataaggaaaggttaaaaaaagtaaaaggaactcggcaaatcttaccccgcctgtttaccaaaaacatcacctctagcatcaccagtattagaggcaccgcctgcccagtgacacatgtttaacggccgcggtaccctaaccgtgcaaaggtagcataatcacttgttccttaaatagggacctgtatgaatggctccacgagggttcagctgtctcttacttttaaccagtgaaattgacctgcccgtgaagaggcgggcataacacagcaagacgagaagaccctatggagctttaatttattaatgcaaacagtacctaacaaacccacaggtcctaaactaccaaacctgcattaaaaatttcggttggggcgacctcggagcagaacccaacctccgagcagtacatgctaagacttcaccagtcaaagcgaactactatactcaattgatccaataacttgaccaacggaacaagttaccctagggataacagcgcaatcctattctagagtccatatcaacaatagggtttacgacctcgatgttggatcaggacatcccgatggtgcagccgctattaaaggttcgtttgttcaacgattaaagtcctacgtgatctgagttcagaccggagtaatccaggtcggtttctatctacnttcaaattcctccctgtacgaaaggacaagagaaataaggcctacttcacaaagcgccttcccccgtaaatgatatcatctcaacttagtattatacccacacccacccaagaacagggtttgttaagatggcagagcccggtaatcgcataaaacttaaaactttacagtcagaggttcaattcctcttcttaacaacatacccatggccaacctcctactcctcattgtacccattctaatcgcaatggcattcctaatgcttaccgaacgaaaaattctaggctatatacaactacgcaaaggccccaacgttgtaggcccctacgggctactacaacccttcgctgacgccataaaactcttcaccaaagagcccctaaaacccgccacatctaccatcaccctctacatcaccgccccgaccttagctctcaccatcgctcttctactatgaacccccctccccatacccaaccccctggtcaacctcaacctaggcctcctatttattctagccacctctagcctagccgtttactcaatcctctgatcagggtgagcatcaaactcaaactacgccctgatcggcgcactgcgagcagtagcccaaacaatctcatatgaagtcaccctagccatcattctactatcaacattactaataagtggctcctttaacctctccacccttatcacaacacaagaacacctctgattactcctgccatcatgacccttggccataatatgatttatctccacactagcagagaccaaccgaacccccttcgaccttgccgaaggggagtccgaactagtctcaggcttcaacatcgaatacgccgcaggccccttcgccctattcttcatagccgaatacacaaacattattataataaacaccctcaccactacaatcttcctaggaacaacatatgacgcactctcccctgaactctacacaacatattttgtcaccaagaccctacttctaacctccctgttcttatgaattcgaacagcatacccccgattccgctacgaccaactcatacacctcctatgaaaaaacttcctaccactcaccctagcattacttatatgatatgtctccatacccattacaatctccagcattccccctcaaacctaagaaatatgtctgataaaagagttactttgatagagtaaataataggagcttaaacccccttatttctaggactatgagaatcgaacccatccctgagaatccaaaattctccgtgccacctatcacaccccatcctaaagtaaggtcagctaaataagctatcgggcccataccccgaaaatgttggttatacccttcccgtactaattaatcccctggcccaacccgtcatctactctaccatctttgcaggcacactcatcacagcgctaagctcgcactgattttttacctgagtaggcctagaaataaacatgctagcttttattccagttctaaccaaaaaaataaaccctcgttccacagaagctgccatcaagtatttcctcacgcaagcaaccgcatccataatccttctaatagctatcctcttcaacaatatactctccggacaatgaaccataaccaatactaccaatcaatactcatcattaataatcataatggctatagcaataaaactaggaatagccccctttcacttctgagtcccagaggttacccaaggcacccctctgacatccggcctgcttcttctcacatgacaaaaactagcccccatctcaatcatataccaaatctctccctcactaaacgtaagccttctcctcactctctcaatcttatccatcatagcaggcagttgaggtggattaaaccaaacccagctacgcaaaatcttagcatactcctcaattacccacataggatgaataatagcagttctaccgtacaaccctaacataaccattcttaatttaactatttatattatcctaactactaccgcattcctactactcaacttaaactccagcaccacgaccctactactatctcgcacctgaaacaagctaacatgactaacacccttaattccatccaccctcctctccctaggaggcctgcccccgctaaccggctttttgcccaaatgggccattatcgaagaattcacaaaaaacaatagcctcatcatccccaccatcatagccaccatcaccctccttaacctctacttctacctacgcctaatctactccacctcaatcacactactccccatatctaacaacgtaaaaataaaatgacagtttgaacatacaaaacccaccccattcctccccacactcatcgcccttaccacgctactcctacctatctccccttttatactaataatcttatagaaatttaggttaaatacagaccaagagccttcaaagccctcagtaagttgcaatacttaatttctgtaacagctaaggactgcaaaaccccactctgcatcaactgaacgcaaatcagccactttaattaagctaagcccttactagaccaatgggacttaaacccacaaacacttagttaacagctaagcaccctaatcaactggcttcaatctacttctcccgccgccgggaaaaaaggcgggagaagccccggcaggtttgaagctgcttcttcgaatttgcaattcaatatgaaaatcacctcggagctggtaaaaagaggcctaacccctgtctttagatttacagtccaatgcttcactcagccattttacctcacccccactgatgttcgccgaccgttgactattctctacaaaccacaaagacattggaacactatacctattattcggcgcatgagctggagtcctaggcacagctctaagcctccttattcgagccgagctgggccagccaggcaaccttctaggtaacgaccacatctacaacgttatcgtcacagcccatgcatttgtaataatcttcttcatagtaatacccatcataatcggaggctttggcaactgactagttcccctaataatcggtgcccccgatatggcgtttccccgcataaacaacataagcttctgactcttacctccctctctcctactcctgctcgcatctgctatagtggaggccggagcaggaacaggttgaacagtctaccctcccttagcagggaactactcccaccctggagcctccgtagacctaaccatcttctccttacacctagcaggtgtctcctctatcttaggggccatcaatttcatcacaacaattatcaatataaaaccccctgccataacccaataccaaacgcccctcttcgtctgatccgtcctaatcacagcagtcctacttctcctatctctcccagtcctagctgctggcatcactatactactaacagaccgcaacctcaacaccaccttcttcgaccccgccggaggaggagaccccattctataccaacacctattctgatttttcggtcaccctgaagtttatattcttatcctaccaggcttcggaataatctcccatattgtaacttactactccggaaaaaaagaaccatttggatacataggtatggtctgagctatgatatcaattggcttcctagggtttatcgtgtgagcacaccatatatttacagtaggaatagacgtagacacacgagcatatttcacctccgctaccataatcatcgctatccccaccggcgtcaaagtatttagctgactcgccacactccacggaagcaatatgaaatgatctgctgcagtgctctgagccctaggattcatctttcttttcaccgtaggtggcctgactggcattgtattagcaaactcatcactagacatcgtactacacgacacgtactacgttgtagcccacttccactatgtcctatcaataggagctgtatttgccatcataggaggcttcattcactgatttcccctattctcaggctacaccctagaccaaacctacgccaaaatccatttcactatcatattcatcggcgtaaatctaactttcttcccacaacactttctcggcctatccggaatgccccgacgttactcggactaccccgatgcatacaccacatgaaacatcctatcatctgtaggctcattcatttctctaacagcagtaatattaataattttcatgatttgagaagccttcgcttcgaagcgaaaagtcctaatagtagaagaaccctccataaacctggagtgactatatggatgccccccaccctaccacacattcgaagaacccgtatacataaaatctagacaaaaaaggaaggaatcgaaccccccaaagctggtttcaagccaaccccatggcctccatgactttttcaaaaaggtattagaaaaaccatttcataactttgtcaaagttaaattataggctaaatcctatatatcttaatggcacatgcagcgcaagtaggtctacaagacgctacttcccctatcatagaagagcttatcacctttcatgatcacgccctcataatcattttccttatctgcttcctagtcctgtatgcccttttcctaacactcacaacaaaactaactaatactaacatctcagacgctcaggaaatagaaaccgtctgaactatcctgcccgccatcatcctagtcctcatcgccctcccatccctacgcatcctttacataacagacgaggtcaacgatccctcccttaccatcaaatcaattggccaccaatggtactgaacctacgagtacaccgactacggcggactaatcttcaactcctacatacttcccccattattcctagaaccaggcgacctgcgactccttgacgtcgacaatcgagtagtactcccgattgaagcccccattcgtataataattacatcacaagacgtcttgcactcatgagctgtccccacattaggcttaaaaacagatgcaattcccggacgtctaaaccaaaccactttcaccgctacacgaccgggggtatactacggtcaatgctctgaaatctgtggagcaaaccacagtttcatgcccatcgtcctagaattaattcccctaaaaatctttgaaatagggcccgtatttaccctatagcaccccctctaccccctctagagcccactgtaaagctaacttagcattaaccttttaagttaaagattaagagaaccaacacctctttacagtgaaatgccccaactaaatactaccgtatggcccaccataattacccccatactccttacactattcctcatcacccaactaaaaatattaaacacaaactaccacctacctccctcaccaaagcccataaaaataaaaaattataacaaaccctgagaaccaaaatgaacgaaaatctgttcgcttcattcattgcccccacaatcctaggcctacccgccgcagtactgatcattctatttccccctctattgatccccacctccaaatatctcatcaacaaccgactaatcaccacccaacaatgactaatcaaactaacctcaaaacaaatgataaccatacacaacactaaaggacgaacctgatctcttatactagtatccttaatcatttttattgccacaactaacctcctcggactcctgcctcactcatttacaccaaccacccaactatctataaacctagccatggccatccccttatgagcgggcgcagtgattataggctttcgctctaagattaaaaatgccctagcccacttcttaccacaaggcacacctacaccccttatccccatactagttattatcgaaaccatcagcctactcattcaaccaatagccctggccgtacgcctaaccgctaacattactgcaggccacctactcatgcacctaattggaagcgccaccctagcaatatcaaccattaaccttccctctacacttatcatcttcacaattctaattctactgactatcctagaaatcgctgtcgccttaatccaagcctacgttttcacacttctagtaagcctctacctgcacgacaacacataatgacccaccaatcacatgcctatcatatagtaaaacccagcccatgacccctaacaggggccctctcagccctcctaatgacctccggcctagccatgtgatttcacttccactccataacgctcctcatactaggcctactaaccaacacactaaccatataccaatgatggcgcgatgtaacacgagaaagcacataccaaggccaccacacaccacctgtccaaaaaggccttcgatacgggataatcctatttattacctcagaagtttttttcttcgcaggatttttctgagccttttaccactccagcctagcccctaccccccaattaggagggcactggcccccaacaggcatcaccccgctaaatcccctagaagtcccactcctaaacacatccgtattactcgcatcaggagtatcaatcacctgagctcaccatagtctaatagaaaacaaccgaaaccaaataattcaagcactgcttattacaattttactgggtctctattttaccctcctacaagcctcagagtacttcgagtctcccttcaccatttccgacggcatctacggctcaacattttttgtagccacaggcttccacggacttcacgtcattattggctcaactttcctcactatctgcttcatccgccaactaatatttcactttacatccaaacatcactttggcttcgaagccgccgcctgatactggcattttgtagatgtggtttgactatttctgtatgtctccatctattgatgagggtcttactcttttagtataaatagtaccgttaacttccaattaactagttttgacaacattcaaaaaagagtaataaacttcgccttaattttaataatcaacaccctcctagccttactactaataattattacattttgactaccacaactcaacggctacatagaaaaatccaccccttacgagtgcggcttcgaccctatatcccccgcccgcgtccctttctccataaaattcttcttagtagctattaccttcttattatttgatctagaaattgccctccttttacccctaccatgagccctacaaacaactaacctgccactaatagttatgtcatccctcttattaatcatcatcctagccctaagtctggcctatgagtgactacaaaaaggattagactgaaccgaattggtatatagtttaaacaaaacgaatgatttcgactcattaaattatgataatcatatttaccaaatgcccctcatttacataaatattatactagcatttaccatctcacttctaggaatactagtatatcgctcacacctcatatcctccctactatgcctagaaggaataatactatcgctgttcattatagctactctcataaccctcaacacccactccctcttagccaatattgtgcctattgccatactagtctttgccgcctgcgaagcagcggtgggcctagccctactagtctcaatctccaacacatatggcctagactacgtacataacctaaacctactccaatgctaaaactaatcgtcccaacaattatattactaccactgacatgactttccaaaaaacacataatttgaatcaacacaaccacccacagcctaattattagcatcatccctctactattttttaaccaaatcaacaacaacctatttagctgttccccaaccttttcctccgaccccctaacaacccccctcctaatactaactacctgactcctacccctcacaatcatggcaagccaacgccacttatccagtgaaccactatcacgaaaaaaactctacctctctatactaatctccctacaaatctccttaattataacattcacagccacagaactaatcatattttatatcttcttcgaaaccacacttatccccaccttggctatcatcacccgatgaggcaaccagccagaacgcctgaacgcaggcacatacttcctattctacaccctagtaggctcccttcccctactcatcgcactaatttacactcacaacaccctaggctcactaaacattctgctactcactctcactgcccaagaactatcaaactcctgagccaacaacttaatatgactagcttacacaatagcttttatagtaaagatacctctttacggactccacttatgactccctaaagcccatgtcgaagcccccatcgctgggtcaatagtacttgccgcagtactcttaaaactaggcggctatggtataatacgcctcacactcattctcaaccccctgacaaaacacatagcctaccccttccttgtactatccctatgaggcataattataacaagctccatctgcctacgacaaacagacctaaaatcgctcattgcatactcttcaatcagccacatagccctcgtagtaacagccattctcatccaaaccccctgaagcttcaccggcgcagtcattctcataatcgcccacgggcttacatcctcattactattctgcctagcaaactcaaactacgaacgcactcacagtcgcatcataatcctctctcaaggacttcaaactctactcccactaatagctttttgatgacttctagcaagcctcgctaacctcgccttaccccccactattaacctactgggagaactctctgtgctagtaaccacgttctcctgatcaaatatcactctcctacttacaggactcaacatactagtcacagccctatactccctctacatatttaccacaacacaatggggctcactcacccaccacattaacaacataaaaccctcattcacacgagaaaacaccctcatgttcatacacctatcccccattctcctcctatccctcaaccccgacatcattaccgggttttcctcttgtaaatatagtttaaccaaaacatcagattgtgaatctgacaacagaggcttacgaccccttatttaccgagaaagctcacaagaactgctaactcatgcccccatgtctaacaacatggctttctcaacttttaaaggataacagctatccattggtcttaggccccaaaaattttggtgcaactccaaataaaagtaataaccatgcacactactataaccaccctaaccctgacttccctaattccccccatccttaccaccctcgttaaccctaacaaaaaaaactcatacccccattatgtaaaatccattgtcgcatccacctttattatcagtctcttccccacaacaatattcatgtgcctagaccaagaagttattatctcgaactgacactgagccacaacccaaacaacccagctctccctaagcttcaaactagactacttctccataatattcatccctgtagcattgttcgttacatggtccatcatagaattctcactgtgatatataaactcagacccaaacattaatcagttcttcaaatatctactcatcttcctaattaccatactaatcttagttaccgctaacaacctattccaactgttcatcggctgagagggcgtaggaattatatccttcttgctcatcagttgatgatacgcccgagcagatgccaacacagcagccattcaagcaatcctatacaaccgtatcggcgatatcggtttcatcctcgccttagcatgatttatcctacactccaactcatgagacccacaacaaatagcccttctaaacgctaatccaagcctcaccccactactaggcctcctcctagcagcagcaggcaaatcagcccaattaggtctccacccctgactcccctcagccatagaaggccccaccccagtctcagccctactccactcaagcactatagttgtagcaggaatcttcttactcatccgcttccaccccctagcagaaaatagcccactaatccaaactctaacactatgcttaggcgctatcaccactctgttcgcagcagtctgcgcccttacacaaaatgacatcaaaaaaatcgtagccttctccacttcaagtcaactaggactcataatagttacaatcggcatcaaccaaccacacctagcattcctgcacatctgtacccacgccttcttcaaagccatactatttatgtgctccgggtccatcatccacaaccttaacaatgaacaagatattcgaaaaataggaggactactcaaaaccatacctctcacttcaacctccctcaccattggcagcctagcattagcaggaatacctttcctcacaggtttctactccaaagaccacatcatcgaaaccgcaaacatatcatacacaaacgcctgagccctatctattactctcatcgctacctccctgacaagcgcctatagcactcgaataattcttctcaccctaacaggtcaacctcgcttccccacccttactaacattaacgaaaataaccccaccctactaaaccccattaaacgcctggcagccggaagcctattcgcaggatttctcattactaacaacatttcccccgcatcccccttccaaacaacaatccccctctacctaaaactcacagccctcgctgtcactttcctaggacttctaacagccctagacctcaactacctaaccaacaaacttaaaataaaatccccactatgcacattttatttctccaacatactcggattctaccctagcatcacacaccgcacaatcccctatctaggccttcttacgagccaaaacctgcccctactcctcctagacctaacctgactagaaaagctattacctaaaacaatttcacagcaccaaatctccacctccatcatcacctcaacccaaaaaggcataattaaactttacttcctctctttcttcttcccactcatcctaaccctactcctaatcacataacctattcccccgagcaatctcaattacaatatatacaccaacaaacaatgttcaaccagtaactactactaatcaacgcccataatcatacaaagcccccgcaccaataggatcctcccgaatcaaccctgacccctctccttcataaattattcagcttcctacactattaaagtttaccacaaccaccaccccatcatactctttcacccacagcaccaatcctacctccatcgctaaccccactaaaacactcaccaagacctcaacccctgacccccatgcctcaggatactcctcaatagccatcgctgtagtatatccaaagacaaccatcattccccctaaataaattaaaaaaactattaaacccatataacctcccccaaaattcagaataataacacacccgaccacaccgctaacaatcaatactaaacccccataaataggagaaggcttagaagaaaaccccacaaaccccattactaaacccacactcaacagaaacaaagcatacatcattattctcgcacggactacaaccacgaccaatgatatgaaaaaccatcgttgtatttcaactacaagaacaccaatgaccccaatacgcaaaactaaccccctaataaaattaattaaccactcattcatcgacctccccaccccatccaacatctccgcatgatgaaacttcggctcactccttggcgcctgcctgatcctccaaatcaccacaggactattcctagccatgcactactcaccagacgcctcaaccgccttttcatcaatcgcccacatcactcgagacgtaaattatggctgaatcatccgctaccttcacgccaatggcgcctcaatattctttatctgcctcttcctacacatcgggcgaggcctatattacggatcatttctctactcagaaacctgaaacatcggcattatcctcctgcttgcaactatagcaacagccttcataggctatgtcctcccgtgaggccaaatatcattctgaggggccacagtaattacaaacttactatccgccatcccatacattgggacagacctagttcaatgaatctgaggaggctactcagtagacagtcccaccctcacacgattctttacctttcacttcatcttgcccttcattattgcagccctagcagcactccacctcctattcttgcacgaaacgggatcaaacaaccccctaggaatcacctcccattccgataaaatcaccttccacccttactacacaatcaaagacgccctcggcttacttctcttccttctctccttaatgacattaacactattctcaccagacctcctaggcgacccagacaattataccctagccaaccccttaaacacccctccccacatcaagcccgaatgatatttcctattcgcctacacaattctccgatccgtccctaacaaactaggaggcgtccttgccctattactatccatcctcatcctagcaataatccccatcctccatatatccaaacaacaaagcataatatttcgcccactaagccaatcactttattgactcctagccgcagacctcctcattctaacctgaatcggaggacaaccagtaagctacccttttaccatcattggacaagtagcatccgtactatacttcacaacaatcctaatcctaataccaactatctccctaattgaaaacaaaatactcaaatgggcctgtccttgtagtataaactaatacaccagtcttgtaaaccggagatgaaaacctttttccaaggacaaatcagagaaaaagtctttaactccaccattagcacccaaagctaagattctaatttaaactattctctgttctttcatggggaagcagatttgggtaccacccaagtattgactcacccatcaacaaccgctatgtatttcgtacattactgccagccaccatgaatattgtacggtaccataaatacttgaccacctgtagtacataaaaacccaatccacatcaaaaccccctccccatgcttacaagcaagtacagcaatcaaccctcaactatcacacatcaactgcaactccaaagccacccctcacccactaggataccaacaaacctacccacccttaacagcacatagtacataaagccatttaccgtacatagcacattacagtcaaatcccttctcgtccccatggatgacccccctcagataggggtcccttgaccaccatcctccgtgaaatcaatatcccgcacaagagtgctactctcctcgctccgggcccataacacttgggggtagctaaagtgaactgtatccgacatctggttcctacttcagggtcataaagcctaaatagcccacacgttccccttaaataagacatcacgatg

SEQ ID NO: 34 - DNA, 16571 bp, Homo sapiens mitochondrial
  3109: "n" refers to a nucleotide at position 3107 of the Cambridge Reference Sequence (CRS, Anderson et al. 1981 Nature 290:457-465), later determined to be absent from the human mtDNA sequence according to the revised CRS (rCRS, Andrews et al. 1999 Nature Genetics 23:147); "n" therefore represents a single nucleotide deletion at a position corresponding to nucleotide 3107 of SEQ ID NO:1 as provided herein.
gatcacaggtctatcaccctattaaccactcacgggagctctccatgcatttggtattttcgtctggggggtatgcacgcgatagcattgcgagacgctggagccggagcaccctatgtcgcagtatctgtctttgattcctgcctcatcctattatttatcgcacctacgttcaatattacaggcgaacatacttactaaagtgtgttaattaattaatgcttgtaggacataataacaacaattgaatgtctgcacagccgctttccacacagacatcataacaaaaaatttccaccaaaccccccctcccccccgcttctggccacagcacttaaacacatctctgccaaaccccaaaaacaaagaaccctaacaccagcctaaccagatttcaaattttatcttttggcggtatgcacttttaacagtcaccccccaactaacacattattttcccctcccactcccatactactaatctcatcaatacaacccccgcccatcctacccagcacacacacaccgctgctaaccccataccccgaaccaaccaaaccccaaagacaccccccacagtttatgtagcttacctcctcaaagcaatacactgaaaatgtttagacgggctcacatcaccccataaacaaataggtttggtcctagcctttctattagctcttagtaagattacacatgcaagcatccccgttccagtgagttcaccctctaaatcaccacgatcaaaagggacaagcatcaagcacgcagcaatgcagctcaaaacgcttagcctagccacacccccacgggaaacagcagtgattaacctttagcaataaacgaaagtttaactaagctatactaaccccagggttggtcaatttcgtgccagccaccgcggtcacacgattaacccaagtcaatagaagccggcgtaaagagtgttttagatcaccccctccccaataaagctaaaactcacctgagttgtaaaaaactccagttgacacaaaatagactacgaaagtggctttaacatatctgaacacacaatagctaagacccaaactgggattagataccccactatgcttagccctaaacctcaacagttaaatcaacaaaactgctcgccagaacactacgagccacagcttaaaactcaaaggacctggcggtgcttcatatccctctagaggagcctgttctgtaatcgataaaccccgatcaacctcaccacctcttgctcagcctatataccgccatcttcagcaaaccctgatgaaggctacaaagtaagcgcaagtacccacgtaaagacgttaggtcaaggtgtagcccatgaggtggcaagaaatgggctacattttctaccccagaaaactacgatagcccttatgaaacttaagggtcgaaggtggatttagcagtaaactgagagtagagtgcttagttgaacagggccctgaagcgcgtacacaccgcccgtcaccctcctcaagtatacttcaaaggacatttaactaaaacccctacgcatttatatagaggagacaagtcgtaacatggtaagtgtactggaaagtgcacttggacgaaccagagtgtagcttaacacaaagcacccaacttacacttaggagatttcaacttaacttgaccgctctgagctaaacctagccccaaacccactccaccttactaccagacaaccttagccaaaccatttacccaaataaagtataggcgatagaaattgaaacctggcgcaatagatatagtaccgcaagggaaagatgaaaaattataaccaagcataatatagcaaggactaacccctataccttctgcataatgaattaactagaaataactttgcaaggagagccaaagctaagacccccgaaaccagacgagctacctaagaacagctaaaagagcacacccgtctatgtagcaaaatagtgggaagatttataggtagaggcgacaaacctaccgagcctggtgatagctggttgtccaagatagaatcttagttcaactttaaatttgcccacagaaccctctaaatccccttgtaaatttaactgttagtccaaagaggaacagctctttggacactaggaaaaaaccttgtagagagagtaaaaaatttaacacccatagtaggcctaaaagcagccaccaattaagaaagcgttcaagctcaacacccactacctaaaaaatcccaaacatataactgaactcctcacacccaattggaccaatctatcaccctatagaagaactaatgttagtataagtaacatgaaaacattctcctccgcataagcctgcgtcagattaaaacactgaactgacaattaacagcccaatatctacaatcaaccaacaagtcattattaccctcactgtcaacccaacacaggcatgctcataaggaaaggttaaaaaaagtaaaaggaactcggcaaatcttaccccgcctgtttaccaaaaacatcacctctagcatcaccagtattagaggcaccgcctgcccagtgacacatgtttaacggccgcggtaccctaaccgtgcaaaggtagcataatcacttgttccttaaatagggacctgtatgaatggctccacgagggttcagctgtctcttacttttaaccagtgaaattgacctgcccgtgaagaggcgggcataacacagcaagacgagaagaccctatggagctttaatttattaatgcaaacagtacctaacaaacccacaggtcctaaactaccaaacctgcattaaaaatttcggttggggcgacctcggagcagaacccaacctccgagcagtacatgctaagacttcaccagtcaaagcgaactactatactcaattgatccaataacttgaccaacggaacaagttaccctagggataacagcgcaatcctattctagagtccatatcaacaatagggtttacgacctcgatgttggatcaggacatcccgatggtgcagccgctattaaaggttcgtttgttcaacgattaaagtcctacgtgatctgagttcagaccggagtaatccaggtcggtttctatctacnttcaaattcctccctgtacgaaaggacaagagaaataaggcctacttcacaaagcgccttcccccgtaaatgatatcatctcaacttagtattatacccacacccacccaagaacagggtttgttaagatggcagagcccggtaatcgcataaaacttaaaactttacagtcagaggttcaattcctcttcttaacaacatacccatggccaacctcctactcctcattgtacccattctaatcgcaatggcattcctaatgcttaccgaacgaaaaattctaggctatatacaactacgcaaaggccccaacgttgtaggcccctacgggctactacaacccttcgctgacgccataaaactcttcaccaaagagcccctaaaacccgccacatctaccatcaccctctacatcaccgccccgaccttagctctcaccatcgctcttctactatgaacccccctccccatacccaaccccctggtcaacctcaacctaggcctcctatttattctagccacctctagcctagccgtttactcaatcctctgatcagggtgagcatcaaactcaaactacgccctgatcggcgcactgcgagcagtagcccaaacaatctcatatgaagtcaccctagccatcattctactatcaacattactaataagtggctcctttaacctctccacccttatcacaacacaagaacacctctgattactcctgccatcatgacccttggccataatatgatttatctccacactagcagagaccaaccgaacccccttcgaccttgccgaaggggagtccgaactagtctcaggcttcaacatcgaatacgccgcaggccccttcgccctattcttcatagccgaatacacaaacattattataataaacaccctcaccactacaatcttcctaggaacaacatatgacgcactctcccctgaactctacacaacatattttgtcaccaagaccctacttctaacctccctgttcttatgaattcgaacagcatacccccgattccgctacgaccaactcatacacctcctatgaaaaaacttcctaccactcaccctagcattacttatatgatatgtctccatacccattacaatctccagcattccccctcaaacctaagaaatatgtctgataaaagagttactttgatagagtaaataataggagcttaaacccccttatttctaggactatgagaatcgaacccatccctgagaatccaaaattctccgtgccacctatcacaccccatcctaaagtaaggtcagctaaataagctatcgggcccataccccgaaaatgttggttatacccttcccgtactaattaatcccctggcccaacccgtcatctactctaccatctttgcaggcacactcatcacagcgctaagctcgcactgattttttacctgagtaggcctagaaataaacatgctagcttttattccagttctaaccaaaaaaataaaccctcgttccacagaagctgccatcaagtatttcctcacgcaagcaaccgcatccataatccttctaatagctatcctcttcaacaatatactctccggacaatgaaccataaccaatactaccaatcaatactcatcattaataatcataatggctatagcaataaaactaggaatagccccctttcacttctgagtcccagaggttacccaaggcacccctctgacatccggcctgcttcttctcacatgacaaaaactagcccccatctcaatcatataccaaatctctccctcactaaacgtaagccttctcctcactctctcaatcttatccatcatagcaggcagttgaggtggattaaaccaaacccagctacgcaaaatcttagcatactcctcaattacccacataggatgaataatagcagttctaccgtacaaccctaacataaccattcttaatttaactatttatattatcctaactactaccgcattcctactactcaacttaaactccagcaccacgaccctactactatctcgcacctgaaacaagctaacatgactaacacccttaattccatccaccctcctctccctaggaggcctgcccccgctaaccggctttttgcccaaatgggccattatcgaagaattcacaaaaaacaatagcctcatcatccccaccatcatagccaccatcaccctccttaacctctacttctacctacgcctaatctactccacctcaatcacactactccccatatctaacaacgtaaaaataaaatgacagtttgaacatacaaaacccaccccattcctccccacactcatcgcccttaccacgctactcctacctatctccccttttatactaataatcttatagaaatttaggttaaatacagaccaagagccttcaaagccctcagtaagttgcaatacttaatttctgtaacagctaaggactgcaaaaccccactctgcatcaactgaacgcaaatcagccactttaattaagctaagcccttactagaccaatgggacttaaacccacaaacacttagttaacagctaagcaccctaatcaactggcttcaatctacttctcccgccgccgggaaaaaaggcgggagaagccccggcaggtttgaagctgcttcttcgaatttgcaattcaatatgaaaatcacctcggagctggtaaaaagaggcctaacccctgtctttagatttacagtccaatgcttcactcagccattttacctcacccccactgatgttcgccgaccgttgactattctctacaaaccacaaagacattggaacactatacctattattcggcgcatgagctggagtcctaggcacagctctaagcctccttattcgagccgagctgggccagccaggcaaccttctaggtaacgaccacatctacaacgttatcgtcacagcccatgcatttgtaataatcttcttcatagtaatacccatcataatcggaggctttggcaactgactagttcccctaataatcggtgcccccgatatggcgtttccccgcataaacaacataagcttctgactcttacctccctctctcctactcctgctcgcatctgctatagtggaggccggagcaggaacaggttgaacagtctaccctcccttagcagggaactactcccaccctggagcctccgtagacctaaccatcttctccttacacctagcaggtgtctcctctatcttaggggccatcaatttcatcacaacaattatcaatataaaaccccctgccataacccaataccaaacgcccctcttcgtctgatccgtcctaatcacagcagtcctacttctcctatctctcccagtcctagctgctggcatcactatactactaacagaccgcaacctcaacaccaccttcttcgaccccgccggaggaggagaccccattctataccaacacctattctgatttttcggtcaccctgaagtttatattcttatcctaccaggcttcggaataatctcccatattgtaacttactactccggaaaaaaagaaccatttggatacataggtatggtctgagctatgatatcaattggcttcctagggtttatcgtgtgagcacaccatatatttacagtaggaatagacgtagacacacgagcatatttcacctccgctaccataatcatcgctatccccaccggcgtcaaagtatttagttgactcgccacactccacggaagcaatatgaaatgatctgctgcagtgctctgagccctaggattcatctttcttttcaccgtaggtggcctgactggcattgtattagcaaactcatcactagacatcgtactacacgacacgtactacgttgtagcccacttccactatgtcctatcaataggagctgtatttgccatcataggaggcttcattcactgatttcccctattctcaggctacaccctagaccaaacctacgccaaaatccatttcactatcatattcatcggcgtaaatctaactttcttcccacaacactttctcggcctatccggaatgccccgacgttactcggactaccccgatgcatacaccacatgaaacatcctatcatctgtaggctcattcatttctctaacagcagtaatattaataattttcatgatttgagaagccttcgcttcgaagcgaaaagtcctaatagtagaagaaccctccataaacctggagtgactatatggatgccccccaccctaccacacattcgaagaacccgtatacataaaatctagacaaaaaaggaaggaatcgaaccccccaaagctggtttcaagccaaccccatggcctccatgactttttcaaaaaggtattagaaaaaccatttcataactttgtcaaagttaaattataggctaaatcctatatatcttaatggcacatgcagcgcaagtaggtctacaagacgctacttcccctatcatagaagagcttatcacctttcatgatcacgccctcataatcattttccttatctgcttcctagtcctgtatgcccttttcctaacactcacaacaaaactaactaatactaacatctcagacgctcaggaaatagaaaccgtctgaactatcctgcccgccatcatcctagtcctcatcgccctcccatccctacgcatcctttacataacagacgaggtcaacgatccctcccttaccatcaaatcaattggccaccaatggtactgaacctacgagtacaccgactacggcggactaatcttcaactcctacatacttcccccattattcctagaaccaggcgacctgcgactccttgacgttgacaatcgagtagtactcccgattgaagcccccattcgtataataattacatcacaagacgtcttgcactcatgagctgtccccacattaggcttaaaaacagatgcaattcccggacgtctaaaccaaaccactttcaccgctacacgaccgggggtatactacggtcaatgctctgaaatctgtggagcaaaccacagtttcatgcccatcgtcctagaattaattcccctaaaaatctttgaaatagggcccgtatttaccctatagcaccccctctaccccctctagagcccactgtaaagctaacttagcattaaccttttaagttaaagattaagagaaccaacacctctttacagtgaaatgccccaactaaatactaccgtatggcccaccataattacccccatactccttacactattcctcatcacccaactaaaaatattaaacacaaactaccacctacctccctcaccaaagcccataaaaataaaaaattataacaaaccctgagaaccaaaatgaacgaaaatctgttcgcttcattcattgcccccacaatcctaggcctacccgccgcagtactgatcattctatttccccctctattgatccccacctccaaatatctcatcaacaaccgactaatcaccacccaacaatgactaatcaaactaacctcaaaacaaatgataaccatacacaacactaaaggacgaacctgatctcttatactagtatccttaatcatttttattgccacaactaacctcctcggactcctgcctcactcatttacaccaaccacccaactatctataaacctagccatggccatccccttatgagcgggcgcagtgattataggctttcgctctaagattaaaaatgccctagcccacttcttaccacaaggcacacctacaccccttatccccatactagttattatcgaaaccatcagcctactcattcaaccaatagccctggccgtacgcctaaccgctaacattactgcaggccacctactcatgcacctaattggaagcgccaccctagcaatatcaaccattaaccttccctctacacttatcatcttcacaattctaattctactgactatcctagaaatcgctgtcgccttaatccaagcctacgttttcacacttctagtaagcctctacctgcacgacaacacataatgacccaccaatcacatgcctatcatatagtaaaacccagcccatgacccctaacaggggccctctcagccctcctaatgacctccggcctagccatatgatttcacttccactccataacgctcctcatactaggcctactaaccaacacactaaccatataccaatgatggcgcgatgtaacacgagaaagcacataccaaggccaccacacaccacctgtccaaaaaggccttcgatacgggataatcctatttattacctcagaagtttttttcttcgcaggatttttctgagccttttaccactccagcctagcccctaccccccaattaggagggcactggcccccaacaggcatcaccccgctaaatcccctagaagtcccactcctaaacacatccgtattactcgcatcaggagtatcaatcacctgagctcaccatagtctaatagaaaacaaccgaaaccaaataattcaagcactgcttattacaattttactgggtctctattttaccctcctacaagcctcagagtacttcgagtctcccttcaccatttccgacggcatctacggctcaacattttttgtagccacaggcttccacggacttcacgtcattattggctcaactttcctcactatctgcttcatccgccaactaatatttcactttacatccaaacatcactttggcttcgaagccgccgcctgatactggcattttgtagatgtggtttgactatttctgtatgtctccatctattgatgagggtcttactcttttagtataaatagtaccgttaacttccaattaactagttttgacaacattcaaaaaagagtaataaacttcgccttaattttaataatcaacaccctcctagccttactactaataattattacattttgactaccacaactcaacggctacatagaaaaatccaccccttacgagtgcggcttcgaccctatatcccccgcccgcgtccctttctccataaaattcttcttagtagctattaccttcttattatttgatctagaaattgccctccttttacccctaccatgagccctacaaacaactaacctgccactaatagttatgtcatccctcttattaatcatcatcctagccctaagtctggcctatgagtgactacaaaaaggattagactgaaccgaattggtatatagtttaaacaaaacgaatgatttcgactcattaaattatgataatcatatttaccaaatgcccctcatttacataaatattatactagcatttaccatctcacttctaggaatactagtatatcgctcacacctcatatcctccctactatgcctagaaggaataatactatcgctgttcattatagctactctcataaccctcaacacccactccctcttagccaatattgtgcctattgccatactagtctttgccgcctgcgaagcagcggtgggcctagccctactagtctcaatctccaacacatatggcctagactacgtacataacctaaacctactccaatgctaaaactaatcgtcccaacaattatattactaccactgacatgactttccaaaaaacacataatttgaatcaacacaaccacccacagcctaattattagcatcatccctctactattttttaaccaaatcaacaacaacctatttagctgttccccaaccttttcctccgaccccctaacaacccccctcctaatactaactacctgactcctacccctcacaatcatggcaagccaacgccacttatccagtgaaccactatcacgaaaaaaactctacctctctatactaatctccctacaaatctccttaattataacattcacagccacagaactaatcatattttatatcttcttcgaaaccacacttatccccaccttggctatcatcacccgatgaggcaaccagccagaacgcctgaacgcaggcacatacttcctattctacaccctagtaggctcccttcccctactcatcgcactaatttacactcacaacaccctaggctcactaaacattctactactcactctcactgcccaagaactatcaaactcctgagccaacaacttaatatgactagcttacacaatagcttttatagtaaagatacctctttacggactccacttatgactccctaaagcccatgtcgaagcccccatcgctgggtcaatagtacttgccgcagtactcttaaaactaggcggctatggtataatacgcctcacactcattctcaaccccctgacaaaacacatagcctaccccttccttgtactatccctatgaggcataattataacaagctccatctgcctacgacaaacagacctaaaatcgctcattgcatactcttcaatcagccacatagccctcgtagtaacagccattctcatccaaaccccctgaagcttcaccggcgcagtcattctcataatcgcccacgggcttacatcctcattactattctgcctagcaaactcaaactacgaacgcactcacagtcgcatcataatcctctctcaaggacttcaaactctactcccactaatagctttttgatgacttctagcaagcctcgctaacctcgccttaccccccactattaacctactgggagaactctctgtgctagtaaccacgttctcctgatcaaatatcactctcctacttacaggactcaacatactagtcacagccctatactccctctacatatttaccacaacacaatggggctcactcacccaccacattaacaacataaaaccctcattcacacgagaaaacaccctcatgttcatacacctatcccccattctcctcctatccctcaaccccgacatcattaccgggttttcctcttgtaaatatagtttaaccaaaacatcagattgtgaatctgacaacagaggcttacgaccccttatttaccgagaaagctcacaagaactgctaactcatgcccccatgtctaacaacatggctttctcaacttttaaaggataacagctatccattggtcttaggccccaaaaattttggtgcaactccaaataaaagtaataaccatgcacactactataaccaccctaaccctgacttccctaattccccccatccttaccaccctcgttaaccctaacaaaaaaaactcatacccccattatgtaaaatccattgtcgcatccacctttattatcagtctcttccccacaacaatattcatgtgcctagaccaagaagttattatctcgaactgacactgagccacaacccaaacaacccagctctccctaagcttcaaactagactacttctccataatattcatccctgtagcattgttcgttacatggtccatcatagaattctcactgtgatatataaactcagacccaaacattaatcagttcttcaaatatctactcatcttcctaattaccatactaatcttagttaccgctaacaacctattccaactgttcatcggctgagagggcgtaggaattatatccttcttgctcatcagttgatgatacgcccgagcagatgccaacacagcagccattcaagcaatcctatacaaccgtatcggcgatatcggtttcatcctcgccttagcatgatttatcctacactccaactcatgagacccacaacaaatagcccttctaaacgctaatccaagcctcaccccactactaggcctcctcctagcagcagcaggcaaatcagcccaattaggtctccacccctgactcccctcagccatagaaggccccaccccagtctcagccctactccactcaagcactatagttgtagcaggaatcttcttactcatccgcttccaccccctagcagaaaatagcccactaatccaaactctaacactatgcttaggcgctatcaccactctgttcgcagcagtctgcgcccttacacaaaatgacatcaaaaaaatcgtagccttctccacttcaagtcaactaggactcataatagttacaatcggcatcaaccaaccacacctagcattcctgcacatctgtacccacgccttcttcaaagccatactatttatgtgctccgggtccatcatccacaaccttaacaatgaacaagatattcgaaaaataggaggactactcaaaaccatacctctcacttcaacctccctcaccattggcagcctagcattagcaggaatacctttcctcacaggtttctactccaaagaccacatcatcgaaaccgcaaacatatcatacacaaacgcctgagccctatctattactctcatcgctacctccctgacaagcgcctatagcactcgaataattcttctcaccctaacaggtcaacctcgcttccccacccttactaacattaacgaaaataaccccaccctactaaaccccattaaacgcctggcagccggaagcctattcgcaggatttctcattactaacaacatttcccccgcatcccccttccaaacaacaatccccctctacctaaaactcacagccctcgctgtcactttcctaggacttctaacagccctagacctcaactacctaaccaacaaacttaaaataaaatccccactatgcacattttatttctccaacatactcggattctaccctagcatcacacaccgcacaatcccctatctaggccttcttacgagccaaaacctgcccctactcctcctagacctaacctgactagaaaagctattacctaaaacaatttcacagcaccaaatctccacctccatcatcacctcaacccaaaaaggcataattaaactttacttcctctctttcttcttcccactcatcctaaccctactcctaatcacataacctattcccccgagcaatctcaattacaatatatacaccaacaaacaatgttcaaccagtaactactactaatcaacgcccataatcatacaaagcccccgcaccaataggatcctcccgaatcaaccctgacccctctccttcataaattattcagcttcctacactattaaagtttaccacaaccaccaccccatcatactctttcacccacagcaccaatcctacctccatcgctaaccccactaaaacactcaccaagacctcaacccctgacccccatgcctcaggatactcctcaatagccatcgctgtagtatatccaaagacaaccatcattccccctaaataaattaaaaaaactattaaacccatataacctcccccaaaattcagaataataacacacccgaccacaccgctaacaatcaatactaaacccccataaataggagaaggcttagaagaaaaccccacaaaccccattactaaacccacactcaacagaaacaaagcatacatcattattctcgcacggactacaaccacgaccaatgatatgaaaaaccatcgttgtatttcaactacaagaacaccaatgaccccaatacgcaaaactaaccccctaataaaattaattaaccactcattcatcgacctccccaccccatccaacatctccgcatgatgaaacttcggctcactccttggcgcctgcctgatcctccaaatcaccacaggactattcctagccatgcactactcaccagacgcctcaaccgccttttcatcaatcgcccacatcactcgagacgtaaattatggctgaatcatccgctaccttcacgccaatggcgcctcaatattctttatctgcctcttcctacacatcgggcgaggcctatattacggatcatttctctactcagaaacctgaaacatcggcattatcctcctgcttgcaactatagcaacagccttcataggctatgtcctcccgtgaggccaaatatcattctgaggggccacagtaattacaaacttactatccgccatcccatacattgggacagacctagttcaatgaatctgaggaggctactcagtagacagtcccaccctcacacgattctttacctttcacttcatcttgcccttcattattgcagccctagcagcactccacctcctattcttgcacgaaacgggatcaaacaaccccctaggaatcacctcccattccgataaaatcaccttccacccttactacacaatcaaagacgccctcggcttacttctcttccttctctccttaatgacattaacactattctcaccagacctcctaggcgacccagacaattataccctagccaaccccttaaacacccctccccacatcaagcccgaatgatatttcctattcgcctacacaattctccgatccgtccctaacaaactaggaggcgtccttgccctattactatccatcctcatcctagcaataatccccatcctccatatatccaaacaacaaagcataatatttcgcccactaagccaatcactttattgactcctagccgcagacctcctcattctaacctgaatcggaggacaaccagtaagctacccttttaccatcattggacaagtagcatccgtactatacttcacaacaatcctaatcctaataccaactatctccctaattgaaaacaaaatactcaaatgggcctgtccttgtagtataaactaatacaccagtcttgtaaaccggagatgaaaacctttttccaaggacaaatcagagaaaaagtctttaactccaccattagcacccaaagctaagattctaatttaaactattctctgttctttcatggggaagcagatttgggtaccacccaagtattgactcacccatcaacaaccgctatgtatttcgtacattactgccagccaccatgaatattgtacggtaccataaatacttgaccacctgtagtacataaaaacccaatccacatcaaaaccccctccccatgcttacaagcaagtacagcaatcaaccctcaactatcatacatcaactgcaactccaaagccacccctcacccactaggataccaacaaacctacccacccttaacagtacatagtacataaagccatttaccgtacatagcacattacagtcaaatcccttctcgcccccatggatgacccccctcagataggggtcccttgaccaccatcctccgtgaaatcaatatcccgcacaagagtgctactctcctcgctccgggcccataacacttgggggtagctaaagtgaactgtatccgacatctggttcctacttcagggtcataaagcctaaatagcccacacgttccccttaaataagacatcacgatg

SEQ ID NO: 35 - DNA, 16571 bp, Homo sapiens mitochondrial
  3109: "n" refers to a nucleotide at position 3107 of the Cambridge Reference Sequence (CRS, Anderson et al. 1981 Nature 290:457-465), later determined to be absent from the human mtDNA sequence according to the revised CRS (rCRS, Andrews et al. 1999 Nature Genetics 23:147); "n" therefore represents a single nucleotide deletion at a position corresponding to nucleotide 3107 of SEQ ID NO:1 as provided herein.
gatcacaggtctatcaccctattaaccactcacgggagctctccatgcatttggtattttcgtctggggggtgtgcacgcgatagcattgcgagacgctggagccggagcaccctatgtcgcagtatctgtctttgattcctgcctcatcctattatttatcgcacctacgttcaatattacaggcgaacatacttactaaagtgtgttaattaattaatgcttgtaggacataataataacaattgaatgtctgcacagccgctttccacacagacatcataacaaaaaatttccaccaaaccccccctcccccccgcttctggccacagcacttaaacacatctctgccaaaccccaaaaacaaagaaccctaacaccagcctaaccagatttcaaattttatcttttggcggtatgcacttttaacagtcaccccccaactaacacattattttcccctcccactcccatactactaatctcatcaatacaacccccggccatcctacccagcacacacacaccgctgctaaccccataccccgaaccaaccaaaccccaaagacaccccccacagtttatgtagcttacctcctcaaagcaatacactgaaaatgtttagacgggctcacatcaccccataaacaaataggtttggtcctagcctttctattagctcttagtaagattacacatgcaagcatccccattccagtgagttcaccctctaaatcaccacgatcaaaagggacaagcatcaagcacgcagcaatgcagctcaaaacgcttagcctagccacacccccacgggaaacagcagtgattaacctttagcaataaacgaaagtttaactaagctatactaaccccagggttggtcaatttcgtgccagccaccgcggtcacacgattaacccaagtcaatagaagccggcgtaaagagtgttttagatcaccccctccccaataaagctaaaactcacctgagttgtaaaaaactccagttgacacaaaatagactacgaaagtggctttaacatatctgaacacacaatagctaagacccaaactgggattagataccccactatgcttagccctaaacctcaacagttaaatcaacaaaactgctcgccagaacactacgagccacagcttaaaactcaaaggacctggcggtgcttcatatccctctagaggagcctgttctgtaatcgataaaccccgatcaacctcaccacctcttgctcagcctatataccgccatcttcagcaaaccctgatgaaggctacaaagtaagcgcaagtacccacgtaaagacgttaggtcaaggtgtagcccatgaggtggcaagaaatgggctacattttctaccccagaaaactacgatagcccttatgaaacttaagggtcgaaggtggatttagcagtaaactgagagtagagtgcttagttgaacagggccctgaagcgcgtacacaccgcccgtcaccctcctcaagtatacttcaaaggacatttaactaaaacccctacgcatttatatagaggagacaagtcgtaacatggtaagtgtactggaaagtgcacttggacgaaccagagtgtagcttaacacaaagcacccaacttacacttaggagatttcaacttaacttgaccgctctgagctaaacctagccccaaacccactccaccttactaccagacaaccttagccaaaccatttacccaaataaagtataggcgatagaaattgaaacctggcgcaatagatatagtaccgcaagggaaagatgaaaaattataaccaagcataatatagcaaggactaacccctataccttctgcataatgaattaactagaaataactttgcaaggagaaccaaagctaagacccccgaaaccagacgagctacctaagaacagctaaaagagcacacccgtctatgtagcaaaatagtgggaagatttataggtagaggcgacaaacctaccgagcctggtgatagctggttgtccaagatagaatcttagttcaactttaaatttgcccacagaaccctctaaatccccttgtaaatttaactgttagtccaaagaggaacagctctttggacactaggaaaaaaccttgtagagagagtaaaaaatttaacacccatagtaggcctaaaagcagccaccaattaagaaagcgttcaagctcaacacccactacctaaaaaatcccaaacatataactgaactcctcacacccaattggaccaatctatcaccctatagaagaactaatgttagtataagtaacatgaaaacattctcctccgcataagcctgcgtcagattaaaacactgaactgacaattaacagcccaatatctacaatcaaccaacaagtcattattaccctcactgtcaacccaacacaggcatgctcataaggaaaggttaaaaaaagtaaaaggaactcggcaaatcttaccccgcctgtttaccaaaaacatcacctctagcatcaccagtattagaggcaccgcctgcccagtgacacatgtttaacggccgcggtaccctaaccgtgcaaaggtagcataatcacttgttccttaaatagggacctgtatgaatggctccacgagggttcagctgtctcttacttttaaccagtgaaattgacctgcccgtgaagaggcgggcatgacacagcaagacgagaagaccctatggagctttaatttattaatgcaaacagtacctaacaaacccacaggtcctaaactaccaaacctgcattaaaaatttcggttggggcgacctcggagcagaacccaacctccgagcagtacatgctaagacttcaccagtcaaagcgaactactatactcaattgatccaataacttgaccaacggaacaagttaccctagggataacagcgcaatcctattctagagtccatatcaacaatagggtttacgacctcgatgttggatcaggacatcccgatggtgcagccgctattaaaggttcgtttgttcaacgattaaagtcctacgtgatctgagttcagaccggagtaatccaggtcggtttctatctacnttcaaattcctccctgtacgaaaggacaagagaaataaggcctacttcacaaagcgccttcccccgtaaatgatatcatctcaacttagtattatacccacacccacccaagaacagggtttgttaagatggcagagcccggtaatcgcataaaacttaaaactttacagtcagaggttcaattcctcttcttaacaacatacccatggccaacctcctactcctcattgtacccattctaatcgcaatggcattcctaatgcttaccgaacgaaaaattctaggctatatacaactacgcaaaggccccaacgttgtaggcccctacgggctactacaacccttcgctgacgccataaaactcttcaccaaagagcccctaaaacccgccacatctaccatcaccctctacatcaccgccccgaccttagctctcaccatcgctcttctactatgaacccccctccccatacccaaccccctggtcaacctcaacctaggcctcctatttattctagccacctctagcctagccgtttactcaatcctctgatcagggtgagcatcaaactcaaactacgccctgatcggcgcactgcgagcagtagcccaaacaatctcatatgaagtcaccctagccatcattctactatcaacattactaataagtggctcctttaacctctccacccttatcacaacacaagaacacctctgattactcctgccatcatgacccttggccataatatgatttatctccacactagcagagaccaaccgaacccccttcgaccttgccgaaggggagtccgaactagtctcaggcttcaacatcgaatacgccgcaggccccttcgccctattcttcatagccgaatacacaaacattattataataaacaccctcaccactacaatcttcctaggaacaacatatgacgcactctcccctgaactctacacaacatattttgtcaccaagaccctacttctaacctccctgttcttatgaattcgaacagcatacccccgattccgctacgaccaactcatacacctcctatgaaaaaacttcctaccactcaccctagcattacttatatgacatgtctccatacccattacaatctccagcattccccctcaaacctaagaaatatgtctgataaaagagttactttgatagagtaaataataggagcttaaacccccttatttctaggactatgagaatcgaacccatccctgagaatccaaaattctccgtgccacctatcacaccccatcctaaagtaaggtcagctaaataagctatcgggcccataccccgaaaatgttggttatacccttcccgtactaattaatcccctggcccaacccgtcatctactctaccatctttgcaggcacactcatcacagcgctaagctcgcactgattttttacctgagtaggcctagaaataaacatgctagcttttattccagttctaaccaaaaaaataaaccctcgttccacagaagctgccatcaagtatttcctcacgcaagcaaccgcatccataatccttctaatagctatcctcttcaacaatatactctccggacaatgaaccataaccaatactaccaatcaatactcatcattaataatcataatggctatagcaataaaactaggaatagccccctttcacttctgagtcccagaggttacccaaggcacccctctgacatccggcctgcttcttctcacatgacaaaaactagcccccatctcaatcatataccaaatctctccctcactagacgtaagccttctcctcactctctcaatcttatccatcatagcaggcagttgaggtggattaaaccaaacccagctacgcaaaatcttagcatactcctcaattacccacataggatgaataatagcagttctaccgtacaaccctaacataaccattcttaatttaactatttatattatcctaactactaccgcattcctactactcaacttaaactccagcaccacgaccctactactatctcgcacctgaaacaagctaacatgactaacacccttaattccatccaccctcctctccctaggaggcctgcccccgctaaccggctttttgcccaaatgggccattatcgaagaattcacaaaaaacaatagcctcatcatccccaccatcatagccaccatcaccctccttaacctctacttctacctacgcctaatctactccacctcaatcacactactccccatatctaacaacgtaaaaataaaatgacagtttgaacatacaaaacccaccccattcctccccacactcatcgcccttaccacgctactcctacctatctccccttttatactaataatcttatagaaatttaggttaaatacagaccaagagccttcaaagccctcagtaagttgcaatacttaatttctgtaacagctaaggactgcaaaaccccactctgcatcaactgaacgcaaatcagccactttaattaagctaagcccttactagaccaatgggacttaaacccacaaacacttagttaacagctaagcaccctaatcaactggcttcaatctacttctcccgccgccgggaaaaaaggcgggagaagccccggcaggtttgaagctgcttcttcgaatttgcaattcaatatgaaaatcacctcggagctggtaaaaagaggcctaacccctgtctttagatttacagtccaatgcttcactcagccattttacctcacccccactgatgttcgccgaccgttgactattctctacaaaccacaaagacattggaacactatacctattattcggcgcatgagctggagtcctaggcacagctctaagcctccttattcgagccgagctgggccagccaggcaaccttctaggtaacgaccacatctacaacgttatcgtcacagcccatgcatttgtaataatcttcttcatagtaatacccatcataatcggaggctttggcaactgactagttcccctaataatcggtgcccccgatatggcgtttccccgcataaacaacataagcttctgactcttacctccctctctcctactcctgctcgcatctgctatagtggaggccggagcaggaacaggttgaacagtctaccctcccttagcagggaactactcccaccctggagcctccgtagacctaaccatcttctccttacacctagcaggtgtctcctctatcttaggggccatcaatttcatcacaacaattatcaatataaaaccccctgccataacccaataccaaacgcccctcttcgtctgatccgtcctaatcacagcagtcctacttctcctatctctcccagtcctagctgctggcatcactatactactaacagaccgcaacctcaacaccaccttcttcgaccccgccggaggaggagaccccattctataccaacacctattctgatttttcggtcaccctgaagtttatattcttatcctaccaggcttcggaataatctcccatattgtaacttactactccggaaaaaaagaaccatttggatacataggtatggtctgagctatgatatcaattggcttcctagggtttatcgtgtgagcacaccatatatttacagtaggaatagacgtagacacacgagcatatttcacctccgctaccataatcatcgctatccccaccggcgtcaaagtatttagctgactcgccacactccacggaagcaatatgaaatgatctgctgcagtgctctgagccctaggattcatctttcttttcaccgtaggtggcctgactggcattgtattagcaaactcatcactagacatcgtactacacgacacgtactacgttgtagctcacttccactatgtcctatcaataggagctgtatttgccatcataggaggcttcattcactgatttcccctattctcaggctacaccctagaccaaacctacgccaaaatccatttcactatcatattcatcggcgtaaatctaactttcttcccacaacactttctcggcctatccggaatgccccgacgttactcggactaccccgatgcatacaccacatgaaacatcctatcatctgtaggctcattcatttctctaacagcagtaatattaataattttcatgatttgagaagccttcgcttcgaagcgaaaagtcctaatagtagaagaaccctccataaacctggagtgactatatggatgccccccaccctaccacacattcgaagaacccgtatacataaaatctagacaaaaaaggaaggaatcgaaccccccaaagctggtttcaagccaaccccatggcctccatgactttttcaaaaaggtattagaaaaaccatttcataactttgtcaaagttaaattataggctaaatcctatatatcttaatggcacatgcagcgcaagtaggtctacaagacgctacttcccctatcatagaagagcttatcacctttcatgatcacgccctcataatcattttccttatctgcttcctagtcctgtatgcccttttcctaacactcacaacaaaactaactaatactaacatctcagacgctcaggaaatagaaaccgtctgaactatcctgcccgccatcatcctagtcctcatcgccctcccatccctacgcatcctttacataacagacgaggtcaacgatccctcccttaccatcaaatcaattggccaccaatggtactgaacctacgagtacaccgactacggcggactaatcttcaactcctacatacttcccccattattcctagaaccaggcgacctgcgactccttgacgttgacaatcgagtagtactcccgattgaagcccccattcgtataataattacatcacaagacgtcttgcactcatgagctgtccccacattaggcttaaaaacagatgcaattcccggacgtctaaaccaaaccactttcaccgctacacgaccgggggtatactacggtcaatgctctgaaatctgtggagcaaaccacagtttcatgcccatcgtcctagaattaattcccctaaaaatctttgaaatagggcccgtatttaccctatagcaccccctctaccccctctagagcccactgtaaagctaacttagcattaaccttttaagttaaagattaagagaaccaacacctctttacagtgaaatgccccaactaaatactaccgtatggcccaccataattacccccatactccttacactattcctcatcacccaactaaaaatattaaacacaaactaccacctacctccctcaccaaagcccataaaaataaaaaattataacaaaccctgagaaccaaaatgaacgaaaatctgttcgcttcattcattgcccccacaatcctaggcctacccgccgcagtactgatcattctatttccccctctattgatccccacctccaaatatctcatcaacaaccgactaatcaccacccaacaatgactaatcaaactaacctcaaaacaaataatagccatacacaacactaaaggacgaacctgatctcttatactagtatccttaatcatttttattgccacaactaacctcctcggactcctgcctcactcatttacaccaaccacccaactatctataaacctagccatggccatccccttatgagcgggcgcagtgattataggctttcgctctaagattaaaaatgccctagcccacttcttaccacaaggcacacctacaccccttatccccatactagttattatcgaaaccatcagcctactcattcaaccaatagccctggccgtacgcctaaccgctaacattactgcaggccacctactcatgcacctaattggaagcgccaccctagcaatatcaaccattaaccttccctctacacttatcatcttcacaattctaattctactgactatcctagaaatcgctgtcgccttaatccaagcctacgttttcacacttctagtaagcctctacctgcacgacaacacataatgacccaccaatcacatgcctatcatatagtaaaacccagcccatgacccctaacaggggccctctcagccctcctaatgacctccggcctagccatgtgatttcacttccactccataacgctcctcatactaggcctactaaccaacacactaaccatataccaatgatggcgcgatgtaacacgagaaagcacataccaaggccaccacacaccacctgtccaaaaaggccttcgatacgggataatcctatttattacctcagaagtttttttcttcgcaggatttttctgagccttttaccactccagcctagcccctaccccccaattaggagggcactggcccccaacaggcatcaccccgctaaatcccctagaagtcccactcctaaacacatccgtattactcgcatcaggagtatcaatcacctgagctcaccatagtctaatagaaaacaaccgaaaccaaataattcaagcactgcttattacaattttactgggtctctattttaccctcctacaagcctcagagtacttcgagtctcccttcaccatttccgacggcatctacggctcaacattttttgtagccacaggcttccacggacttcacgtcattattggctcaactttcctcactatctgcttcatccgccaactaatatttcactttacatccaaacatcactttggcttcgaagccgccgcctgatactggcattttgtagatgtggtttgactatttctgtatgtctccatctattgatgagggtcttactcttttagtataaatagtaccgttaacttccaattaactagttttgacaacattcaaaaaagagtaataaacttcgccttaattttaataatcaacaccctcctagccttactactaataattattacattttgactaccacaactcaacggctacatagaaaaatccaccccttacgagtgcggcttcgaccctatatcccccgcccgcgtccctttctccataaaattcttcttagtagctattaccttcttattatttgatctagaaattgccctccttttacccctaccatgagccctacaaacaactaacctgccactaatagttatgtcatccctcttattaatcatcatcctagccctaagtctggcctatgagtgactacaaaaaggattagactgaaccgaattggtatatagtttaaacaaaacgaatgatttcgactcattaaattatgataatcatatctaccaaatgcccctcatttacataaatattatactagcatttaccatctcacttctaggaatactagtatatcgctcacacctcatatcctccctactatgcctagaaggaataatactatcgctgttcattatagctactctcataaccctcaacacccactccctcttagccaatattgtgcctattgccatactagtctttgccgcctgcgaagcagcggtgggcctagccctactagtctcaatctccaacacatatggcctagactacgtacataacctaaacctactccaatgctaaaactaatcgtcccaacaattatattactaccactgacatgactttccaaaaaacacataatttgaatcaacacaaccacccacagcctaattattagcatcatccctctactattttttaaccaaatcaacaacaacctatttagctgttccccaaccttttcctccgaccccctaacaacccccctcctaatactaactacctgactcctacccctcacaatcatggcaagccaacgccacttatccagtgaaccactatcacgaaaaaaactctacctctctatactaatctccctacaaatctccttaattataacattcacagccacagaactaatcatattttatatcttcttcgaaaccacacttatccccaccttggctatcatcacccgatgaggcaaccagccagaacgcctgaacgcaggcacatacttcctattctacaccctagtaggctcccttcccctactcatcgcactgatttacactcacaacaccctaggctcactaaacattctactactcactctcactgcccaagaactatcaaactcctgagccaacaacttaatatgactagcttacacaatagcttttatagtaaagatacctctttacggactccacttatgactccctaaagcccatgtcgaagcccccatcgctgggtcaatagtacttgccgcagtactcttaaaactaggcggctatggtataatacgcctcacactcattctcaaccccctgacaaaacacatagcctaccccttccttgtactatccctatgaggcataattataacaagctccatctgcctacgacaaacagacctaaaatcgctcattgcatactcttcaatcagccacatagccctcgtagtaacagccattctcatccaaaccccctgaagcttcaccggcgcagtcattctcataatcgcccacggacttacatcctcattactattctgcctagcaaactcaaactacgaacgcactcacagtcgcatcataatcctctctcaaggacttcaaactctactcccactaatagctttttgatgacttctagcaagcctcgctaacctcgccttaccccccactattaacctactgggagaactctctgtgctagtaaccacgttctcctgatcaaatatcactctcctacttacaggactcaacatactagtcacagccctatactccctctacatatttaccacaacacaatggggctcactcacccaccacattaacaacataaaaccctcattcacacgagaaaacaccctcatgttcatacacctatcccccattctcctcctatccctcaaccccgacatcattaccgggttttcctcttgtaaatatagtttaaccaaaacatcagattgtgaatctgacaacagaggcttacgaccccttatttaccgagaaagctcacaagaactgctaactcatgcccccatgtctaacaacatggctttctcaacttttaaaggataacagctatccattggtcttaggccccaaaaattttggtgcaactccaaataaaagtaataaccatgcacactactataaccaccctaaccctgacttccctaattccccccatccttaccaccctcgttaaccctaacaaaaaaaactcatacccccattatgtaaaatccattgtcgcatccacctttattatcagtctcttccccacaacaatattcatgtgcctagaccaagaagttattatctcgaactgacactgagccacaacccaaacaacccagctctccctaagcttcaaactagactacttctccataatattcatccctgtagcattgttcgttacatggtcaatcatagaattctcactgtgatatataaactcagacccaaacattaatcagttcttcaaatatctactcatcttcctaattaccatactaatcttagttaccgctaacaacctattccaactgttcatcggctgagagggcgtaggaattatatccttcttgctcatcagttgatgatacgcccgagcagatgccaacacagcagccattcaagcaatcctatacaaccgtatcggcgatatcggtttcatcctcgccttagcatgatttatcctacactccaactcatgagacccacaacaaatagcccttctaaacgctaatccaagcctcaccccactactaggcctcctcctagcagcagcaggcaaatcagcccaattaggtctccacccctgactcccctcagccatagaaggccccaccccagtctcagccctactccactcaagcactatagttgtagcaggaatcttcttactcatccgcttccaccccctagcagaaaatagcccactaatccaaactctaacactatgcttaggcgctatcaccactctgttcgcagcagtctgcgcccttacacaaaatgacatcaaaaaaatcgtagccttctccacttcaagtcaactaggactcataatagttacaatcggcatcaaccaaccacacctagcattcctgcacatctgtacccacgccttcttcaaagccatactatttatgtgctccggatccatcatccacaaccttaacaatgaacaagatattcgaaaaataggaggactactcaaaaccatacctctcacttcaacctccctcaccattggcagcctagcattagcaggaatacctttcctcacaggtttctactccaaagaccacatcatcgaaaccgcaaacatatcatacacaaacgcctgagccctatctattactctcatcgctacctccctgacaagcgcctatagcactcgaataattcttctcaccctaacaggtcaacctcgcttccccacccttactaacattaacgaaaataaccccaccctactaaaccccattaaacgcctggcagccggaagcctattcgcaggatttctcattactaacaacatttcccccgcatcccccttccaaacaacaatccccctctacctaaaactcacagccctcgctgtcactttcctaggacttctaacagccctagacctcaactacctaaccaacaaacttaaaataaaatccccactatgcacattttatttctccaacatactcggattctaccctagcatcacacaccgcacaatcccctatctaggccttcttacgagccaaaacctgcccctactcctcctagacctaacctgactagaaaagctattacctaaaacaatttcacagcaccaaatctccacctccatcatcacctcaacccaaaaaggcataattaaactttacttcctctctttcttcttcccactcatcctaaccctactcctaatcacataacctattcccccgagcaatctcaattacaatatatacaccaacaaacaatgttcaaccagtaactactactaatcaacgcccataatcatacaaagcccccgcaccaataggatcctcccgaatcaaccctgacccctctccttcataaattattcagcttcctacactattaaagtttaccacaaccaccaccccatcatactctttcacccacagcaccaatcctacctccatcgctaaccccactaaaacactcaccaagacctcaacccctgacccccatgcctcaggatactcctcaatagccatcgctgtagtatatccaaagacaaccatcattccccctaaataaattaaaaaaactattaaacccatataacctcccccaaaattcagaataataacacacccgaccacaccgctaacaatcaatactaaacccccataaataggagaaggcttagaagaaaaccccacaaaccccattactaaacccacactcaacagaaacaaagcatacatcattattctcgcacggactacaaccacgaccaatgatatgaaaaaccatcgttgtatttcaactacaagaacaccaatgaccccaatacgcaaaattaaccccctaataaaattaattaaccactcattcatcgacctccccaccccatccaacatctccgcatgatgaaacttcggctcactccttggcgcctgcctgatcctccaaatcaccacaggactattcctagccatacactactcaccagacgcctcaaccgccttttcatcaatcgcccacatcactcgagacgtaaattatggctgaatcatccgctaccttcacgccaatggcgcctcaatattctttatctgcctcttcctacacatcgggcgaggcctatattacggatcatttctctactcagaaacctgaaacatcggcattatcctcctgcttgcaactatagcaacagccttcataggctatgtcctcccgtgaggccaaatatcattctgaggggccacagtaattacaaacttactatccgccatcccatacattgggacagacctagttcaatgaatctgaggaggctactcagtagacagtcccaccctcacacgattctttacctttcacttcatcttgcccttcattattgcagccctagcagcactccacctcctattcttgcacgaaacgggatcaaacaaccccctaggaatcacctcccattccgataaaatcaccttccacccttactacacaatcaaagacgccctcggcttacttctcttcattctctccttaatgacattaacactattctcaccagacctcctaggcgacccagacaattataccctagccaaccccttaaacacccctccccacatcaagcccgaatgatatttcctattcgcctacacaattctccgatccgtccctaacaagctaggaggcgtccttgccctattactatccatcctcatcctagcaataatccccatcctccatatatccaaacaacaaagcataatatttcgcccactaagccaatcactttattgactcctagccgcagacctcctcattctaacctgaatcggaggacaaccagtaagctacccttttaccatcattggacaagtagcatccgtactatacttcacaacaatcctaatcctaataccaactatctccctaattgaaaacaaaatactcaaatgggcctgtccttgtagtataaactaatacaccagtcttgtaaaccgaagatgaaaacctttttccaaggacaaatcagagaaaaagtctttaactccaccattagcacccaaagctaagattctaatttaaactattctctgttctttcatggggaagcagatttgggtaccacccaagtattgactcacccatcaacaaccgctatgtatttcgtacattactgccagccaccatgaatattgcacggtaccataaatacttgaccacctgtagtacatagaaacccaatccacatcaaaacctcccccccatgcttacaagcaagtacagcaatcaaccctcaactatcacacatcaactgcaactccaaagccacccctcacccactaggataccaacaaacctacccatccttaacagtacatagtacataaagccatttaccgtacatagcacattacagtcaaatcccttctcgtccccatggatgacccccctcagataggggtcccttgaccaccatcctccgtgaaatcaatatcccgcacaagagtgctactctcctcgctccgggcccataacacttgggggtagctaaagtgaactgtatccgacatctggttcctacttcagggccataaagcctaaatagcccacacgttccccttaaataagacatcacgatg

SEQ ID NO: 36 - DNA, 16570 bp, Homo sapiens mitochondrial
  3108: "n" refers to a nucleotide at position 3107 of the Cambridge Reference Sequence (CRS, Anderson et al. 1981 Nature 290:457-465), later determined to be absent from the human mtDNA sequence according to the revised CRS (rCRS, Andrews et al. 1999 Nature Genetics 23:147); "n" therefore represents a single nucleotide deletion at a position corresponding to nucleotide 3107 of SEQ ID NO:1 as provided herein.
gatcacaggtctatcaccctattaaccactcacgggagctctccatgcatttggtattttcgtctggggggtgtgcacgcgatagcattgcgagacgctggagccggagcaccctatgtcgcagtatctgtctttgattcctgcctcattctattatttatcgcacctacgttcaatattacaggcgagcatacctactaaagcgtattaattaattaatgcttgtaggacataataataacaattgaatgtctgcacagccgctttccacacagacatcataacaaaaaatttccaccaaaccccccctcccccgccttctggccacagcacttaaacacatctctgccaaaccccaaaaacaaagaaccctaacaccagcctaaccagatttcaaattttatcttttggcggtatgcacttttaacagtcaccccccaactaacacattattttcccctcccactcccatactactaatctcatcaatacaacccccgcccatcctacccagcacacacacaccgctgctaaccccataccccgaaccaaccaaaccccaaagacaccccccacagtttatgtagcttacctcctcaaagcaatacactgaaaatgtttagacgggctcacatcaccccataaacaaataggtttggtcctagcctttctattagctcttagtaagattacacatgcaagcatccccattccagtgagttcaccctctaaatcaccacgatcaaaagggacaagcatcaagcacgcagcaatgcagctcaaaacgcttagcctagccacacccccacgggaaacagcagtgattaacctttagcaataaacgaaagtttaactaagctatactaaccccagggttggtcaatttcgtgccagccaccgcggtcacacgattaacccaagtcaatagaagccggcgtaaagagtgttttagatcaccccctccccaataaagctaaaactcacctgagttgtaaaaaactccagttgacacaaaatagactacgaaagtggctttaacatatctgaacacacaatagctaagacccaaactgggattagataccccactatgcttagccctaaacctcaacagttaaatcaacaaaactgctcgccagaacactacgagccacagcttaaaactcaaaggacctggcggtgcttcatatccctctagaggagcctgttctgtaatcgataaaccccgatcaacctcaccaccccttgctcagcctatataccgccatcttcagcaaaccctgatgaaggctacaaagtaagcgcaagtacccacgtaaagacgttaggtcaaggtgtagcccatgaggtggcaagaaatgggctacattttctaccccagaaaactacgatagcccttatgaaacttaagggtcgaaggtggatttagcagtaaactgagagtagagtgcttagttgaacagggccctgaagcgcgtacacaccgcccgtcaccctcctcaagtatacttcaaaggacatttaactaaaacccctacgcatttatatagaggagacaagtcgtaacatggtaagtgtactggaaagtgcacttggacgaaccagagtgtagcttaacacaaagcacccaacttacacttaggagatttcaacttaacttgaccgctctgagctaaacctagccccaaacccactccaccttactaccagacaaccttagccaaaccatttacccaaataaagtataggcgatagaaattgaaacctggcgcaatagatatagtaccgcaagggaaagatgaaaaattataaccaagcataatatagcaaggactaacccctataccttctgcataatgaattaactagaaataactttgcaaggagagccaaagctaagacccccgaaaccagacgagctacctaagaacagctaaaagagcacacccgtctatgtagcaaaatagtgggaagatttataggtagaggcgacaaacctaccgagcctggtgatagctggttgtccaagatagaatcttagttcaactttaaatttgcccacagaaccctctaaatccccttgtaaatttaactgttagtccaaagaggaacagctctttggacactaggaaaaaaccttgtagagagagtaaaaaatttaacacccatagtaggcctaaaagcagccaccaattaagaaagcgttcaagctcaacacccactacctaaaaaatcccaaacatataactgaactcctcacacccaattggaccaatctatcaccctatagaagaactaatgttagtataagtaacatgaaaacattctcctccgcataagcctgcgtcagattaaaacactgaactgacaattaacagcccaatatctacaatcaaccaacaagtcattattaccctcactgtcaacccaacacaggcatgctcataaggaaaggttaaaaaaagtaaaaggaactcggcaaatcttaccccgcctgtttaccaaaaacatcacctctagcatcaccagtattagaggcaccgcctgcccagtgacacatgtttaacggccgcggtaccctaaccgtgcaaaggtagcataatcacttgttccttaaatagggacctgtatgaatggctccacgagggttcagctgtctcttacttttaaccagtgaaattgacctgcccgtgaagaggcgggcatgacacagcaagacgagaagaccctatggagctttaatttattaatgcaaacagtacctaacaaacccacaggtcctaaactaccaaacctgcattaaaaatttcggttggggcgacctcggagcagaacccaacctccgagcagtacatgctaagacttcaccagtcaaagcgaactactatactcaattgatccaataacttgaccaacggaacaagttaccctagggataacagcgcaatcctattctagagtccatatcaacaatagggtttacgacctcgatgttggatcaggacatcccgatggtgcagccgctattaaaggttcgtttgttcaacgattaaagtcctacgtgatctgagttcagaccggagtaatccaggtcggtttctatctacnttcaaattcctccctgtacgaaaggacaagagaaataaggcctacttcacaaagcgccttcccccgtaaatgatatcatctcaacttagtattatacccacacccacccaagaacagggtttgttaagatggcagagcccggtaatcgcataaaacttaaaactttacagtcagaggttcaattcctcttcttaacaacatacccatggccaacctcctactcctcattgtacccattctaatcgcaatggcattcctaatgcttaccgaacgaaaaattctaggctatatacaactacgcaaaggccccaacgttgtaggcccctacgggctactacaacccttcgctgacgccataaaactcttcaccaaagagcccctaaaacccgccacatctgccatcaccctctacatcaccgccccgaccttagctctcaccatcgctcttctactatgaacccccctccccatacccaaccccctggtcaacctcaacctaggcctcctatttattctagccacctctagcctagccgtttactcaatcctctgatcagggtgagcatcaaactcaaactacgccctgatcggcgcactgcgagcagtagcccaaacaatctcatatgaagtcaccctagccatcattctactatcaacattactaataagtggctcctttaacctctccacccttatcacaacacaagaacacctctgattactcctgccatcatgacccttggccataatatgatttatctccacactagcagagaccaaccgaacccccttcgaccttgccgaaggggagtccgaactagtctcaggcttcaacatcgaatacgccgcaggccccttcgccctattcttcatagccgaatacacaaacattattataataaacaccctcaccactacaatcttcctaggaacaacatatgacgcactctcccctgaactctacacaacatattttgtcaccaagaccctacttctaacctccctgttcttatgaattcgaacagcatacccccgattccgctacgaccaactcatacacctcctatgaaaaaacttcctaccactcaccctagcattacttatatgatatgtctccatacccattacaatctccagcattccccctcaaacctaagaaatatgtctgataaaagagttactttgatagagtaaataataggagcttaaacccccttatttctaggactatgagaatcgaacccatccctgagaatccaaaattctccgtgccacctatcacaccccatcctaaagtaaggtcagctaaataagctatcgggcccataccccgaaaatgttggttatacccttcccgtactaattaatcccctggcccaacccgtcatctactctaccatctttgcaggcacactcatcacagcgctaagctcgcactgattttttacctgagtaggcctagaaataaacatgctagcttttattccagttctaaccaaaaaaataaaccctcgttccacagaagctgccatcaagtatttcctcacgcaagcaaccgcatccataatccttctaatagctatcctcttcaacaatatactctccggacaatgaaccataaccaatactaccaatcaatactcatcattaataatcataatggctatagcaataaaactaggaatagccccctttcacttctgagtcccagaggttacccaaggcacccctctgacatccggcctgcttcttctcacatgacaaaaactagcccccatctcaatcatataccaaatctctccctcactaaacgtaagccttctcctcactctctcaatcttatccatcatagcaggcagttgaggtggattaaaccaaacccagctacgcaaaatcttagcatactcctcaattacccacataggatgaataatagcaattctaccgtacaaccctaacataaccattcttaatttaactatttatattatcctaactactaccgcattcctactactcaacttaaactccagcaccacgaccctactactatctcgcacctgaaacaagctaacatgactaacacccttaattccatccaccctcctctccctaggaggcctgcccccgctaaccggctttttgcccaaatgggccattatcgaagaattcacaaaaaacaatagcctcatcatccccaccatcatagccaccatcaccctccttaacctctacttctacctacgcctaatctactccacctcaatcacactactccccatatctaacaacgtaaaaataaaatgacagtttgaacatacaaaacccaccccattcctccccacactcatcacccttaccacgctactcctacctatctccccttttatactaataatcttatagaaatttaggttaaatacagaccaagagccttcaaagccctcagtaagttgcaatacttaatttctgtaacagctaaggactgcaaaaccccactctgcatcaactgaacgcaaatcagccactttaattaagctaagcccttactagaccaatgggacttaaacccacaaacacttagttaacagctaagcaccctaatcaactggcttcaatctacttctcccgccgccgggaaaaaaggcgggagaagccccggcaggtttgaagctgcttcttcgaatttgcaattcaatatgaaaatcacctcggagctggtaaaaagaggcctaacccctgtctttagatttacagtccaatgcttcactcagccattttacctcacccccactgatgttcgccgaccgttgactattctctacaaaccacaaagacattggaacactatacctattattcggcgcatgagctggagtcctaggcacagctctaagcctccttattcgagccgagctgggccagccaggcaaccttctaggtaacgaccacatctacaacgttatcgtcacagcccatgcatttgtaataatcttcttcatagtaatacccatcataatcggaggctttggcaactgactagttcccctaataatcggtgcccccgatatggcgtttccccgcataaacaacataagcttctgactcttacctccctctctcctactcctgctcgcatctgctatagtggaggccggagcaggaacaggttgaacagtctaccctcccttagcagggaactactcccaccctggagcctccgtagacctaaccatcttctccttacacctagcaggtgtctcctctatcttaggggccatcaatttcatcacaacaattatcaatataaaaccccctgccataacccaataccaaacgcccctcttcgtctgatccgtcctaatcacagcagtcctacttctcctatctctcccagtcctagctgctggcatcactatattactaacagaccgcaacctcaacaccaccttcttcgaccccgccggaggaggagaccccattctataccaacacctattctgatttttcggtcaccctgaagtttatattcttatcctaccaggcttcggaataatctcccatattgtaacttactactccggaaaaaaagaaccatttggatacataggtatggtctgagctatgatatcaattggcttcctagggtttatcgtgtgagcacaccatatatttacagtaggaatagacgtagacacacgagcatatttcacctccgctaccataatcatcgctatccccaccggcgtcaaagtatttagctgactcgccacactccacggaagcaatatgaaatgatctgctgcagtgctctgagccctaggattcatctttcttttcaccgtaggtggcctgactggcattgtattagcaaactcatcactagacatcgtactacacgacacgtactacgttgtagctcacttccactatgtcctatcaataggagctgtatttgccatcataggaggcttcattcactgatttcccctattctcaggctacaccctagaccaaacctacgccaaaatccatttcactatcatattcatcggcgtaaatctaactttcttcccacaacactttctcggcctatccggaatgccccgacgttactcggactaccccgatgcatacaccacatgaaacatcctatcatctgtaggctcattcatttctctaacagcagtaatattaataattttcatgatttgagaagccttcgcttcgaagcgaaaagtcctaatagtagaagaaccctccataaacctggagtgactatatggatgccccccaccctaccacacattcgaagaacccgtatacataaaatctagacaaaaaaggaaggaatcgaaccccccaaagctggtttcaagccaaccccatggcctccatgactttttcaaaaaggtattagaaaaaccatttcataactttgtcaaagttaaattataggctaaatcctatatatcttaatggcacatgcagcgcaagtaggtctacaagacgctacttcccctatcatagaagagcttatcacctttcatgatcacgccctcataatcattttccttatctgcttcctagtcctgtatgcccttttcctaacactcacaacaaaactaactaatactaacatctcagacgctcaggaaatagaaaccgtctgaactatcctgcccgccatcatcctagtcctcatcgccctcccatccctacgcatcctttacataacagacgaggtcaacgatccctcccttaccatcaaatcaattggccaccaatggtactgaacctacgagtacaccgactacggcggactaatcttcaactcctacatacttcccccattattcctagaaccaggcgacctgcgactccttgacgttgacaatcgagtagtactcccgattgaagcccccattcgtataataattacatcacaagacgtcttgcactcatgagctgtccccacattaggcttaaaaacagatgcaattcccggacgtctaaaccaaaccactttcaccgctacacgaccgggggtatactacggtcaatgctctgaaatctgtggagcaaaccacagtttcatgcccatcgtcctagaattaattcccctaaaaatctttgaaataggacccgtatttaccctatagcaccccctctaccccctctagagcccactgtaaagctaacttagcattaaccttttaagttaaagattaagagaaccaacacctctttacagtgaaatgccccaactaaatactaccgtatggcccaccataattacccccatactccttacactattcctcatcacccaactaaaaatattaaacacaaactaccacctacctccctcaccaaagcccataaaaataaaaaattataacaaaccctgagaaccaaaatgaacgaaaatctgttcgcttcattcattgcccccacaatcctaggcctacccgccgcagtactgatcattctatttccccctctattgatccccacctccaaatatctcatcaacaaccgactaatcaccacccaacaatgactaatcaaactaacctcaaaacaaatgataaccatacacaacactaaaggacgaacctgatctcttatactagtatccttaatcatttttattgccacaactaacctcctcggactcctgcctcactcatttacaccaaccacccaactatctataaacctagccatggccatccccttatgagcgggcgcagtgattataggctttcgctctaagattaaaaatgccctagcccacttcttaccacaaggcacacctacaccccttatccccatactagttattatcgaaaccatcagcctactcattcaaccaatagccctagccgtacgcctaaccgctaacattactgcaggccacctactcatgcacctaattggaagcgccaccctagcaatatcaaccattaaccttccctctacacttatcatcttcacaattctaattctactgactatcctagaaatcgctgtcgccttaatccaagcctacgttttcacacttctagtaagcctctacctgcacgacaacacataatgacccaccaatcacatgcctatcatatagtaaaacccagcccatgacccctaacaggggccctctcagccctcctaatgacctccggcctagccatgtgatttcacttccactccataacgctcctcatactaggcctactaaccaacacactaaccatataccaatgatggcgcgatgtaacacgagaaagcacataccaaggccaccacacaccacctgtccaaaaaggccttcgatacgggataatcctatttattacctcagaagtttttttcttcgcaggatttttctgagccttttaccactccagcctagcccctaccccccaattaggagggcactggcccccaacaggcatcaccccgctaaatcccctagaagtcccactcctaaacacatccgtattactcgcatcaggagtatcaatcacctgagctcaccatagtctaatagaaaacaaccgaaaccaaataattcaagcactgcttattacaattttactgggtctctattttaccctcctacaagcctcagagtacttcgagtctcccttcaccatttccgacggcatctacggctcaacattttttgtagccacaggcttccacggacttcacgtcattattggctcaactttcctcactatctgcttcatccgccaactaatatttcactttacatccaaacatcactttggcttcgaagccgccgcctgatactggcattttgtagatgtggtttgactatttctgtatgtctccatctattgatgagggtcttactcttttagtataaatagtaccgttaacttccaattaactagttttgacaacattcaaaaaagagtaataaacttcgccttaattttaataatcaacaccctcctggccttactactaataattattacattttgactaccacaactcaacggctacatagaaaaatccaccccttacgagtgcggcttcgaccctatatcccccgcccgcgtccctttctccataaaattcttcttagtagctattaccttcttattatttgatctagaaattgccctccttttacccctaccatgagccctacaaacaactaacctgccactaatagttatgtcatccctcttattaatcatcatcctagccctaagtctggcctatgaatgactacaaaaaggattagactgaaccgaattggtatatagtttaaacaaaacgaatgatttcgactcattaaattatgataatcatatttaccaaatgcccctcatttacataaatattatactagcatttaccatctcacttctaggaatactagtatatcgctcacacctcatatcctccctactatgcctagaaggaataatactatcgctgttcattatagctactctcataaccctcaacacccactccctcttagccaatattgtgcctattgccatactagtctttgccgcctgcgaagcagcggtgggcctagccctactagtctcaatctccaacacatatggcctagactacgtacataacctaaacctactccaatgctaaaactaatcgtcccaacaattatattactaccactgacatgactttccaaaaaacacataatttgaatcaacacaaccacccacagcctaattattagcatcatccctctactattttttaaccaaatcaacaacaacctatttagctgttccccaaccttttcctccgaccccctaacaacccccctcctaatactaactacctgactcctacccctcacaatcatggcaagccaacgccacttatccagtgaaccactatcacgaaaaaaactctacctctctatactaatctccctacaaatctccttaattataacattcacagccacagaactaatcatattttatatcttcttcgaaaccacacttatccccaccttggctatcatcacccgatgaggcaaccagccagaacgcctgaacgcaggcacatacttcctattctacaccctagtaggctcccttcccctactcatcgcactaatttacactcacaacaccctaggctcactaaacattctactactcactctcactgcccaagaactatcaaactcctgagccaacaacttaatatgactagcttacacaatagcttttatagtaaagatacctctttacggactccacttatgactccctaaagcccatgtcgaagcccccatcgctgggtcaatagtacttgccgcagtactcttaaaactaggcggctatggtataatacgcctcacactcattctcaaccccctgacaaaacacatagcctaccccttccttgtactatccctatgaggcataattataacaagctccatctgcctacgacaaacagacctaaaatcgctcattgcatactcttcaatcagccacatagccctcgtagtaacagccattctcatccaaactccctgaagcttcaccggcgcagtcattctcataatcgcccacggacttacatcctcattactattctgcctagcaaactcaaactacgaacgcactcacagtcgcatcataatcctctctcaaggacttcaaactctactcccactaatagctttttgatgacttctagcaagcctcgctaacctcgccttaccccccactattaacctactgggagaactctctgtgctagtaaccacgttctcctgatcaaatatcactctcctacttacgggactcaacatactagtcacagccctatactccctctacatatttaccacaacacaatggggctcactcacccaccacattaacaacataaaaccctcattcacacgagaaaacaccctcatgttcatacacctatcccccattctcctcctatccctcaaccccgacatcattaccgggttttcctcttgtaaatatagtttaaccaaaacatcagattgtgaatctgacaacagaggcttacgaccccttatttaccgagaaagctcacaagaactgctaactcatgcccccatgtctaacaacatggctttctcaacttttaaaggataacagctatccattggtcttaggccccaaaaattttggtgcaactccaaataaaagtaataaccatgcacactactataaccaccctaaccctgacttccctaattccccccatccttaccaccctcgttaaccccaacaaaaaaaactcatacccccattatgtaaaatccattgtcgcatccacctttattatcagtctcttccccacaacaatattcatgtgcctagaccaagaagttattatctcgaactgacactgagccacaacccaaacaacccagctctccctaagcttcaaactagactacttctccataatattcatccctgtagcattgttcgttacatggtccatcatagaattctcactgtgatatataaactcagacccaaacattaatcagttcttcaaatatctactcattttcctaattaccatactaatcttagttaccgctaacaacctattccaactgttcatcggctgagagggcgtaggaattatatccttcttgctcatcagttgatgatacgcccgagcagatgccaacacagcagccattcaagcaatcctatacaaccgtatcggcgatatcggtttcatcctcgccttagcatgatttatcctacactccaactcatgagacccacaacaaatagcccttctaaacgctaatccaagcctcaccccactactaggcctcctcctagcagcagcaggcaaatcagcccaattaggtctccacccctgactcccctcagccatagaaggccccaccccagtctcagccctactccactcaagcactatagttgtagcaggaatcttcttactcatccgcttccaccccctagcagaaaatagcccactaatccaaactctaacactatgcttaggcgctatcaccactctgttcgcagcagtctgcgcccttacacaaaatgacatcaaaaaaatcgtagccttctccacttcaagtcaactaggactcataatagttacaatcggcatcaaccaaccacacctagcattcctgcacatctgtacccacgccttcttcaaagccatactatttatgtgctccgggtccatcatccacaaccttaacaatgaacaagatattcgaaaaataggaggactactcaaaaccatacctctcacttcaacctccctcaccattggcagcctagcattagcaggaatacctttcctcacaggtttctactccaaagaccacatcatcgaaaccgcaaacatatcatacacaaacgcctgagccctatctattactctcatcgctacctccctgacaagcgcctatagcactcgaataattcttctcaccctaacaggtcaacctcgcttccccacccttactaacattaacgaaaataaccccaccctactaaaccccattaaacgcctggcagccggaagcctattcgcaggatttctcattactaacaacatttcccccgcatcccccttccaaacaacaatccccctctacctaaaactcacagccctcgctgtcactttcctaggacttctaacagccctagacctcaactacctaaccaacaaacttaaaataaaatccccactatgcacattttatttctccaacatactcggattctaccctagcatcacacaccgcacaatcccctatctaggccttcttacgagccaaaacctgcccctactcctcctagacctaacctgactagaaaagctattacctaaaacaatttcacagcaccaaatctccacctccatcatcacctcaacccaaaaaggcataattaaactttacttcctctctttcttcttcccactcatcctaaccctactcctaatcacataacctattcccccgagcaatctcaattacaatatatacaccaacaaacaatgttcaaccagtaactactactaatcaacgcccataatcatacaaagcccccgcaccaataggatcctcccgaatcaaccctgacccctctccttcataaattattcagcttcctacactattaaagtttaccacaaccaccaccccatcatactctttcacccacagcaccaatcctacctccatcgctaaccccactaaaacactcaccaagacctcaacccctgacccccatgcctcaggatactcctcaatagccatcgctgtagtatatccaaagacaaccatcattccccctaaataaattaaaaaaactattaaacccatataacctcccccaaaattcagaataataacacacccgaccacaccgctaacaatcaatactaaacccccataaataggagaaggcttagaagaaaaccccacaaaccccattactaaacccacactcaacagaaacaaagcatacatcattattctcgcacggactacaaccacgaccaatgatatgaaaaaccatcgttgtatttcaactacaagaacaccaatgaccccaatacgcaaaattaaccccctaataaaattaattaaccactcattcatcgacctccccaccccatccaacatctccgcatgatgaaacttcggctcactccttggcgcctgcctgatcctccaaatcaccacaggactattcctagccatgcactactcaccagacgcctcaaccgccttttcatcaatcgcccacatcactcgagacgtaaattatggctgaatcatccgctaccttcacgccaatggcgcctcaatattctttatctgcctcttcctacacatcgggcgaggcctatattacggatcatttctctactcagaaacctgaaacatcggcattatcctcctgcttgcaactatagcaacagccttcataggctatgtcctcccgtgaggccaaatatcattctgaggggccacagtaattacaaacttactatccgccatcccatacattgggacagacctagttcaatgaatctgaggaggctactcagtagacagtcccaccctcacacgattctttacctttcacttcatcttgcccttcattattgcagccctagcagcactccacctcctattcttgcacgaaacgggatcaaacaaccccctaggaatcacctcccattccgataaaatcaccttccacccttactacacaatcaaagacgccctcggcttacttctcttccttctctccttaatgacattaacactattctcaccagacctcctaggcgacccagacaattataccctagccaaccccttaaacacccctccccacatcaagcccgaatgatatttcctattcgcctacacaattctccgatccgtccctaacaaactaggaggcgtccttgccctattactatccatcctcatcctagcaataatccccatcctccatatatccaaacaacaaagcataatatttcgcccactaagccaatcactttattgactcctagccgcagacctcctcattctaacctgaatcggaggacaaccagtgagctacccttttaccatcattggacaagtagcatccgtactatacttcacaacaatcctaatcctaataccaactatctccctaattgaaaacaaaatactcaaatggccctgtccttgtagtataaactaatacaccagtcttgtaagccggagatgaaaacctttttccaaggacaaatcagagaaaaagtctttaactccaccattagcacccaaagctaagattctaatttaaactattctctgttctttcatggggaagcagatttgggtaccacccaagtattgactcacccatcaacaaccgctatgtatttcgtacattactgccagccaccatgaatattgtacggtaccataaatacttgaccacctgtagtacataaaaacccaatccacatcaaaaccccctccccatgcttacaagcaagtacagcaatcaaccttcaactatcacacatcaactgcaactccaaagccacccctcacccactaggataccaacaaacctacctacccttaacagtacatagtacataaagccatttaccgtacatagcacattacagtcaaatcccttctcgcccccatggatgacccccctcagataggggtcccttgaccaccatcctccgtgaaatcaatatcccgcacaagagtgctactctcctcgctccgggcccataacacttgggggtagctaaagtgaactgtatccgacatctggttcctacttcagggccataaagcctaaatagcccacacgttccccttaaataagacatcacgatg

SEQ ID NO: 37 - DNA, 16571 bp, Homo sapiens mitochondrial
  3109: "n" refers to a nucleotide at position 3107 of the Cambridge Reference Sequence (CRS, Anderson et al. 1981 Nature 290:457-465), later determined to be absent from the human mtDNA sequence according to the revised CRS (rCRS, Andrews et al. 1999 Nature Genetics 23:147); "n" therefore represents a single nucleotide deletion at a position corresponding to nucleotide 3107 of SEQ ID NO:1 as provided herein.
gatcacaggtctatcaccctattaaccactcacgggagctctccatgcatttggtattttcgtctggggggtatgcacgcgatagcattgcgagacgctggagccggagcaccctatgtcgcagtatctgtctttgattcctgcctcatcccattatttatcgcacctacgttcaatattacaggcgaacatacttactaaagtgtgttaattaattaatgcttgtaggacataataataacaattgaatgtctgcacagccgctttccacacagacatcataacaaaaaatttccaccaaaccccccctcccccccgcttctggccacagcacttaaacacatctctgccaaaccccaaaaacaaagaaccctaacaccagcctaaccagatttcaaattttatcttttggcggtatgcacttttaacagtcaccccccaactaacacattattttcccctcccactcccatactactaatctcatcaatacaacccccgcccatcctacccagcacacacacaccgctgctaaccccataccccgaaccaaccaaaccccaaagacaccccccacagtttatgtagcttacctcctcaaagcaatacactgaaaatgtttagacgggctcacatcaccccataaacaaataggtttggtcctagcctttctattagctcttagtaagattacacatgcaagcatccccgttccagtgagttcaccctctaaatcaccacgatcaaaagggacaagcatcaagcacgcagcaatgcagctcaaaacgcttagcctagccacacccccacgggaaacagcagtgattaacctttagcaataaacgaaagtttaactaagctatactaaccccagggttggtcaatttcgtgccagccaccgcggtcacacgattaacccaagtcaatagaagccggcgtaaagagtgttttagatcaccccctccccaataaagctaaaactcacctgagttgtaaaaaactccagttgacacaaaatagactacgaaagtggctttaacatatctgaacacacaatagctaagacccaaactgggattagataccccactatgcttagccctaaacctcaacagttaaatcaacaaaactgctcgccagaacactacgagccacagcttaaaactcaaaggacctggcggtgcttcatatccctctagaggagcctgttctgtaatcgataaaccccgatcaacctcaccacctcttgctcagcctatataccgccatcttcagcaaaccctgatgaaggctacaaagtaagcgcaagtacccacgtaaagacgttaggtcaaggtgtagcccatgaggtggcaagaaatgggctacattttctaccccagaaaactacgatagcccttatgaaacttaagggtcgaaggtggatttagcagtaaactgagagtagagtgcttagttgaacagggccctgaagcgcgtacacaccgcccgtcaccctcctcaagtatacttcaaaggacatttaactaaaacccctacgcatttatatagaggagacaagtcgtaacatggtaagtgtactggaaagtgcacttggacgaaccagagtgtagcttaacacaaagcacccaacttacacttaggagatttcaacttaacttgaccgctctgagctaaacctagccccaaacccactccaccttactaccagacaaccttagccaaaccatttacccaaataaagtataggcgatagaaattgaaacctggcgcaatagatatagtaccgcaagggaaagatgaaaaattataaccaagcataatatagcaaggactaacccctataccttctgcataatgaattaactagaaataactttgcaaggagagccaaagctaagacccccgaaaccagacgagctacctaagaacagctaaaagagcacacccgtctatgtagcaaaatagtgggaagatttataggtagaggcgacaaacctaccgagcctggtgatagctggttgtccaagatagaatcttagttcaactttaaatttgcccacagaaccctctaaatccccttgtaaatttaactgttagtccaaagaggaacagctctttggacactaggaaaaaaccttgtagagagagtaaaaaatttaacacccatagtaggcctaaaagcagccaccaattaagaaagcgttcaagctcaacacccactacctaaaaaatcccaaacatataactgaactcctcacacccaattggaccaatctatcaccctatagaagaactaatgttagtataagtaacatgaaaacattctcctccgcataagcctgcgtcagattaaaacactgaactgacaattaacagcccaatatctacaatcaaccaacaagtcattattaccctcactgtcaacccaacacaggcatgctcataaggaaaggttaaaaaaagtaaaaggaactcggcaaatcttaccccgcctgtttaccaaaaacatcacctctagcatcaccagtattagaggcaccgcctgcccagtgacacatgtttaacggccgcggtaccctaaccgtgcaaaggtagcataatcacttgttccttaaatagggacctgtatgaatggctccacgagggttcagctgtctcttacttttaaccagtgaaattgacctgcccgtgaagaggcgggcataacacagcaagacgagaagaccctatggagctttaatttattaatgcaaacagtacctaacaaacccacaggtcctaaactaccaaacctgcattaaaaatttcggttggggcgacctcggagcagaacccaacctccgagcagtacatgctaagacttcaccagtcaaagcgaactactatactcaattgatccaataacttgaccaacggaacaagttaccctagggataacagcgcaatcctattctagagtccatatcaacaatagggtttacgacctcgatgttggatcaggacatcccgatggtgcagccgctattaaaggttcgtttgttcaacgattaaagtcctacgtgatctgagttcagaccggagtaatccaggtcggtttctatctacnttcaaattcctccctgtacgaaaggacaagagaaataaggcctacttcacaaagcgccttcccccgtaaatgatatcatctcaacttagtattatacccacacccacccaagaacagggtttgttaagatggcagagcccggtaatcgcataaaacttaaaactttacagtcagaggttcaattcctcttcttaacaacatacccatgaccaacctcctactcctcattgtacccattctaatcgcaatggcattcctaatgcttaccgaacgaaaaattctaggctatatacaactacgcaaaggccccaacgttgtaggcccctacgggctactacaacccttcgctgacgccataaaactcttcaccaaagagcccctaaaacccgccacatctaccatcaccctctacatcaccgccccgaccttagctctcaccatcgctcttctactatgaacccccctccccatacccaaccccctggtcaacctcaacctaggcctcctatttattctagccacctctagcctagccgtttactcaatcctctgatcagggtgagcatcaaactcaaactacgccctgatcggcgcactgcgagcagtagcccaaacaatctcatatgaagtcaccctagccatcattctactatcaacattactaataagtggctcctttaacctctccacccttatcacaacacaagaacacctctgattactcctgccatcatgacccttggccataatatgatttatctccacactagcagagaccaaccgaacccccttcgaccttgccgaaggggagtccgaactagtctcaggcttcaacatcgaatacgccgcaggccccttcgccctattcttcatagccgaatacacaaacattattataataaacaccctcaccactacaatcttcctaggaacaacatatgacgcactctcccctgaactctacacaacatattttgtcaccaagaccctacttctaacctccctgttcttatgaattcgaacagcatacccccgattccgctacgaccaactcatacacctcctatgaaaaaacttcctaccactcaccctagcattacttatatgatatgtctccatacccattacaatctccagcattccccctcaaacctaagaaatatgtctgataaaagagttactttgatagagtaaataataggagcttaaacccccttatttctaggactatgagaatcgaacccatccctgagaatccaaaattctccgtgccacctatcacaccccatcctaaagtaaggtcagctaaataagctatcgggcccataccccgaaaatgttggttatacccttcccgtactaattaatcccctggcccaacccgtcatctactctaccatctttgcaggcacactcatcacagcgctaagctcgcactgattttttacctgagtaggcctagaaataaacatgctagcttttattccagttctaaccaaaaaaataaaccctcgttccacagaagctgccatcaagtacttcctcacgcaagcaaccgcatccataatccttctaatagctatcctcttcaacaatatactctccggacaatgaaccataaccaatactaccaatcaatactcatcattaataatcataatggctatagcaataaaactaggaatagccccctttcacttctgagtcccagaggttacccaaggcacccctctgacatccggcctgcttcttctcacatgacaaaaactagcccccatctcaatcatataccaaatctctccctcactaaacgtaagccttctcctcactctctcaatcttatccatcatagcaggcagttgaggtggattaaaccaaacccagctacgcaaaatcttagcatactcctcaattacccacataggatgaataatagcagttctaccgtacaaccctaacataaccattcttaatttaactatttatattatcctaactactaccgcattcctactactcaacttaaactccagcaccacgaccctactactatctcgcacctgaaacaagctaacatgactaacacccttaattccatccaccctcctctccctaggaggcctgcccccgctaaccggctttttgcccaaatgggccattatcgaagaattcacaaaaaacaatagcctcatcatccccaccatcatagccaccatcaccctccttaacctctacttctacctacgcctaatctactccacctcaatcacactactccccatatctaacaacgtaaaaataaaatgacagtttgaacatacaaaacccaccccattcctccccacactcatcgcccttaccacgctactcctacctatctccccttttatactaataatcttatagaaatttaggttaaatacagaccaagagccttcaaagccctcagtaagttgcaatacttaatttctgtaacagctaaggactgcaaaaccccactctgcatcaactgaacgcaaatcagccactttaattaagctaagcccttactagaccaatgggacttaaacccacaaacacttagttaacagctaagcaccctaatcaactggcttcaatctacttctcccgccgccgggaaaaaaggcgggagaagccccggcaggtttgaagctgcttcttcgaatttgcaattcaatatgaaaatcacctcggagctggtaaaaagaggcctaacccctgtctttagatttacagtccaatgcttcactcagccattttacctcacccccactgatgttcgccgaccgttgactattctctacaaaccacaaagacattggaacactatacctattattcggcgcatgagctggagtcctaggcacagctctaagcctccttattcgagccgagctgggccagccaggcaaccttctaggtaacgaccacatctacaacgttatcgtcacagcccatgcatttgtaataatcttcttcatagtaatacccatcataatcggaggctttggcaactgactagttcccctaataatcggtgcccccgatatggcgtttccccgcataaacaacataagcttctgactcttacctccctctctcctactcctgctcgcatctgctatagtggaggccggagcaggaacaggttgaacagtctaccctcccttagcagggaactactcccaccctggagcctccgtagacctaaccatcttctccttacacctagcaggtgtctcctctatcttaggggccatcaatttcatcacaacaattatcaatataaaaccccctgccataacccaataccaaacgcccctcttcgtctgatccgtcctaatcacagcagtcctacttctcctatctctcccagtcctagctgctggcatcactatactactaacagaccgcaacctcaacaccaccttcttcgaccccgccggaggaggagaccccattctataccaacacctattctgatttttcggtcaccctgaagtttatattcttatcctaccaggcttcggaataatctcccatattgtaacttactactccggaaaaaaagaaccatttggatacataggtatggtctgagctatgatatcaattggcttcctagggtttatcgtgtgagcacaccatatatttacagtaggaatagacgtagacacacgagcatatttcacctccgctaccataatcatcgctatccccaccggcgtcaaagtatttagctgactcgccacactccacggaagcaatatgaaatgatctgctgcagtgctctgagccctaggattcatctttcttttcaccgtaggtggcctgactggcattgtattagcaaactcatcactagacatcgtactacacgacacgtactacgttgtagcccacttccactatgtcctatcaataggagctgtatttgccatcataggaggcttcattcactgatttcccctattctcaggctacaccctagaccaaacctacgccaaaatccatttcactatcatattcatcggcgtaaatctaactttcttcccacaacactttctcggcctatccggaatgccccgacgttactcggactaccccgatgcatacaccacatgaaacatcctatcatctgtaggctcattcatttctctaacagcagtaatattaataattttcatgatttgagaagccttcgcttcgaagcgaaaagtcctaatagtagaagaaccctccataaacctggagtgactatatggatgccccccaccctaccacacattcgaagaacccgtatacataaaatctagacaaaaaaggaaggaatcgaaccccccaaagctggtttcaagccaaccccatggcctccatgactttttcaaaaaggtattagaaaaaccatttcataactttgtcaaagttaaattataggctaaatcctatatatcttaatggcacatgcagcgcaagtaggtctacaagacgctacttcccctatcatagaagagcttatcacctttcatgatcacgccctcataatcattttccttatctgcttcctagtcctgtatgcccttttcctaacactcacaacaaaactaactaatactaacatctcagacgctcaggaaatagaaaccgtctgaactatcctgcccgccatcatcctagtcctcatcgccctcccatccctacgcatcctttacataacagacgaggtcaacgatccctcccttaccatcaaatcaattggccaccaatggtactgaacctacgagtacaccgactacggcggactaatcttcaactcctacatacttcccccattattcctagaaccaggcgacctgcgactccttgacgttgacaatcgagtagtactcccgattgaagcccccattcgtataataattacatcacaagacgtcttgcactcatgagctgtccccacattaggcttaaaaacagatgcaattcccggacgtctaaaccaaaccactttcaccgctacacgaccgggggtatactacggtcaatgctctgaaatctgtggagcaaaccacagtttcatgcccatcgtcctagaattaattcccctaaaaatctttgaaatagggcccgtatttaccctatagcaccccctctaccccctctagagcccactgtaaagctaacttagcattaaccttttaagttaaagattaagagaaccaacacctctttacagtgaaatgccccaactaaatactaccgtatggcccaccataattacccccatactccttacactattcctcatcacccaactaaaaatattaaacacaaactaccacctacctccctcaccaaagcccataaaaataaaaaattataacaaaccctgagaaccaaaatgaacgaaaatctgttcgcttcattcattgcccccacaatcctaggcctacccgccgcagtactgatcattctatttccccctctattgatccccacctccaaatatctcatcaacaaccgactaatcaccacccaacaatgactaatcaaactaacctcaaaacaaatgataaccatacacaacactaaaggacgaacctgatctcttatactagtatccttaatcatttttattgccacaactaacctcctcggactcctgcctcactcatttacaccaaccacccaactatctataaacctagccatggccatccccttatgagcgggcgcagtgattataggctttcgctctaagattaaaaatgccctagcccacttcttaccacaaggcacacctacaccccttatccccatactagttattatcgaaaccatcagcctactcattcaaccaatagccctggccgtacgcctaaccgctaacattactgcaggccacctactcatgcacctaattggaagcgccaccctagcaatatcaaccattaaccttccctctacacttatcatcttcacaattctaattctactgactatcctagaaatcgctgtcgccttaatccaagcctacgttttcacacttctagtaagcctctacctgcacgacaacacataatgacccaccaatcacatgcctatcatatagtaaaacccagcccatgacccctaacaggggccctctcagccctcctaatgacctccggcctagccatgtgatttcacttccactccataacgctcctcatactaggcctactaaccaacacactaaccatataccaatgatggcgcgatgtaacacgagaaagcacataccaaggccaccacacaccacctgtccaaaaaggccttcgatacgggataatcctatttattacctcagaagtttttttcttcgcaggatttttctgagccttttaccactccagcctagcccctaccccccaattaggagggcactggcccccaacaggcatcaccccgctaaatcccctagaagtcccactcctaaacacatccgtattactcgcatcaggagtatcaatcacctgagctcaccatagtctaatagaaaacaaccgaaaccaaataattcaagcactgcttattacaattttactgggtctctattttaccctcctacaagcctcagagtacttcgagtctcccttcaccatttccgacggcatctacggctcaacattttttgtagccacaggcttccacggacttcacgtcattattggctcaactttcctcactatctgcttcatccgccaactaatatttcactttacatccaaacatcactttggcttcgaagccgccgcctgatactggcattttgtagatgtggtttgactatttctgtatgtctccatctattgatgagggtcttactcttttagtataaatagtaccgttaacttccaattaactagttttgacaacattcaaaaaagagtaataaacttcgccttaattttaataatcaacaccctcctagccttactactaataattattacattttgactaccacaactcaacggctacatagaaaaatccaccccttacgagtgcggcttcgaccctatatcccccgcccgcgtccctttctccataaaattcttcttagtagctattaccttcttattatttgatctagaaattgccctccttttacccctaccatgagccctacaaacaactaacctgccactaatagttatgtcatccctcttattaatcatcatcctagccctaagtctggcctatgagtgactacaaaaaggattagactgaaccgaattggtatatagtttaaacaaaacgaatgatttcgactcattaaattatgataatcatatttaccaaatgcccctcatttacataaatattatactagcatttaccatctcacttctaggaatactagtatatcgctcacacctcatatcctccctactatgcctagaaggaataatactatcgctgttcattatagctactctcataaccctcaacacccactccctcttagccaatattgtgcctattgccatactagtctttgccgcctgcgaagcagcggtgggcctagccctactagtctcaatctccaacacatatggcctagactacgtacataacctaaacctactccaatgctaaaactaatcgtcccaacaattatattactaccactgacatgactttccaaaaaacacataatttgaatcaacacaaccacccacagcctaattattagcatcatccctctactattttttaaccaaatcaacaacaacctatttagctgttccccaaccttttcctccgaccccctaacaacccccctcctaatactaactacctgactcctacccctcacaatcatggcaagccaacgccacttatccagtgaaccactatcacgaaaaaaactctacctctctatactaatctccctacaaatctccttaattataacattcacagccacagaactaatcatattttatatcttcttcgaaaccacacttatccccaccttggctatcatcacccgatgaggcaaccagccagaacgcctgaacgcaggcacatacttcctattctacaccctagtaggctcccttcccctactcatcgcactaatttacactcacaacaccctaggctcactaaacattctactactcactctcactgcccaagaactatcaaactcctgagccaacaacttaatatgactagcttacacaatagcttttatagtaaagatacctctttacggactccacttatgactccctaaagcccatgtcgaagcccccatcgctgggtcaatagtacttgccgcagtactcttaaaactaggcggctatggtataatacgcctcacactcattctcaaccccctgacaaaacacatagcctaccccttccttgtactatccctatgaggcataattataacaagctccatctgcctacgacaaacagacctaaaatcgctcattgcatactcttcaatcagccacatagccctcgtagtaacagccattctcatccaaaccccctgaagcttcaccggcgcagtcattctcataatcgcccacgggcttacatcctcattactattctgcctagcaaactcaaactacgaacgcactcacagtcgcatcataatcctctctcaaggacttcaaactctactcccactaatagctttttgatgacttctagcaagcctcgctaacctcgccttaccccccactattaacctactgggagaactctctgtgctagtaaccacgttctcctgatcaaatatcactctcctacttacaggactcaacatactagtcacagccctatactccctctacatatttaccacaacacaatggggctcactcacccaccacattaacaacataaaaccctcattcacacgagaaaacaccctcatgttcatacacctatcccccattctcctcctatccctcaaccccgacatcattaccgggttttcctcttgtaaatatagtttaaccaaaacatcagattgtgaatctgacaacagaggcttacgaccccttatttaccgagaaagctcacaagaactgctaactcatgcccccatgtctaacaacatggctttctcaacttttaaaggataacagctatccattggtcttaggccccaaaaattttggtgcaactccaaataaaagtaataaccatgcacactactataaccaccctaaccctgacttccctaattccccccatccttaccaccctcgttaaccctaacaaaaaaaactcatacccccattatgtaaaatccattgtcgcatccacctttattatcagtctcttccccacaacaatattcatgtgcctagaccaagaagttattatctcgaactgacactgagccacaacccaaacaacccagctctccctaagcttcaaactagactacttctccataatattcatccctgtagcattgttcgttacatggtccatcatagaattctcactgtgatatataaactcagacccaaacattaatcagttcttcaaatatctactcatcttcctaattaccatactaatcttagttaccgctaacaacctattccaactgttcatcggctgagagggcgtaggaattatatccttcttgctcatcagttgatgatacgcccgagcagatgccaacacagcagccattcaagcaatcctatacaaccgtatcggcgatatcggtttcatcctcgccttagcatgatttatcctacactccaactcatgagacccacaacaaatagcccttctaaacgctaatccaagcctcaccccactactaggcctcctcctagcagcagcaggcaaatcagcccaattaggtctccacccctgactcccctcagccatagaaggccccaccccagtctcagccctactccactcaagcactatagttgtagcaggaatcttcttactcatccgcttccaccccctagcagaaaatagcccactaatccaaactctaacactatgcttaggcgctatcaccactctgttcgcagcagtctgcgcccttacacaaaatgacatcaaaaaaatcgtagccttctccacttcaagtcaactaggactcataatagttacaatcggcatcaaccaaccacacctagcattcctgcacatctgtacccacgccttcttcaaagccatactatttatgtgctccgggtccatcatccacaaccttaacaatgaacaagatattcgaaaaataggaggactactcaaaaccatacctctcacttcaacctccctcaccattggcagcctagcattagcaggaatacctttcctcacaggtttctactccaaagaccacatcatcgaaaccgcaaacatatcatacacaaacgcctgagccctatctattactctcatcgctacctccctgacaagcgcctatagcactcgaataattcttctcaccctaacaggtcaacctcgcttccccacccttactaacattaacgaaaataaccccaccctactaaaccccattaaacgcctggcagccggaagcctattcgcaggatttctcattactaacaacatttcccccgcatcccccttccaaacaacaatccccctctacctaaaactcacagccctcgctgtcactttcctaggacttctaacagccctagacctcaactacctaaccaacaaacttaaaataaaatccccactatgcacattttatttctccaacatactcggattctaccctagcatcacacaccgcacaatcccctatctaggccttcttacgagccaaaacctgcccctactcctcctagacctaacctgactagaaaagctattacctaaaacaatttcacagcaccaaatctccacctccatcatcacctcaacccaaaaaggcataattaaactttacttcctctctttcttcttcccactcatcctaaccctactcctaatcacataacctattcccccgagcaatctcaattacaatatatacaccaacaaacaatgttcaaccagtaactactactaatcaacgcccataatcatacaaagcccccgcaccaataggatcctcccgaatcaaccctgacccctctccttcataaattattcagcttcctacactattaaagtttaccacaaccaccaccccatcatactctttcacccacagcaccaatcctacctccatcgctaaccccactaaaacactcaccaagacctcaacccctgacccccatgcctcaggatactcctcaatagccatcggtgtagtatatccaaagacaaccatcattccccctaaataaattaaaaaaactattaaacccatataacctcccccaaaattcagaataataacacacccgaccacaccgctaacaatcaatactaaacccccataaataggagaaggcttagaagaaaaccccacaaaccccattactaaacccacactcaacagaaacaaagcatacatcattattctcgcacggactacaaccacgaccaatgatatgaaaaaccatcgttgtatttcaactacaagaacaccaatgaccccaatacgcaaaactaaccccctaataaaattaattaaccactcattcatcgacctccccaccccatccaacatctccgcatgatgaaacttcggctcactccttggcgcctgcctgatcctccaaatcaccacaggactattcctagccatgcactactcaccagacgcctcaaccgccttttcatcaatcgcccacatcactcgagacgtaaattatggctgaatcatccgctaccttcacgccaatggcgcctcaatattctttatctgcctcttcctacacatcgggcgaggcctatattacggatcatttctctactcagaaacctgaaacatcggcattatcctcctgcttgcaactatagcaacagccttcataggctatgtcctcccgtgaggccaaatatcattctgaggggccacagtaattacaaacttactatccgccatcccatacattgggacagacctagttcaatgaatctgaggaggctactcagtagacagtcccaccctcacacgattctttacctttcacttcatcttgcccttcattattgcagccctagcagcactccacctcctattcttgcacgaaacgggatcaaacaaccccctaggaatcacctcccattccgataaaatcaccttccacccttactacacaatcaaagacgccctcggcttacttctcttccttctctccttaatgacattaacactattctcaccagacctcctaggcgacccagacaattataccctagccaaccccttaaacacccctccccacatcaagcccgaatgatatttcctattcgcctacacaattctccgatccgtccctaacaaactaggaggcgtccttgccctattactatccatcctcatcctagcaataatccccatcctccatatatccaaacaacaaagcataatatttcgcccactaagccaatcactttattgactcctagccgcagacctcctcattctaacctgaatcggaggacaaccagtaagctacccttttaccatcattggacaagtagcatccgtactatacttcacaacaatcctaatcctaataccaactatctccctaattgaaaacaaaatactcaaatgggcctgtccttgtagtataaactaatacaccagtcttgtaaaccggagatgaaaacctttttccaaggacaaatcagagaaaaagtctttaactccaccattagcacccaaagctaagattctaatttaaactattctctgttctttcatggggaagcagatttgggtaccacccaagtattgactcacccatcaacaaccgctatgtatttcgtacattactgccagccaccatgaatattgtacggtaccataaatacttgaccacctgtagtacataaaaacccaatccacatcaaaaccccctccccatgcttacaagcaagtacagcaatcaaccctcaactatcacacatcaactgcaactccaaagccacccctcacccactaggataccaacaaacctacccacccttaacagtacatagcacataaagccatttaccgtacatagcacattacagtcaaatcccttctcgtccccatggatgacccccctcagataggggtcccttgaccaccatcctccgtgaaatcaatatcccgcacaagagtgctactctcctcgctccgggcccataacacttgggggtagctaaagtgaactgtatccgacatctggttcctacttcagggccataaagcctaaatagcccacacgttccccttaaataagacatcacgatg

SEQ ID NO: 38 - DNA, 16562 bp, Homo sapiens mitochondrial
  3109: "n" refers to a nucleotide at position 3107 of the Cambridge Reference Sequence (CRS, Anderson et al. 1981 Nature 290:457-465), later determined to be absent from the human mtDNA sequence according to the revised CRS (rCRS, Andrews et al. 1999 Nature Genetics 23:147); "n" therefore represents a single nucleotide deletion at a position corresponding to nucleotide 3107 of SEQ ID NO:1 as provided herein.
gatcacaggtctatcaccctattaaccactcacgggagctctccatgcatttggtattttcgtctggggggtgtgcacgcgatagcattgcgagacgctggagccggagcaccctatgtcgcagtatctgtctttgattcctgcctcatcctattatttatcgcacctacgttcaatattacaggcgaacatacttactaaagtgtgttaattaattaatgcttgtaggacataataataacaattgaatgtctgcacagccgctttccacacagacatcataacaaaaaatttccaccaaaccccccctcccccccgcttctggccacagcacttaaacacatctctgccaaaccccaaaaacaaagaaccctaacaccagcctaaccagatttcaaattttatcttttggcggtatgcacttttaacagtcaccccccaactaacacattattttcccctcccactcccatactactaatctcatcaatacaacccccgcccatcctacccagcacacacacaccgctgctaaccccataccccgaaccaaccaaaccccaaagacaccccccacagtttatgtagcttacctcctcaaagcaatacactgaaaatgtttagacgggctcacatcaccccataaacaaataggtttggtcctagcctttctattagctcttagtaagattacacatgcaagcatccccattccagtgagttcaccctctaaatcaccacgatcaaaagggacaagcatcaagcacgcagcaatgcagctcaaaacgcttagcctagccacacccccacgggaaacagcagtgattaacctttagcaataaacgaaagtttaactaagctatactaaccccagggttggtcaatttcgtgccagccaccgcggtcacacgattaacccaagtcaatagaagccggcgtaaagagtgttttagatcaccccctccccaataaagctaaaactcacctgagttgtaaaaaactccagttgacacaaaatagactacgaaagtggctttaacatatctgaacacacaatagctaagacccaaactgggattagataccccactatgcttagccctaaacctcaacagttaaatcaacaaaactgctcgccagaacactacgagccacagcttaaaactcaaaggacctggcggtgcttcatatccctctagaggagcctgttctgtaatcgataaaccccgatcaacctcaccacctcttgctcagcctatataccgccatcttcagcaaaccctgatgaaggctacaaagtaagcgcaagtacccacgtaaagacgttaggtcaaggtgtagcccatgaggtggcaagaaatgggctacattttctaccccagaaaactacgatagcccttatgaaacttaagggtcgaaggtggatttagcagtaaactgagagtagagtgcttagttgaacagggccctgaagcgcgtacacaccgcccgtcaccctcctcaagtatacttcaaaggacatttaactaaaacccctacgcatttatatagaggagacaagtcgtaacatggtaagtgtactggaaagtgcacttggacgaaccagagtgtagcttaacacaaagcacccaacttacacttaggagatttcaacttaacttgaccgctctgagctaaacctagccccaaacccactccaccttactaccagacaaccttagccaaaccatttacccaaataaagtataggcgatagaaattgaaacctggcgcaatagatatagtaccgcaagggaaagatgaaaaattataaccaagcataatatagcaaggactaacccctataccttctgcataatgaattaactagaaataactttgcaaggagaaccaaagctaagacccccgaaaccagacgagctacctaagaacagctaaaagagcacacccgtctatgtagcaaaatagtgggaagatttataggtagaggcgacaaacctaccgagcctggtgatagctggttgtccaagatagaatcttagttcaactttaaatttgcccacagaaccctctaaatccccttgtaaatttaactgttagtccaaagaggaacagctctttggacactaggaaaaaaccttgtagagagagtaaaaaatttaacacccatagtaggcctaaaagcagccaccaattaagaaagcgttcaagctcaacacccactacctaaaaaatcccaaacatataactgaactcctcacacccaattggaccaatctatcaccctatagaagaactaatgttagtataagtaacatgaaaacattctcctccgcataagcctgcgtcagattaaaacactgaactgacaattaacagcccaatatctacaatcaaccaacaagtcattattaccctcactgtcaacccaacacaggcatgctcataaggaaaggttaaaaaaagtaaaaggaactcggcaaatcttaccccgcctgtttaccaaaaacatcacctctagcatcaccagtattagaggcaccgcctgcccagtgacacatgtttaacggccgcggtaccctaaccgtgcaaaggtagcataatcacttgttccttaaatagggacctgtatgaatggctccacgagggttcagctgtctcttacttttaaccagtgaaattgacctgcccgtgaagaggcgggcatgacacagcaagacgagaagaccctatggagctttaatttattaatgcaaacagtacctaacaaacccacaggtcctaaactaccaaacctgcattaaaaatttcggttggggcgacctcggagcagaacccaacctccgagcagtacatgctaagacttcaccagtcaaagcgaactactatactcaattgatccaataacttgaccaacggaacaagttaccctagggataacagcgcaatcctattctagagtccatatcaacaatagggtttacgacctcgatgttggatcaggacatcccgatggtgcagccgctattaaaggttcgtttgttcaacgattaaagtcctacgtgatctgagttcagaccggagtaatccaggtcggtttctatctacnttcaaattcctccctgtacgaaaggacaagagaaataaggcctacttcacaaagcgccttcccccgtaaatgatatcatctcaacttagtattatacccacacccacccaagaacagggtttgttaagatggcagagcccggtaatcgcataaaacttaaaactttacagtcagaggttcaattcctcttcttaacaacatacccatggccaacctcctactcctcattgtacccattctaatcgcaatggcattcctaatgcttaccgaacgaaaaattctaggctatatacaactacgcaaaggccccaacgttgtaggcccctacgggctactacaacccttcgctgacgccataaaactcttcaccaaagagcccctaaaacccgccacatctaccatcaccctctacatcaccgccccgaccttagctctcaccatcgctcttctactatgaacccccctccccatacccaaccccctggtcaacctcaacctaggcctcctatttattctagccacctctagcctagccgtttactcaatcctctgatcagggtgagcatcaaactcaaactacgccctgatcggcgcactgcgagcagtagcccaaacaatctcatatgaagtcaccctagccatcattctactatcaacattactaataagtggctcctttaacctctccacccttatcacaacacaagaacacctctgattactcctgccatcatgacccttggccataatatgatttatctccacactagcagagaccaaccgaacccccttcgaccttgccgaaggggagtccgaactagtctcaggcttcaacatcgaatacgccgcaggccccttcgccctattcttcatagccgaatacacaaacattattataataaacaccctcaccactacaatcttcctaggaacaacatatgacgcactctcccctgaactctacacaacatattttgtcaccaagaccctacttctaacctccctgttcttatgaattcgaacagcatacccccgattccgctacgaccaactcatacacctcctatgaaaaaacttcctaccactcaccctagcattacttatatgacatgtctccatacccattacaatctccagcattccccctcaaacctaagaaatatgtctgataaaagagttactttgatagagtaaataataggagcttaaacccccttatttctaggactatgagaatcgaacccatccctgagaatccaaaattctccgtgccacctatcacaccccatcctaaagtaaggtcagctaaataagctatcgggcccataccccgaaaatgttggttatacccttcccgtactaattaatcccctggcccaacccgtcatctactctaccatctttgcaggcacactcatcacagcgctaagctcgcactgattttttacctgagtaggcctagaaataaacatgctagcttttattccagttctaaccaaaaaaataaaccctcgttccacagaagctgccatcaagtatttcctcacgcaagcaaccgcatccataatccttctaatagctatcctcttcaacaatatactctccggacaatgaaccataaccaatactaccaatcaatactcatcattaataatcataatggctatagcaataaaactaggaatagccccctttcacttctgagtcccagaggttacccaaggcacccctctgacatccggcctgcttcttctcacatgacaaaaactagcccccatctcaatcatataccaaatctctccctcactagacgtaagccttctcctcactctctcaatcttatccatcatagcaggcagttgaggtggattaaaccaaacccagctacgcaaaatcttagcatactcctcaattacccacataggatgaataatagcagttctaccgtacaaccctaacataaccattcttaatttaactatttatattatcctaactactaccgcattcctactactcaacttaaactccagcaccacgaccctactactatctcgcacctgaaacaagctaacatgactaacacccttaattccatccaccctcctctccctaggaggcctgcccccgctaaccggctttttgcccaaatgggccattatcgaagaattcacaaaaaacaatagcctcatcatccccaccatcatagccaccatcaccctccttaacctctacttctacctacgcctaatctactccacctcaatcacactactccccatatctaacaacgtaaaaataaaatgacagtttgaacatacaaaacccaccccattcctccccacactcatcgcccttaccacgctactcctacctatctccccttttatactaataatcttatagaaatttaggttaaatacagaccaagagccttcaaagccctcagtaagttgcaatacttaatttctgtaacagctaaggactgcaaaaccccactctgcatcaactgaacgcaaatcagccactttaattaagctaagcccttactagaccaatgggacttaaacccacaaacacttagttaacagctaagcaccctaatcaactggcttcaatctacttctcccgccgccgggaaaaaaggcgggagaagccccggcaggtttgaagctgcttcttcgaatttgcaattcaatatgaaaatcacctcggagctggtaaaaagaggcctaacccctgtctttagatttacagtccaatgcttcactcagccattttacctcacccccactgatgttcgccgaccgttgactattctctacaaaccacaaagacattggaacactatacctattattcggcgcatgagctggagtcctaggcacagctctaagcctccttattcgagccgagctgggccagccaggcaaccttctaggtaacgaccacatctacaacgttatcgtcacagcccatgcatttgtaataatcttcttcatagtaatacccatcataatcggaggctttggcaactgactagttcccctaataatcggtgcccccgatatggcgtttccccgcataaacaacataagcttctgactcttacctccctctctcctactcctgctcgcatctgctatagtggaggccggagcaggaacaggttgaacagtctaccctcccttagcagggaactactcccaccctggagcctccgtagacctaaccatcttctccttacacctagcaggtgtctcctctatcttaggggccatcaatttcatcacaacaattatcaatataaaaccccctgccataacccaataccaaacgcccctcttcgtctgatccgtcctaatcacagcagtcctacttctcctatctctcccagtcctagctgctggcatcactatactactaacagaccgcaacctcaacaccaccttcttcgaccccgccggaggaggagaccccattctataccaacacctattctgatttttcggtcaccctgaagtttatattcttatcctaccaggcttcggaataatctcccatattgtaacttactactccggaaaaaaagaaccatttggatacataggtatggtctgagctatgatatcaattggcttcctagggtttatcgtgtgagcacaccatatatttacagtaggaatagacgtagacacacgagcatatttcacctccgctaccataatcatcgctatccccaccggcgtcaaagtatttagctgactcgccacactccacggaagcaatatgaaatgatctgctgcagtgctctgagccctaggattcatctttcttttcaccgtaggtggcctgactggcattgtattagcaaactcatcactagacatcgtactacacgacacgtactacgttgtagctcacttccactatgtcctatcaataggagctgtatttgccatcataggaggcttcattcactgatttcccctattctcaggctacaccctagaccaaacctacgccaaaatccatttcactatcatattcatcggcgtaaatctaactttcttcccacaacactttctcggcctatccggaatgccccgacgttactcggactaccccgatgcatacaccacatgaaacatcctatcatctgtaggctcattcatttctctaacagcagtaatattaataattttcatgatttgagaagccttcgcttcgaagcgaaaagtcctaatagtagaagaaccctccataaacctggagtgactatatggatgccccccaccctaccacacattcgaagaacccgtatacataaaatctagacaaaaaaggaaggaatcgaaccccccaaagctggtttcaagccaaccccatggcctccatgactttttcaaaaaggtattagaaaaaccatttcataactttgtcaaagttaaattataggctaaatcctatatatcttaatggcacatgcagcgcaagtaggtctacaagacgctacttcccctatcatagaagagcttatcacctttcatgatcacgccctcataatcattttccttatctgcttcctagtcctgtatgcccttttcctaacactcacaacaaaactaactaatactaacatctcagacgctcaggaaatagaaaccgtctgaactatcctgcccgccatcatcctagtcctcatcgccctcccatccctacgcatcctttacataacagacgaggtcaacgatccctcccttaccatcaaatcaattggccaccaatggtactgaacctacgagtacaccgactacggcggactaatcttcaactcctacatacttcccccattattcctagaaccaggcgacctacgactccttgacgttgacaatcgagtagtactcccgattgaagcccccattcgtataataattacatcacaagacgtcttgcactcatgagctgtccccacattaggcttaaaaacagatgcaattcccggacgtctaaaccaaaccactttcaccgctacacgaccgggggtatactacggtcaatgctctgaaatctgtggagcaaaccacagtttcatgcccatcgtcctagaattaattcccctaaaaatctttgaaatagggcccgtatttaccctatagtaccccctctagagcccactgtaaagctaacttagcattaaccttttaagttaaagattaagagaaccaacacctctttacagtgaaatgccccaactaaatactaccgtatggcccaccataattacccccatactccttacactattcctcatcacccaactaaaaatattaaacacaaactaccacctacctccctcaccaaagcccataaaaataaaaaattataacaaaccctgagaaccaaaatgaacgaaaatctgttcgcttcattcattgcccccacaatcctaggcctacccgccgcagtactgatcattctatttccccctctattgatccccacctccaaatatctcatcaacaaccgactaatcaccacccaacaatgactaatcaaactaacctcaaaacaaataataaccatacacaacactaaaggacgaacctgatctcttatactagtatccttaatcatttttattgccacaactaacctcctcggactcctgcctcactcatttacaccaaccacccaactatctataaacctagccatggccatccccttatgagcgggcgcagtgattataggctttcgctctaagattaaaaatgccctagcccacttcttaccacaaggcacacctacaccccttatccccatactagttattatcgaaaccatcagcctactcattcaaccaatagccctggccgtacgcctaaccgctaacattactgcaggccacctactcatgcacctaattggaagcgccaccctagcaatatcaaccattaaccttccctctacacttatcatcttcacaattctaattctactgactatcctagaaatcgctgtcgccttaatccaagcctacgttttcacacttctagtaagcctctacctgcacgacaacacataatgacccaccaatcacatgcctatcatatagtaaaacccagcccatgacccctaacaggggccctctcagccctcctaatgacctccggcctagccatgtgatttcacttccactccataacgctcctcatactaggcctactaaccaacacactaaccatataccaatgatggcgcgatgtaacacgagaaagcacataccaaggccaccacacaccacctgtccaaaaaggccttcgatacgggataatcctatttattacctcagaagtttttttcttcgcaggatttttctgagccttttaccactccagcctagcccctaccccccaattaggagggcactggcccccaacaggcatcaccccgctaaatcccctagaagtcccactcctaaacacatccgtattactcgcatcaggagtatcaatcacctgagctcaccatagtctaatagaaaacaaccgaaaccaaataattcaagcactgcttattacaattttactgggtctctattttaccctcctacaagcctcagagtacttcgagtctcccttcaccatttccgacggcatctacggctcaacattttttgtagccacaggcttccacggacttcacgtcattattggctcaactttcctcactatctgcttcatccgccaactaatatttcactttacatccaaacatcactttggcttcgaagccgccgcctgatactggcattttgtagatgtggtttgactatttctgtatgtctccatctattgatgagggtcttactcttttagtataaatagtaccgttaacttccaattaactagttttgacaacattcaaaaaagagtaataaacttcgccttaattttaataatcaacaccctcctagccttactactaataattattacattttgactaccacaactcaacggctacatagaaaaatccaccccttacgagtgcggcttcgaccctatatcccccgcccgcgtccctttctccataaaattcttcttagtagctattaccttcttattatttgatctagaaattgccctccttttacccctaccatgagccctacaaacaactaacctgccactaatagttatgtcatccctcttattaatcatcatcctagccctaagtctggcctatgagtgactacaaaaaggattagactgaaccgaattggtatatagtttaaacaaaacgaatgatttcgactcattaaattatgataatcatatctaccaaatgcccctcatttacataaatattatactagcatttaccatctcacttctaggaatactagtatatcgctcacacctcatatcctccctactatgcctagaaggaataatactatcgctgttcattatagctactctcataaccctcaacacccactccctcttagccaatattgtgcctattgccatactagtctttgccgcctgcgaagcagcggtgggcctagccctactagtctcaatctccaacacatatggcctagactacgtacataacctaaacctactccaatgctaaaactaatcgtcccaacaattatattactaccactgacatgactttccaaaaaacacataatttgaatcaacacaaccacccacagcctaattattagcatcatccctctactattttttaaccaaatcaacaacaacctatttagctgttccccaaccttttcctccgaccccctaacaacccccctcctaatactaactacctgactcctacccctcacaatcatggcaagccaacgccacttatccagtgaaccactatcacgaaaaaaactctacctctctatactaatctccctacaaatctccttaattataacattcacagccacagaactaatcatattttatatcttcttcgaaaccacacttatccccaccttggctatcatcacccgatgaggcaaccagccagaacgcctgaacgcaggcacatacttcctattctacaccctagtaggctcccttcccctactcatcgcactgatttacactcacaacaccctaggctcactaaacattctactactcactctcactgcccaagaactatcaaactcctgagccaacaacttaatatgactagcttacacaatagcttttatagtaaagatacctctttacggactccacttatgactccctaaagcccatgtcgaagcccccatcgctgggtcaatagtacttgccgcagtactcttaaaactaggcggctatggtataatacgcctcacactcattctcaaccccctgacaaaacacatagcctaccccttccttgtactatccctatgaggcataattataacaagctccatctgcctacgacaaacagacctaaaatcgctcattgcatactcttcaatcagccacatagccctcgtagtaacagccattctcatccaaaccccctgaagcttcaccggcgcagtcattctcataatcgcccacggacttacatcctcattactattctgcctagcaaactcaaactacgaacgcactcacagtcgcatcataatcctctctcaaggacttcaaactctgctcccactaatagctttttgatgacttctagcaagcctcgctaacctcgccttaccccccactattaacctactgggagaactctctgtgctagtaaccacgttctcctgatcaaatatcactctcctacttacaggactcaacatactagtcacagccctatactccctctacatatttaccacaacacaatggggctcactcacccaccacattaacaacataaaaccctcattcacacgagaaaacaccctcatgttcatacacctatcccccattctcctcctatccctcaaccccgacatcattaccgggttttcctcttgtaaatatagtttaaccaaaacatcagattgtgaatctgacaacagaggcttacgaccccttatttaccgagaaagctcacaagaactgctaactcatgcccccatgtctaacaacatggctttctcaacttttaaaggataacagctatccattggtcttaggccccaaaaattttggtgcaactccaaataaaagtaataaccatgcacactactataaccaccctaaccctgacttccctaattccccccatccttaccaccctcgttaaccctaacaaaaaaaactcatacccccattatgtaaaatccattgtcgcatccacctttattatcagtctcttccccacaacaatattcatgtgcctagaccaagaagttattatctcgaactgacactgagccacaacccaaacaacccagctctccctaagcttcaaactagactacttctccataatattcatccctgtagcattgttcgttacatggtccatcatagaattctcactgtgatatataaactcagacccaaacattaatcagttcttcaaatatctactcatcttcctaattaccatactaatcttagttaccgctaacaacctattccaactgttcatcggctgagagggcgtaggaattatatccttcttgctcatcagttgatgatacgcccgagcagatgccaacacagcagccattcaagcaatcctatacaaccgtatcggcgatatcggtttcatcctcgccttagcatgatttatcctacactccaactcatgagacccacaacaaatagcccttctaaacgctaatccaagcctcaccccactactaggcctcctcctagcagcagcaggcaaatcagcccaattaggtctccacccctgactcccctcagccatagaaggccccaccccagtctcagccctactccactcaagcactatagttgtagcaggaatcttcttactcatccgcttccaccccctagcagaaaatagcccactaatccaaactctaacactatgcttaggcgctatcaccactctgttcgcagcagtctgcgcccttacacaaaatgacatcaaaaaaatcgtagccttctccacttcaagtcaactaggactcataatagttacaatcggcatcaaccaaccacacctagcattcctgcacatctgtacccacgccttcttcaaagccatactatttatgtgctccggatccatcatccacaaccttaacaatgaacaagatattcgaaaaataggaggactactcaaaaccatacctctcacttcaacctccctcaccattggcagcctagcattagcaggaatacctttcctcacaggtttctactccaaagaccacatcatcgaaaccgcaaacatatcatacacaaacgcctgagccctatctattactctcatcgctacctccctgacaagcgcctatagcactcgaataattcttctcaccctaacaggtcaacctcgcttccccacccttactaacattaacgaaaataaccccaccctactaaaccccattaaacgcctggcagccggaagcctattcgcaggatttctcattactaacaacatttcccccgcatcccccttccaaacaacaatccccctctacctaaaactcacagccctcgctgtcactttcctaggacttctaacagccctagacctcaactacctaaccaacaaacttaaaataaaatccccactatgcacattttatttctccaacatactcggattctaccctagcatcacacaccgcacaatcccctatctaggccttcttacgagccaaaacctgcccctactcctcctagacctaacctgactagaaaagctattacctaaaacaatttcacagcaccaaatctccacctccatcatcacctcaacccaaaaaggcataattaaactttacttcctctctttcttcttcccactcatcctaaccctactcctaatcacataacctattcccccgagcaatctcaattacaatatatacaccaacaaacaatgttcaaccagtaactactactaatcaacgcccatagtcatacaaagcccccgcaccaataggatcctcccgaatcaaccctgacccctctccttcataaattattcagcttcctacactattaaagtttaccacaaccaccaccccatcatactctttcacccacagcaccaatcctacctccatcgctaaccccactaaaacactcaccaagacctcaacccctgacccccatgcctcaggatactcctcaatagccatcgctgtagtatatccaaagacaaccatcattccccctaaataaattaaaaaaactattaaacccatataacctcccccaaaattcagaataataacacacccgaccacaccgctaacaatcaatactaaacccccataaataggagaaggcttagaagaaaaccccacaaaccccattactaaacccacactcaacagaaacaaagcatacatcattattctcgcacggactacaaccacgaccaatgatatgaaaaaccatcgttgtatttcaactacaagaacaccaatgaccccaatacgcaaaattaaccccctaataaaattaattaaccactcattcatcgacctccccaccccatccaacatctccgcatgatgaaacttcggctcactccttggcgcctgcctgatcctccaaatcaccacaggactattcctagccatacactactcaccagacgcctcaaccgccttttcatcaatcgcccacatcactcgagacgtaaattatggctgaatcatccgctaccttcacgccaatggcgcctcaatattctttatctgcctcttcctacacatcgggcgaggcctatattacggatcatttctctactcagaaacctgaaacatcggcattatcctcctgcttgcaactatagcaacagccttcataggctatgtcctcccgtgaggccaaatatcattctgaggggccacagtaattacaaacttactatccgccatcccatacattgggacagacctagttcaatgaatctgaggaggctactcagtagacagtcccaccctcacacgattctttacctttcacttcatcttgcccttcattattgcagccctagcagcactccacctcctattcttgcacgaaacgggatcaaacaaccccctaggaatcacctcccattccgataaaatcaccttccacccttactacacaatcaaagacgccctcggcttacttctcttcattctctccttaatgacattaacactattctcaccagacctcctaggcgacccagacaattataccctagccaaccccttaaacacccctccccacatcaagcccgaatgatatttcctattcgcctacacaattctccgatccgtccctaacaagctaggaggcgtccttgccctattactatccatcctcatcctagcaataatccccatcctccatatatccaaacaacaaagcataatatttcgcccactaagccaatcactttattgactcctagccgcagacctcctcattctaacctgaatcggaggacaaccagtaagctacccttttaccatcattggacaagtagcatccgtactatacttcacaacaatcctaatcctaataccaactatctccctaattgaaaacaaaatactcaaatgggcctgtccttgtagtataaactaatacaccagtcttgtaaaccgaagatgaaaacctttttccaaggacaaatcagagaaaaagtctttaactccaccattagcacccaaagctaagattctaatttaaactattctctgttctttcatggggaagcagatttgggtaccacccaagtattgactcacccatcaacaaccgctatgtatttcgtacattactgccagccaccatgaatattgcacggtaccataaacacttgaccacctgtagtacataaaaacccaatccacatcaaaaccccccccccatgcttacaagcaagtacagcaatcaaccctcaactatcacacatcaactgcaactccaaagccacccctcacccactaggataccaacaaacctacccatctttaacagtacatagcacataaagccatttaccgtacatagcacattacagtcaaatcccttctcgtccccatggatgacccccctcagataggggtcccttgaccaccatcctccgtgaaatcaatatcccgcacaagagtgctactctcctcgctccgggcccataacacttgggggtagctaaagtgaactgtatccgacatctggttcctacttcagggccataaagcctaaatagcccacacgttccccttaaataagacatcacgatg

SEQ ID NO: 39 - DNA, 16571 bp, Homo sapiens mitochondrial
  3109: "n" refers to a nucleotide at position 3107 of the Cambridge Reference Sequence (CRS, Anderson et al. 1981 Nature 290:457-465), later determined to be absent from the human mtDNA sequence according to the revised CRS (rCRS, Andrews et al. 1999 Nature Genetics 23:147); "n" therefore represents a single nucleotide deletion at a position corresponding to nucleotide 3107 of SEQ ID NO:1 as provided herein.
gatcacaggtctatcaccctattaaccactcacgggagctctccatgcatttggtattttcgtctggggggtgtgcacgcgatagcattgcgagacgctggagccggagcaccctatgtcgcagtatctgtctttgattcctgcctcatcccattatttatcgcacctacgttcaatattacaggcgaacatacttactaaagtgtgttaattgattaatgcttgtaggacataataataacaattgaatgtctgcacagccgctttccacacagacatcataacaaaaaatttccaccaaaccccccctcccccccgcttctggccacagcacttaaacacatctctgccaaaccccaaaaacaaagaaccctaacaccagcctaaccagatttcaaattttatcttttggcggtatgcacttttaacagtcaccccccaactaacacattattttcccctcccactcccatactactaatctcatcaatacaacccccgcccatcctacccagcacacacacaccgctgctaaccccataccccgaaccaaccaaaccccaaagacaccccccacagtttatgtagcttacctcctcaaagcaatacactgaaaatgtttagacgggctcacatcaccccataaacaaataggtttggtcctagcctttctattagctcttagtaagattacacatgcaagcatccccattccagtgagttcaccctctaaatcaccacgatcaaaagggacaagcatcaagcacgcagcaatgcagctcaaaacgcttagcctagccacacccccacgggaaacagcagtgattaacctttagcaataaacgaaagtttaactaagctatactaaccccagggttggtcaatttcgtgccagccaccgcggtcacacgattaacccaagtcaatagaaaccggcgtaaagagtgttttagatcaccccctccccaataaagctaaaactcacctgagttgtaaaaaactccagttgacacaaaatagactacgaaagtggctttaacatatctgaacacacaatagctaagacccaaactgggattagataccccactatgcttagccctaaacctcaacagttaaatcaacaaaactgctcgccagaacactacgagccacagcttaaaactcaaaggacctggcggtgcttcatatccctctagaggagcctgttctgtaatcgataaaccccgatcaacctcaccacctcttgctcagcctatataccgccatcttcagcaaaccctgatgaaggctacaaagtaagcgcaagtacccacgtaaagacgttaggtcaaggtgtagcccatgaggtggcaagaaatgggctacattttctaccccagaaaactacgatagcccttatgaaacttaagggtcgaaggtggatttagcagtaaactgagagtagagtgcttagttgaacagggccctgaagcgcgtacacaccgcccgtcaccctcctcaagtatacttcaaaggacatttaactaaaacccctacgcatttatatagaggagacaagtcgtaacatggtaagtgtactggaaagtgcacttggacgaaccagagtgtagcttaacacaaagcacccaacttacacttaggagatttcaacttaacttgaccgctctgagctaaacctagccccaaacccactccaccttactaccagacaaccttagccaaaccatttacccaaataaagtataggcgatagaaattgaaacctggcgcaatagatatagtaccgcaagggaaagatgaaaaattataaccaagcataatatagcaaggactaacccctataccttctgcataatgaattaactagaaataactttgcaaggagaaccaaagctaagacccccgaaaccagacgagctacctaagaacagctaaaagagcacacccgtctatgtagcaaaatagtgggaagatttataggtagaggcgacaaacctaccgagcctggtgatagctggttgtccaagatagaatcttagttcaactttaaatttgcccacagaaccctctaaatccccttgtaaatttaactgttagtccaaagaggaacagctctttggacactaggaaaaaaccttgtagagagagtaaaaaatttaacacccatagtaggcctaaaagcagccaccaattaagaaagcgttcaagctcaacacccactacctaaaaaatcccaaacatataactgaactcctcacacccaattggaccaatctatcaccctatagaagaactaatgttagtataagtaacatgaaaacattctcctccgcataagcctgcgtcagattaaaacactgaactgacaattaacagcccaatatctacaatcaaccaacaagtcattattaccctcactgtcaacccaacacaggcatgctcataaggaaaggttaaaaaaagtaaaaggaactcggcaaatcttaccccgcctgtttaccaaaaacatcacctctagcatcaccagtattagaggcaccgcctgcccagtgacacatgtttaacggccgcggtaccctaaccgtgcaaaggtagcataatcacttgttccttaaatagggacctgtatgaatggctccacgagggttcagctgtctcttacttttaaccagtgaaattgacctgcccgtgaagaggcgggcatgacacagcaagacgagaagaccctatggagctttaatttattaatgcaaacagtacctaacaaacccacaggtcctaaactaccaaacctgcattaaaaatttcggttggggcgacctcggagcagaacccaacctccgagcagtacatgctaagacttcaccagtcaaagcgaactactatactcaattgatccaataacttgaccaacggaacaagttaccctagggataacagcgcaatcctattctagagtccatatcaacaatagggtttacgacctcgatgttggatcaggacatcccgatggtgcagccgctattaaaggttcgtttgttcaacgattaaagtcctacgtgatctgagttcagaccggagtaatccaggtcggtttctatctacnttcaaattcctccctgtacgaaaggacaagagaaataaggcctacttcacaaagcgccttcccccgtaaatgatatcatctcaacttagtattatacccacacccacccaagaacagggtttgttaagatggcagagcccggtaatcgcataaaacttaaaactttacagtcagaggttcaattcctcttcttaacaacatacccatggccaacctcctactcctcattgtacccattctaatcgcaatggcattcctaatgcttaccgaacgaaaaattctaggctatatacaactacgcaaaggccccaacgttgtaggcccctacgggctactacaacccttcgctgacgccataaaactcttcaccaaagagcccctaaaacccgccacatctaccatcaccctctacatcaccgccccgaccttagctctcaccatcgctcttctactatgaacccccctccccatacccaaccccctggtcaacctcaacctaggcctcctatttattctagccacctctagcctagccgtttactcaatcctctgatcagggtgagcatcaaactcaaactacgccctgatcggcgcactgcgagcagtagcccaaacaatctcatatgaagtcaccctagccatcattctactatcaacattactaataagtggctcctttaacctctccacccttatcacaacacaagaacacctctgattactcctgccatcatgacccttggccataatatgatttatctccacactagcagagaccaaccgaacccccttcgaccttgccgaaggggagtccgaactagtctcaggcttcaacatcgaatacgccgcaggccccttcgccctattcttcatagccgaatacacaaacattattataataaacaccctcaccactacaatcttcctaggaacaacatatgacgcactctcccctgaactctacacaacatattttgtcaccaagaccctacttctaacctccctgttcttatgaattcgaacagcatacccccgattccgctacgaccaactcatacacctcctatgaaaaaacttcctaccactcaccctagcattacttatatgacatgtctccatacccattacaatctccagcattccccctcaaacctaagaaatatgtctgataaaagagttactttgatagagtaaataataggagcttaaacccccttatttctaggactatgagaatcgaacccatccctgagaatccaaaattctccgtgccacctatcacaccccatcctaaagtaaggtcagctaaataagctatcgggcccataccccgaaaatgttggttatacccttcccgtactaattaatcccctggcccaacccgtcatctactctaccatctttgcaggcacactcatcacagcgctaagctcgcactgattttttacctgagtaggcctagaaataaacatgctagcttttattccagttctaaccaaaaaaataaaccctcgttccacagaagctgccatcaagtatttcctcacgcaagcaaccgcatccataatccttctaatagctatcctcttcaacaatatactctccggacaatgaaccataaccaatactaccaatcaatactcatcattaataatcataatggctatagcaataaaactaggaatagccccctttcacttctgagtcccagaggttacccaaggcacccctctgacatccggcctgcttcttctcacatgacaaaaactagcccccatctcaatcatataccaaatctctccctcactagacgtaagccttctcctcactctctcaatcttatccatcatagcaggcagttgaggtggattaaaccaaacccagctacgcaaaatcttagcatactcctcaattacccacataggatgaataatagcagttctaccgtacaaccctaacataaccattcttaatttaactatttatattatcctaactactaccgcattcctactactcaacttaaactccagcaccacaaccctactactatctcgcacctgaaacaagctaacatgactaacacccttaattccatccaccctcctctccctaggaggcctgcccccgctaaccggctttttgcccaaatgggccattatcgaagaattcacaaaaaacaatagcctcatcatccccaccatcatagccaccatcaccctccttaacctctacttctacctacgcctaatctactccacctcaatcacactactccccatatctaacaacgtaaaaataaaatgacagtttgaacatacaaaacccaccccattcctccccacactcatcgcccttaccacgctactcctacctatctccccttttatactaataatcttatagaaatttaggttaaatacagaccaagagccttcaaagccctcagtaagttgcaatacttaatttctgtaacagctaaggactgcaaaaccccactctgcatcaactgaacgcaaatcagccactttaattaagctaagcccttactagaccaatgggacttaaacccacaaacacttagttaacagctaagcaccctaatcaactggcttcaatctacttctcccgccgccgggaaaaaaggcgggagaagccccggcaggtttgaagctgcttcttcgaatttgcaattcaatatgaaaatcacctcggagctggtaaaaagaggcctaacccctgtctttagatttacagtccaatgcttcactcagccattttacctcacccccactgatgttcgccgaccgttgactattctctacaaaccacaaagacattggaacactatacctattattcggcgcatgagctggagtcctaggcacagctctaagcctccttattcgagccgagctgggccagccaggcaaccttctaggtaacgaccacatctacaacgttatcgtcacagcccatgcatttgtaataatcttcttcatagtaatacccatcataatcggaggctttggcaactgactagttcccctaataatcggtgcccccgatatggcgtttccccgcataaacaacataagcttctgactcttacctccctctctcctactcctgctcgcatctgctatagtggaggccggagcaggaacaggttgaacagtctaccctcccttagcagggaactactcccaccctggagcctccgtagacctaaccatcttctccttacacctagcaggtgtctcctctatcttaggggccatcaatttcatcacaacaattatcaatataaaaccccctgccataacccaataccaaacgcccctcttcgtctgatccgtcctaatcacagcagtcctacttctcctatctctcccagtcctagctgctggcatcactatactactaacagaccgcaacctcaacaccaccttcttcgaccccgccggaggaggagaccccattctataccaacacctattctgatttttcggtcaccctgaagtttatattcttatcctaccaggcttcggaataatctcccatattgtaacttactactccggaaaaaaagaaccatttggatacataggtatggtctgagctatgatatcaattggcttcctagggtttatcgtgtgagcacaccatatatttacagtaggaatagacgtagacacacgagcatatttcacctccgctaccataatcatcgctatccccaccggcgtcaaagtatttagctgactcgccacactccacggaagcaatatgaaatgatctgctgcagtgctctgagccctaggattcatctttcttttcaccgtaggtggcctgactggcattgtattagcaaactcatcactagacatcgtactacacgacacgtactacgttgtagctcacttccactatgtcctatcaataggagctgtatttgccatcataggaggcttcattcactgatttcccctattctcaggctacaccctagaccaaacctacgccaaaatccatttcactatcatattcatcggcgtaaatctaactttcttcccacaacactttctcggcctatccggaatgccccgacgttactcggactaccccgatgcatacaccacatgaaacatcctatcatctgtaggctcattcatttctctaacagcagtaatattaataattttcatgatttgagaagccttcgcttcgaagcgaaaagtcctaatagtagaagaaccctccataaacctggagtgactatatggatgccccccaccctaccacacattcgaagaacccgtatacataaaatctagacaaaaaaggaaggaatcgaaccccccaaagctggtttcaagccaaccccatggcctccatgactttttcaaaaaggtattagaaaaaccatttcataactttgtcaaagttaaattataggctaaatcctatatatcttaatggcacatgcagcgcaagtaggtctacaagacgctacttcccctatcatagaagagcttatcacctttcatgatcacgccctcataatcattttccttatctgcttcctagtcctgtatgcccttttcctaacactcacaacaaaactaactaatactaacatctcagacgctcaggaaatagaaaccgtctgaactatcctgcccgccatcatcctagtcctcatcgccctcccatccctacgcatcctttacataacagacgaggtcaacgatccctcccttaccatcaaatcaattggccaccaatggtactgaacctacgagtacaccgactacggcggactaatcttcaactcctacatacttcccccattattcctagaaccaggcgacctgcgactccttgacgttgacaatcgagtagtactcccgattgaagcccccattcgtataataattacatcacaagacgtcttgcactcatgagctgtccccacattaggcttaaaaacagatgcaattcccggacgtctaaaccaaaccactttcaccgctacacgaccgggggtatactacggtcaatgctctgaaatctgtggagcaaaccacagtttcatgcccatcgtcctagaattaattcccctaaaaatctttgaaatagggcccgtatttaccctatagcaccccctctaccccctctagagcccactgtaaagctaacttagcattaaccttttaagttaaagattaagagaaccaacacctctttacagtgaaatgccccaactaaatactaccgtatggcccaccataattacccccatactccttacactattcctcatcacccaactaaaaatattaaacacaaactaccacctacctccctcaccaaagcccataaaaataaaaaattataacaaaccctgagaaccaaaatgaacgaaaatctgttcgcttcattcattgcccccacaatcctaggcctacccgccgcagtactgatcattctatttccccctctattgatccccacctccaaatatctcatcaacaaccgactaatcaccacccaacaatgactaatcaaactaacctcaaaacaaataataaccatacacaacactaaaggacgaacctgatctcttatactagtatccttaatcatttttattgccacaactaacctcctcggactcctgcctcactcatttacaccaaccacccaactatctataaacctagccatggccatccccttatgagcgggcgcagtgattataggctttcgctctaagattaaaaatgccctagcccacttcttaccacaaggcacacctacaccccttatccccatactagttattatcgaaaccatcagcctactcattcaaccaatagccctggccgtacgcctaaccgctaacattactgcaggccacctactcatgcacctaattggaagcgccaccctagcaatatcaaccattaaccttccctctacacttatcatcttcacaattctaattctactgactatcctagaaatcgctgtcgccttaatccaagcctacgttttcacacttctagtaagcctctacctgcacgacaacacataatgacccaccaatcacatgcctatcatatagtaaaacccagcccatggcccctaacaggggccctctcagccctcctaatgacctccggcctagccatgtgatttcacttccactccataacgctcctcatactaggcctactaaccaacacactaaccatataccaatgatggcgcgatgtaacacgagaaagcacataccaaggccaccacacaccacctgtccaaaaaggccttcgatacgggataatcctatttattacctcagaagtttttttcttcgcaggatttttctgagccttttaccactccagcctagcccctaccccccaattaggagggcactggcccccaacaggcatcaccccgctaaatcccctagaagtcccactcctaaacacatccgtattactcgcatcaggagtatcaatcacctgagctcaccatagtctaatagaaaacaaccgaaaccaaataattcaagcactgcttattacaattttactgggtctctattttaccctcctacaagcctcagagtacttcgagtctcccttcaccatttccgacggcatctacggctcaacattttttgtagccacaggcttccacggacttcacgtcattattggctcaactttcctcactatctgcttcatccgccaactaatatttcactttacatccaaacatcactttggcttcgaagccgccgcctgatactggcattttgtagatgtggtttgactatttctgtatgtctccatctattgatgagggtcttactcttttagtataaatagtaccgttaacttccaattaactagttttgacaacattcaaaaaagagtaataaacttcgccttaattttaataatcaacaccctcctagccttactactaataattattacattttgactaccacaactcaacggctacatagaaaaatccaccccttacgagtgcggcttcgaccctatatcccccgcccgcgtccctttctccataaaattcttcttagtagctattaccttcttattatttgatctagaaattgccctccttttacccctaccatgagccctacaaacaactaacctgccactaatagttatgtcatccctcttattaatcatcatcctagccctaagtctggcctatgagtgactacaaaaaggattagactgaaccgaattggtatatagtttaaacaaaacgaatgatttcgactcattaaattatgataatcatatctaccaaatgcccctcatttacataaatattatactagcatttaccatctcacttctaggaatactagtatatcgctcacacctcatatcctccctactatgcctagaaggaataatactatcgctgttcattatagctactctcataaccctcaacacccactccctcttagccaatattgtgcctattgccatactagtctttgccgcctgcgaagcagcggtgggcctagccctactagtctcaatctccaacacatatggcctagactacgtacataacctaaacctactccaatgctaaaactaatcgtcccaacaattatattactaccactgacatgactttccaaaaaacacataatttgaatcaacacaaccacccacagcctaattattagcatcatccctctactattttttaaccaaatcaacaacaacctatttagctgttccccaaccttttcctccgaccccctaacaacccccctcctaatactaactacctgactcctacccctcacaatcatggcaagccaacgccacttatccagtgaaccactatcacgaaaaaaactctacctctctatactaatctccctacaaatctccttaattataacattcacagccacagaactaatcatattttatatcttcttcgaaaccacacttatccccaccttggctatcatcacccgatgaggcaaccagccagaacgcctgaacgcaggcacatacttcctattctacaccctagtaggctcccttcccctactcatcgcactgatttacactcacaacaccctaggctcactaaacattctactactcactctcactgcccaagaactatcaaactcctgagccaacaacttaatatgactagcttacacaatagcttttatagtaaagatacctctttacggactccacttatgactccctaaagcccatgtcgaagcccccatcgctgggtcaatagtacttgccgcagtactcttaaaactaggcggctatggtataatacgcctcacactcattctcaaccccctgacaaaacacatagcctaccccttccttgtactatccctatgaggcataattataacaagctccatctgcctacgacaaacagacctaaaatcgctcattgcatactcttcaatcagccacatagccctcgtagtaacagccattctcatccaaaccccctgaagcttcaccggcgcagtcattctcataatcgcccacggacttacatcctcattactattctgcctagcaaactcaaactacgaacgcactcacagtcgcatcataatcctctctcaaggacttcaaactctgctcccactaatagctttttgatgacttctagcaagcctcgctaacctcgccttaccccccactattaacctactgggagaactctctgtgctagtaaccacgttctcctgatcaaatatcactctcctacttacaggactcaacatactagtcacagccctatactccctctacatatttaccacaacacaatggggctcactcacccaccacattaacaacataaaaccctcattcacacgagaaaacaccctcatgttcatacacctatcccccattctcctcctatccctcaaccccgacatcattaccgggttttcctcttgtaaatatagtttaaccaaaacatcagattgtgaatctgacaacagaggcttacgaccccttatttaccgagaaagctcacaagaactgctaactcatgcccccatgtctaacaacatggctttctcaacttttaaaggataacagctatccattggtcttaggccccaaaaattttggtgcaactccaaataaaagtaataaccatgcacactactataaccaccctaaccctgacttccctaattccccccatccttaccaccctcgttaaccctaacaaaaaaaactcatacccccattatgtaaaatccattgtcgcatccacctttattatcagtctcttccccacaacaatattcatgtgcctagaccaagaagttattatctcgaactgacactgagccacaacccaaacaacccagctctccctaagcttcaaactagactacttctccataatattcatccctgtagcattgttcgttacatggtccatcatagaattctcactgtgatatataaactcagacccaaacattaatcagttcttcaaatatctactcatcttcctaattaccatactaatcttagttaccgctaacaacctattccaactgttcatcggctgagagggcgtaggaattatatccttcttgctcatcagttgatgatacgcccgagcagatgccaacacagcagccattcaagcaatcctatacaaccgtatcggcgatatcggtttcatcctcgccttagcatgatttatcctacactccaactcatgagacccacaacaaatagcccttctaaacgctaatccaagcctcaccccactactaggcctcctcctagcagcagcaggcaaatcagcccaattaggtctccacccctgactcccctcagccatagaaggccccaccccagtctcagccctactccactcaagcactatagttgtagcaggaatcttcttactcatccgcttccaccccctagcagaaaatagcccactaatccaaactctaacactatgcttaggcgctatcaccactctgttcgcagcagtctgcgcccttacacaaaatgacatcaaaaaaatcgtagccttctccacttcaagtcaactaggactcataatagttacaatcggcatcaaccaaccacacctagcattcctgcacatctgtacccacgccttcttcaaagccatactatttatgtgctccggatccatcatccacaaccttaacaatgaacaagatattcgaaaaataggaggactactcaaaaccatacctctcacttcaacctccctcaccattggcagcctagcattagcaggaatacctttcctcacaggtttctactccaaagaccacatcatcgaaaccgcaaacatatcatacacaaacgcctgagccctatctattactctcatcgctacctccctgacaagcgcctatagcactcgaataattcttctcaccctaacaggtcaacctcgcttccccacccttactaacattaacgaaaataaccccaccctactaaaccccattaaacgcctggcagccggaagcctattcgcaggatttctcattactaacaacatttcccccgcatcccccttccaaacaacaatccccctctacctaaaactcacagccctcgctgtcactttcctaggacttctaacagccctagacctcaactacctaaccaacaaacttaaaataaaatccccactatgcacattttatttctccaacatactcggattctaccctagcatcacacaccgcacaatcccctatctaggccttcttacgagccaaaacctgcccctactcctcctagacctaacctgactagaaaagctattacctaaaacaatttcacagcaccaaatctccacctccatcatcacctcaacccaaaaaggcataattaaactttacttcctctctttcttcttcccactcatcctaaccctactcctaatcacataacctattcccccgagcaatctcaattacaatatatacaccaacaaacaatgttcaaccagtaactactactaatcaacgcccatagtcatacaaagcccccgcaccaataggatcctcccgaatcaaccctgacccctctccttcataaattattcagcttcctacactattaaagtttaccacaaccaccaccccatcatactctttcacccacagcaccaatcctacctccatcgctaaccccactaaaacactcaccaagacctcaacccctgacccccatgcctcaggatactcctcaatagccatcgctgtagtatatccaaagacaaccatcattccccctaaataaattaaaaaaactattaaacccatataacctcccccaaaattcagaataataacacacccgaccacaccgctaacaatcaatactaaacccccataaataggagaaggcttagaagaaaaccccacaaaccccattactaaacccacactcaacagaaacaaagcatacatcattattctcgcacggactacaaccacgaccaatgatatgaaaaaccatcgttgtatttcaactacaagaacaccaatgaccccaatacgcaaaattaaccccctaataaaattaattaaccactcattcatcgacctccccaccccatccaacatctccgcatgatgaaacttcggctcactccttggcgcctgcctgatcctccaaatcaccacaggactattcctagccatacactactcaccagacgcctcaaccgccttttcatcaatcgcccacatcactcgagacgtaaattatggctgaatcatccgctaccttcacgccaatggcgcctcaatattctttatctgcctcttcctacacatcgggcgaggcctatattacggatcatttctctactcagaaacctgaaacatcggcattatcctcctgcttgcaactatagcaacagccttcataggctatgtcctcccgtgaggccaaatatcattctgaggggccacagtaattacaaacttactatccgccatcccatacattgggacagacctagttcaatgaatctgaggaggctactcagtagacagtcccaccctcacacgattctttacctttcacttcatcttgcccttcattattgcagccctagcagcactccacctcctattcttgcacgaaacgggatcaaacaaccccctaggaatcacctcccattccgataaaatcaccttccacccttactacacaatcaaagacgccctcggcttacttctcttcattctctccttaatgacattaacactattctcaccagacctcctaggcgacccagacaattataccctagccaaccccttaaacacccctccccacatcaagcccgaatgatatttcctattcgcctacacaattctccgatccgtccctaacaagctaggaggcgtccttgccctattactatccatcctcatcctagcaataatccccatcctccatatatccaaacaacaaagcataatatttcgcccactaagccaatcactttattgactcctagccgcagacctcctcattctaacctgagtcggaggacaaccagtaagctacccttttaccatcattggacaagtagcatccgtactatacttcacaacaatcctaatcctaataccaactatctccctaattgaaaacaaaatactcaaatgggcctgtccttgtagtataaactaatacaccagtcttgtaaaccgaagatgaaaacctttttccaaggacaaatcagagaaaaagtctttaactccaccattagcacccaaagctaagattctaatttaaactattctctgttctttcatggggaagcagatttgggtaccacccaagtattgactcacccatcaacaaccgctatgtatttcgtacattactgccagccaccatgaatattgcacggtaccataaatacttgaccacctgtagtacataaaaacccaatccacatcaaaaccccctccccatgcttacaagcaagtacagcaatcaaccctcaactatcacacatcaactgcaactccaaagccacccctcacccactaggataccaacaaacctacccatccttaacagcacatagtacataaagccatttaccgtacatagcacattacagtcaaatcccttctcgtccccatggatgacccccctcagataggggtcccttgaccaccatcctccgtgaaatcaatatcccgcacaagagtgctactctcctcgctccgggcccataacacttgggggtagctaaagtgaactgtatccgacatctggttcctacttcagggccataaagcctaaatagcccacacgttccccttaaataagacatcacgatg

SEQ ID NO: 40 - DNA, 16571 bp, Homo sapiens mitochondrial
  3109: "n" refers to a nucleotide at position 3107 of the Cambridge Reference Sequence (CRS, Anderson et al. 1981 Nature 290:457-465), later determined to be absent from the human mtDNA sequence according to the revised CRS (rCRS, Andrews et al. 1999 Nature Genetics 23:147); "n" therefore represents a single nucleotide deletion at a position corresponding to nucleotide 3107 of SEQ ID NO:1 as provided herein.
gatcacaggtctatcaccctattaaccactcacgggagctctccatgcatttggtattttcgtctggggggtatgcacgcgatagcattgcgagacgctggagccggagcaccctatgtcgcagtatctgtctttgattcctgcctcatcctgttatttatcgcacctacgttcaatattacaggcgaacatacttactgaagcgtgttaattaattaatgcttgtaggacataataataacaattgaatgtctgcacagccgctttccacacagacatcataacaaaaaatttccaccaaaccccccctcccccccgcttctggccacagcacttaaacacatctctgccaaaccccaaaaacaaagaaccctaacaccagcctaaccagatttcaaattttatcttttggcggtatgcacttttaacagtcaccccccaactaacacattattttcccctcccactcccatactactaatctcatcaatacaacccccgcccatcctacccagcacacacacaccgctgctaaccccataccccgaaccaaccaaaccccaaagacaccccccacagtttatgtagcttacctcctcaaagcaatacactgaaaatgtttagacgggctcacatcaccccataaacaaataggtttggtcctagcctttctattagctcttagtaagattacacatgcaagcatccccgttccagtgagttcaccctctaaatcaccacgatcaaaagggacaagcatcaagcacgcagcaatgcagctcaaaacgcttagcctagccacacccccacgggaaacagcagtgattaacctttagcaataaacgaaagtttaactaagctatactaaccccagggttggtcaatttcgtgccagccaccgcggtcacacgattaacccaagtcaatagaagccggcgtaaagagtgttttagatcaccccctccccaataaagctaaaactcacctgagttgtaaaaaactccagttgacacaaaatagactacgaaagtggctttaacatatctgaacacacaatagctaagacccaaactgggattagataccccactatgcttagccctaaacctcaacagttaaatcaacaaaactgctcgccagaacactacgagccacagcttaaaactcaaaggacctggcggtgcttcatatccctctagaggagcctgttctgtaatcgataaaccccgatcaacctcaccacctcttgctcagcctatataccgccatcttcagcaaaccctgatgaaggctacaaagtaagcgcaagtacccacgtaaagacgttaggtcaaggtgtagcccatgaggtggcaagaaatgggctacattttctaccccagaaaactacgatagcccttatgaaacttaagggtcgaaggtggatttagcagtaaactgagagtagagtgcttagttgaacagggccctgaagcgcgtacacaccgcccgtcaccctcctcaagtatacttcaaaggacatttaactaaaacccctacgcatttatatagaggagacaagtcgtaacatggtaagtgtactggaaagtgcacttggacgaaccagagtgtagcttaacacaaagcacccaacttacacttaggagatttcaacttaacttgaccgctctgagctaaacctagccccaaacccactccaccttactaccagacaaccttagccaaaccatttacccaaataaagtataggcgatagaaattgaaacctggcgcaatagatatagtaccgcaagggaaagatgaaaaattataaccaagcataatatagcaaggactaacccctataccttctgcataatgaattaactagaaataactttgcaaggagagccaaagctaagacccccgaaaccagacgagctacctaagaacagctaaaagagcacacccgtctatgtagcaaaatagtgggaagatttataggtagaggcgacaaacctaccgagcctggtgatagctggttgtccaagatagaatcttagttcaactttaaatttgcccacagaaccctctaaatccccttgtaaatttaactgttagtccaaagaggaacagctctttggacactaggaaaaaaccttgtagagagagtaaaaaatttaacacccatagtaggcctaaaagcagccaccaattaagaaagcgttcaagctcaacacccactacctaaaaaatcccaaacatataactgaactcctcacacccaattggaccaatctatcaccctatagaagaactaatgttagtataagtaacatgaaaacattctcctccgcataagcctgcgtcagattaaaacactgaactgacaattaacagcccaatatctacaatcaaccaacaagtcattattaccctcactgtcaacccaacacaggcatgctcataaggaaaggttaaaaaaagtaaaaggaactcggcaaatcttaccccgcctgtttaccaaaaacatcacctctagcatcaccagtattagaggcaccgcctgcccagtgacacatgtttaacggccgcggtaccctaaccgtgcaaaggtagcataatcacttgttccttaaatagggacctgtatgaatggctccacgagggttcagctgtctcttacttttaaccagtgaaattgacctgcccgtgaagaggcgggcataacacagcaagacgagaagaccctatggagctttaatttattaatgcaaacagtacctaacaaacccacaggtcctaaactaccaaacctgcattaaaaatttcggttggggcgacctcggagcagaacccaacctccgagcagtacatgctaagacttcaccagtcaaagcgaactactatactcaattgatccaataacttgaccaacggaacaagttaccctagggataacagcgcaatcctattctagagtccatatcaacaatagggtttacgacctcgatgttggatcaggacatcccgatggtgcagccgctattaaaggttcgtttgttcaacgattaaagtcctacgtgatctgagttcagaccggagtaatccaggtcggtttctatctacnttcaaattcctccctgtacgaaaggacaagagaaataaggcctacttcacaaagcgccttcccccgtaaatgatatcatctcaacttagtattatacccacacccacccaagaacagggtttgttaagatggcagagcccggtaatcgcataaaacttaaaactttacagtcagaggttcaattcctcttcttaacaacatacccatggccaacctcctactcctcattgtacccattctaatcgcaatggcattcctaatgcttaccgaacgaaaaattctaggctatatacaactacgcaaaggccccaacgttgtaggcccctacgggctactacaacccttcgctgacgccataaaactcttcaccaaagagcccctaaaacccgccacatctaccatcaccctctacatcaccgccccgaccttagctctcaccatcgctcttctactatgaacccccctccccatacccaaccccctggtcaacctcaacctaggcctcctatttattctagccacctctagcctagccgtttactcaatcctctgatcagggtgagcatcaaactcaaactacgccctgatcggcgcactgcgagcagtagcccaaacaatctcatatgaagtcaccctagccatcattctactatcaacattactaataagtggctcctttaacctctccacccttatcacaacacaagaacacctctgattactcctgccatcatgacccttggccataatatgatttatctccacactagcagagaccaaccgaacccccttcgaccttgccgaaggggagtccgaactagtctcaggcttcaacatcgaatacgccgcaggccccttcgccctattcttcatagccgaatacacaaacattattataataaacaccctcaccactacaatcttcctaggaacaacatatgacgcactctcccctgaactctacacaacatattttgtcaccaagaccctacttctaacctccctgttcttatgaattcgaacagcatacccccgattccgctacgaccaactcatacacctcctatgaaaaaacttcctaccactcaccctagcattacttatatgatatgtctccatacccattacaatctccagcattccccctcaaacctaagaaatatgtctgataaaagagttactttgatagagtaaataataggagcttaaacccccttatttctaggactatgagaatcgaacccatccctgagaatccaaaattctccgtgccacctatcacaccccatcctaaagtaaggtcagctaaataagctatcgggcccataccccgaaaatgttggttatacccttcccgtactaattaatcccctggcccaacccgtcatctactctaccatctttgcaggcacactcatcacagcgctaagctcgcactgattttttacctgagtaggcctagaaataaacatgctagcttttattccagttctaaccaaaaaaataaaccctcgttccacagaagctgccatcaagtatttcctcacgcaagcaaccgcatccataatccttctaatagctatcctcttcaacaatatactctccggacaatgaaccataaccaatactaccaatcaatactcatcattaataatcataatggctatagcaataaaactaggaatagccccctttcacttctgagtcccagaggttacccaaggcacccctctgacatccggcctgcttcttctcacatgacaaaaactagcccccatctcaatcatataccaaatctctccctcactaaacgtaagccttctcctcactctctcaatcttatccatcatagcaggcagttgaggtggattaaaccaaacccagctacgcaaaatcttagcatactcctcaattacccacataggatgaataatagcagttctaccgtacaaccctaacataaccattcttaatttaactatttatattatcctaactactaccgcattcctactactcaacttaaactccagcaccacgaccctactactatctcgcacctgaaacaagctaacatgactaacacccttaattccatccaccctcctctccctaggaggcctgcccccgctaaccggctttttgcccaaatgggccattatcgaagaattcacaaaaaacaatagcctcatcatccccaccatcatagccaccatcaccctccttaacctctacttctacctacgcctaatctactccacctcaatcacactactccccatatctaacaacgtaaaaataaaatgacagtttgaacatacaaaacccaccccattcctccccacactcatcgcccttaccacgctactcctacctatctccccttttatactaataatcttatagaaatttaggttaaatacagaccaagagccttcaaagccctcagtaagttgcaatacttaatttctgtaacagctaaggactgcaaaaccccactctgcatcaactgaacgcaaatcagccactttaattaagctaagcccttactagaccaatgggacttaaacccacaaacacttagttaacagctaagcaccctaatcaactggcttcaatctacttctcccgccgccgggaaaaaaggcgggagaagccccggcaggtttgaagctgcttcttcgaatttgcaattcaatatgaaaatcacctcggagctggtaaaaagaggcctaacccctgtctttagatttacagtccaatgcttcactcagccattttacctcacccccactgatgttcgccgaccgttgactattctctacaaaccacaaagacattggaacactatacctattattcggcgcatgagctggagtcctaggcacagctctaagcctccttattcgagccgagctgggccagccaggcaaccttctaggtaacgaccacatctacaacgttatcgtcacagcccatgcatttgtaataatcttcttcatagtaatacccatcataatcggaggctttggcaactgactagttcccctaataatcggtgcccccgatatggcgtttccccgcataaacaacataagcttctgactcttacctccctctctcctactcctgctcgcatctgctatagtggaggccggagcaggaacaggttgaacagtctaccctcccttagcagggaactactcccaccctggagcctccgtagacctaaccatcttctccttacacctagcaggtgtctcctctatcttaggggccatcaatttcatcacaacaattatcaatataaaaccccctgccataacccaataccaaacgcccctcttcgtctgatccgtcctaatcacagcagtcctacttctcctatctctcccagtcctagctgctggcatcactatactactaacagaccgcaacctcaacaccaccttcttcgaccccgccggaggaggagaccccattctataccaacacctattctgatttttcggtcaccctgaagtttatattcttatcctaccaggcttcggaataatctcccatattgtaacttactactccggaaaaaaagaaccatttggatacataggcatggtctgagctatgatatcaattggcttcctagggtttatcgtgtgagcacaccatatatttacagtaggaatagacgtagacacacgagcatatttcacctccgctaccataatcatcgctatccccaccggcgtcaaagtatttagctgactcgccacactccacggaagcaatatgaaatgatctgctgcagtgctctgagccctaggattcatctttcttttcaccgtaggtggcctgactggcattgtattagcaaactcatcactagacatcgtactacacgacacgtactacgttgtagcccacttccactatgtcctatcaataggagctgtatttgccatcataggaggcttcattcactgatttcccctattctcaggctacaccctagaccaaacctacgccaaaatccatttcactatcatattcatcggcgtaaatctaactttcttcccacaacactttctcggcctatccggaatgccccgacgttactcggactaccccgatgcatacaccacatgaaacatcctatcatctgtaggctcattcatttctctaacagcagtaatattaataattttcatgatttgagaagccttcgcttcgaagcgaaaagtcctaatagtagaagaaccctccataaacctggagtgactatatggatgccccccaccctaccacacattcgaagaacccgtatacataaaatctagacaaaaaaggaaggaatcgaaccccccaaagctggtttcaagccaaccccatggcctccatgactttttcaaaaaggtattagaaaaaccatttcataactttgtcaaagttaaattataggctaaatcctatatatcttaatggcacatgcagcgcaagtaggtctacaagacgctacttcccctatcatagaagagcttatcacctttcatgatcacgccctcataatcattttccttatctgcttcctagtcctgtatgcccttttcctaacactcacaacaaaactaactaatactaacatctcagacgctcaggaaatagaaaccgtctgaactatcctgcccgccatcatcctagtcctcatcgccctcccatccctacgcatcctttacataacagacgaggtcaacgatccctcccttaccatcaaatcaattggccaccaatggtactgaacctacgagtacaccgactacggcggactaatcttcaactcctacatacttcccccattattcctagaaccaggcgacctgcgactccttgacgttgacaatcgagtagtactcccgattgaagcccccattcgtataataattacatcacaagacgtcttgcactcatgagctgtccccacattaggcttaaaaacagatgcaattcccggacgtctaaaccaaaccactttcaccgctacacgaccgggggtatactacggtcaatgctctgaaatctgtggagcaaaccacagtttcatgcccatcgtcctagaattaattcccctaaaaatctttgaaatagggcccgtatttaccctatagcaccccctctaccccctctagagcccactgtaaagctaacttagcattaaccttttaagttaaagattaagagaaccaacacctctttacagtgaaatgccccaactaaatactaccgtatggcccaccataattacccccatactccttacactattcctcatcacccaactaaaaatattaaacacaaactaccacctacctccctcaccaaagcccataaaaataaaaaattataacaaaccctgagaaccaaaatgaacgaaaatctgttcgcttcattcattgcccccacaatcctaggcctacccgccgcagtactgatcattctatttccccctctattgatccccacctccaaatatctcatcaacaaccgactaatcaccacccaacaatgactaatcaaactaacctcaaaacaaatgataaccatacacaacactaaaggacgaacctgatctcttatactagtatccttaatcatttttattgccacaactaacctcctcggactcctgcctcactcatttacaccaaccacccaactatctataaacctagccatggccatccccttatgagcgggcgcagtgattataggctttcgctctaagattaaaaatgccctagcccacttcttaccacaaggcacacctacaccccttatccccatactagttattatcgaaaccatcagcctactcattcaaccaatagccctggccgtacgcctaaccgctaacattactgcaggccacctactcatgcacctaattggaagcgccaccctagcaatatcaaccattaaccttccctctacacttatcatcttcacaattctaattctactgactatcctagaaatcgctgtcgccttaatccaagcctacgttttcacacttctagtaagcctctacctgcacgacaacacataatgacccaccaatcacatgcctatcatatagtaaaacccagcccatgacccctaacaggggccctctcagccctcctaatgacctccggcctagccatgtgatttcacttccactccataacgctcctcatactaggcctactaaccaacacactaaccatataccaatgatggcgcgatgtaacacgagaaagcacataccaaggccaccacacaccacctgtccaaaaaggccttcgatacgggataatcctatttattacctcagaagtttttttcttcgcaggatttttctgagccttttaccactccagcctagcccctaccccccaattaggagggcactggcccccaacaggcatcaccccgctaaatcccctagaagtcccactcctaaacacatccgtattactcgcatcaggagtatcaatcacctgagctcaccatagtctaatagaaaacaaccgaaaccaaataattcaagcactgcttattacaattttactgggtctctattttaccctcctacaagcctcagagtacttcgagtctcccttcaccatttccgacggcatctacggctcaacattttttgtagccacaggcttccacggacttcacgtcattattggctcaactttcctcactatctgcttcatccgccaactaatatttcactttacatccaaacatcactttggcttcgaagccgccgcctgatactggcattttgtagatgtggtttgactatttctgtatgtctccatctattgatgagggtcttactcttttagtataaatagtaccgttaacttccaattaactagttttgacaacattcaaaaaagagtaataaacttcgccttaattttaataatcaacaccctcctagccttactactaataattattacattttgactaccacaactcaacggctacatagaaaaatccaccccttacgagtgcggcttcgaccctatatcccccgcccgcgtccctttctccataaaattcttcttagtagctattaccttcttattatttgatctagaaattgccctccttttacccctaccatgagccctacaaacaactaacctgccactaatagttatgtcatccctcttattaatcatcatcctagccctaagtctggcctatgagtgactacaaaaaggattagactgaaccgaattggtatatagtttaaacaaaacgaatgatttcgactcattaaattatgataatcatatttaccaaatgcccctcatttacataaatattatactagcatttaccatctcacttctaggaatactagtatatcgctcacacctcatatcctccctactatgcctagaaggaataatactatcgctgttcattatagctactctcataaccctcaacacccactccctcttagccaatattgtacctattgccatactagtctttgccgcctgcgaagcagcggtgggcctagccctactagtctcaatctccaacacatatggcctagactacgtacataacctaaacctactccaatgctaaaactaatcgtcccaacaattatattactaccactgacatgactttccaaaaaacacataatttgaatcaacacaaccacccacagcctaattattagcatcatccctctactattttttaaccaaatcaacaacaacctatttagctgttccccaaccttttcctccgaccccctaacaacccccctcctaatactaactacctgactcctacccctcacaatcatggcaagccaacgccacttatccagtgaaccactatcacgaaaaaaactctacctctctatactaatctccctacaaatctccttaattataacattcacagccacagaactaatcatattttatatcttcttcgaaaccacacttatccccaccttggctatcatcacccgatgaggcaaccagccagaacgcctgaacgcaggcacatacttcctattctacaccctagtaggctcccttcccctactcatcgcactaatttacactcacaacaccctaggctcactaaacattctactactcactctcactgcccaagaactatcaaactcctgagccaacaacttaatatgactagcttacacaatagcttttatagtaaagatacctctttacggactccacttatgactccctaaagcccatgtcgaagcccccatcgctgggtcaatagtacttgccgcagtactcttaaaactaggcggctatggtataatacgcctcacactcattctcaaccccctgacaaaacacatagcctaccccttccttgtactatccctatgaggcataattataacaagctccatctgcctacgacaaacagacctaaaatcgctcattgcatactcttcaatcagccacatagccctcgtagtaacagccattctcatccaaaccccctgaagcttcaccggcgcagtcattctcataatcgcccacgggcttacatcctcattactattctgcctagcaaactcaaactacgaacgcactcacagtcgcatcataatcctctctcaaggacttcaaactctactcccactaatagctttttgatgacttctagcaagcctcgctaacctcgccttaccccccactattaacctactgggagaactctctgtgctagtaaccacgttctcctgatcaaatatcactctcctacttacaggactcaacatactagtcacagccctatactccctctacatatttaccacaacacaatggggctcactcacccaccacattaacaacataaaaccctcattcacacgagaaaacaccctcatgttcatacacctatcccccattctcctcctatccctcaaccccgacatcattaccgggttttcctcttgtaaatatagtttaaccaaaacatcagattgtgaatctgacaacagaggcttacgaccccttatttaccgagaaagctcacaagaactgctaactcatgcccccatgtctaacaacatggctttctcaacttttaaaggataacagctatccattggtcttaggccccaaaaattttggtgcaactccaaataaaagtaataaccatgcacactactataaccaccctaaccctgacttccctaattccccccatccttaccaccctcgttaaccctaacaaaaaaaactcatacccccattatgtaaaatccattgtcgcatccacctttattatcagtctcttccccacaacaatattcatgtgcctagaccaagaagttattatctcgaactgacactgagccacaacccaaacaacccagctctccctaagcttcaaactagactacttctccataatattcatccctgtagcattgttcgttacatggtccatcatagaattctcactgtgatatataaactcagacccaaacattaatcagttcttcaaatatctactcatcttcctaattaccatactaatcttagttaccgctaacaacctattccaactgttcatcggctgagagggcgtaggaattatatccttcttgctcatcagttgatgatacgcccgagcagatgccaacacagcagccattcaagcaatcctatacaaccgtatcggcgatatcggtttcatcctcgccttagcatgatttatcctacactccaactcatgagacccacaacaaatagcccttctaaacgctaatccaagcctcaccccactactaggcctcctcctagcagcagcaggcaaatcagcccaattaggtctccacccctgactcccctcagccatagaaggccccaccccagtctcagccctactccactcaagcactatagttgtagcaggaatcttcttactcatccgcttccaccccctagcagaaaatagcccactaatccaaactctaacactatgcttaggcgctatcaccactctgttcgcagcagtctgcgcccttacacaaaatgacatcaaaaaaatcgtagccttctccacttcaagtcaactaggactcataatagttacaatcggcatcaaccaaccacacctagcattcctgcacatctgtacccacgccttcttcaaagccatactatttatgtgctccgggtccatcatccacaaccttaacaatgaacaagatattcgaaaaataggaggactactcaaaaccatacctctcacttcaacctccctcaccattggcagcctagcattagcaggaatacctttcctcacaggtttctactccaaagaccacatcatcgaaaccgcaaacatatcatacacaaacgcctgagccctatctattactctcatcgctacctccctgacaagcgcctatagcactcgaataattcttctcaccctaacaggtcaacctcgcttccccacccttactaacattaacgaaaataaccccaccctactaaaccccattaaacgcctggcagccggaagcctattcgcaggatttctcattactaacaacatttcccccgcatcccccttccaaacaacaatccccctctacctaaaactcacagccctcgctgtcactttcctaggacttctaacagccctagacctcaactacctaaccaacaaacttaaaataaaatccccactatgcacattttatttctccaacatactcggattctaccctagcatcacacaccgcacaatcccctatctaggccttcttacgagccaaaacctgcccctactcctcctagacctaacctgactagaaaagctattacctaaaacaatttcacagcaccaaatctccacctccatcatcacctcaacccaaaaaggcataattaaactttacttcctctctttcttcttcccactcatcctaaccctactcctaatcacataacctattcccccgagcaatctcaattacaatatatacaccaacaaacaatgttcaaccagtaactactactaatcaacgcccataatcatacaaagcccccgcaccaataggatcctcccgaatcaaccctgacccctctccttcataaattattcagcttcctacactattaaagtttaccacaaccaccaccccatcatactctttcacccacagcaccaatcctacctccatcgctaaccccactaaaacactcaccaagacctcaacccctgacccccatgcctcaggatactcctcaatagccatcgctgtagtatatccaaagacaaccatcattccccctaaataaattaaaaaaactattaaacccatataacctcccccaaaattcagaataataacacacccgaccacaccgctaacaatcaatactaaacccccataaataggagaaggcttagaagaaaaccccacaaaccccattactaaacccacactcaacagaaacaaagcatacatcattattctcgcacggactacaaccacgaccaatgatatgaaaaaccatcgttgtatttcaactacaagaacaccaatgaccccaatacgcaaaactaaccccctaataaaattaattaaccactcattcatcgacctccccaccccatccaacatctccgcatgatgaaacttcggctcactccttggcgcctgcctgatcctccaaatcaccacaggactattcctagccatgcactactcaccagacgcctcaaccgccttttcatcaatcgcccacatcactcgagacgtaaattatggctgaatcatccgctaccttcacgccaatggcgcctcaatattctttatctgcctcttcctacacatcgggcgaggcctatattacggatcatttctctactcagaaacctgaaacatcggcattatcctcctgcttgcaactatagcaacagccttcataggctatgtcctcccgtgaggccaaatatcattctgaggggccacagtaattacaaacttactatccgccatcccatacattgggacagacctagttcaatgaatctgaggaggctactcagtagacagtcccaccctcacacgattctttacctttcacttcatcttgcccttcattattgcagccctagcagcactccacctcctattcttgcacgaaacgggatcaaacaaccccctaggaatcacctcccattccgataaaatcaccttccacccttactacacaatcaaagacgccctcggcttacttctcttccttctctccttaatgacattaacactattctcaccagacctcctaggcgacccagacaattataccctagccaaccccttaaacacccctccccacatcaagcccgaatgatatttcctattcgcctacacaattctccgatccgtccctaacaaactaggaggcgtccttgccctattactatccatcctcatcctagcaataatccccatcctccatatatccaaacaacaaagcataatatttcgcccactaagccaatcactttattgactcctagccgcagacctcctcattctaacctgaatcggaggacaaccagtaagctacccttttaccatcattggacaagtagcatccgtactatacttcacaacaatcctaatcctaataccaactatctccctaattgaaaacaaaatactcaaatgggcctgtccttgtagtataaactaatacaccagtcttgtaaaccggagatgaaaacctttttccaaggacaaatcagagaaaaagtctttaactccaccattagcacccaaagctaagattctaatttaaactattctctgttctttcatggggaagcagatttgggtaccacccaagtattgactcacccatcaacaaccgctatgtatttcgtacattactgccagccaccatgaatattgtacggtaccataaatacttgaccacctgtagtacataaaaacccaatccacatcaaaaccccccccccatgcttacaagcaagtacagcaatcaaccctcaactatcacacatcaactgcaactccaaagccacccctcacccactaggataccaacaaacctacccacccttaacagtacatagtacataaagccatttaccgtacatagcacattacagtcaaatcccttctcgtccccatggatgacccccctcagataggggtcccttgaccaccatcctccgtgaaatcaatatcccgcacaagagtgctactctcctcgctccgggcccataacacttgggggtagctaaagtgaactgtatccgacatctggttcctacttcagggccataaagcctaaatagcccacacgttccccttaaataagacatcacgatg

SEQ ID NO: 41 - DNA, 16570 bp, Homo sapiens mitochondrial
  3108: "n" refers to a nucleotide at position 3107 of the Cambridge Reference Sequence (CRS, Anderson et al. 1981 Nature 290:457-465), later determined to be absent from the human mtDNA sequence according to the revised CRS (rCRS, Andrews et al. 1999 Nature Genetics 23:147); "n" therefore represents a single nucleotide deletion at a position corresponding to nucleotide 3107 of SEQ ID NO:1 as provided herein.
gatcacaggtctatcaccctattaaccactcacgggagctctccatgcatttggtattttcgtctggggggtatgcacgcgatagcattgcgagacgctggagccggagcaccctatgtcgcagtatctgtctttgattcctgcctcatcctattatttatcgcacctacgttcaatattacaggcgaacatacttactaaagtgtgttaattaattaatgcttgtaggacataataataacaattgaatgtctgcacagccgctttccacacagacatcataacaaaaaatttccaccaaaccccccctcccccgccttctggccacagcacttaaacacatctctgccaaaccccaaaaacaaagaaccctaacaccagcctaaccagatttcaaattttatcttttggcggtatgcacttttaacagtcaccccccaactaacacattattttcccctcccactcccatactactaatctcatcaatacaacccccgcccatcctacccagcacacacacaccgctgctaaccccataccccgaaccaaccaaaccccaaagacaccccccacagtttatgtagcttacctcctcaaagcaatacactgaaaatgtttagacgggctcacatcaccccataaacaaataggtttggtcctagcctttctattagctcttagtaagattacacatgcaagcatccccgttccagtgagttcaccctctaaatcaccacgatcaaaagggacaagcatcaagcacgcagcaatgcagctcaaaacgcttagcctagccacacccccacgggaaacagcagtgattaacctttagcaataaacgaaagtttaactaagctatactaaccccagggttggtcaatttcgtgccagccaccgcggtcacacgattaacccaagtcaatagaagccggcgtaaagagtgttttagatcaccccctccccaataaagctaaaactcacctgagttgtaaaaaactccagttgacacaaaatagactacgaaagtggctttaacatatctgaacacacaatagctaagacccaaactgggattagataccccactatgcttagccctaaacctcaacagttaaatcaacaaaactgctcgccagaacactacgagccacagcttaaaactcaaaggacctggcggtgcttcatatccctctagaggagcctgttctgtaatcgataaaccccgatcaacctcaccacctcttgctcagcctatataccgccatcttcagcaaaccctgatgaaggctacaaagtaagcgcaagtacccacgtaaagacgttaggtcaaggtgtagcccatgaggtggcaagaaatgggctacattttctaccccagaaaactacgatagcccttatgaaacttaagggtcgaaggtggatttagcagtaaactgagagtagagtgcttagttgaacagggccctgaagcgcgtacacaccgcccgtcaccctcctcaagtatacttcaaaggacatttaactaaaacccctacgcatttatatagaggagacaagtcgtaacatggtaagtgtactggaaagtgcacttggacgaaccagagtgtagcttaacacaaagcacccaacttacacttaggagatttcaacttaacttgaccgctctgagctaaacctagccccaaacccactccaccttactaccagacaaccttagccaaaccatttacccaaataaagtataggcgatagaaattgaaacctggcgcaatagatatagtaccgcaagggaaagatgaaaaattataaccaagcataatatagcaaggactaacccctataccttctgcataatgaattaactagaaataactttgcaaggagagccaaagctaagacccccgaaaccagacgagctacctaagaacagctaaaagagcacacccgtctatgtagcaaaatagtgggaagatttataggtagaggcgacaaacctaccgagcctggtgatagctggttgtccaagatagaatcttagttcaactttaaatttgcccacagaaccctctaaatccccttgtaaatttaactgttagtccaaagaggaacagctctttggacactaggaaaaaaccttgtagagagagtaaaaaatttaacacccatagtaggcctaaaagcagccaccaattaagaaagcgttcaagctcaacacccactacctaaaaaatcccaaacatataactgaactcctcacacccaattggaccaatctatcaccctatagaagaactaatgttagtataagtaacatgaaaacattctcctccgcataagcctgcgtcagattaaaacactgaactgacaattaacagcccaatatctacaatcaaccaacaagtcattattaccctcactgtcaacccaacacaggcatgctcataaggaaaggttaaaaaaagtaaaaggaactcggcaaatcttaccccgcctgtttaccaaaaacatcacctctagcatcaccagtattagaggcaccgcctgcccagtgacacatgtttaacggccgcggtaccctaaccgtgcaaaggtagcataatcacttgttccttaaatagggacctgtatgaatggctccacgagggttcagctgtctcttacttttaaccagtgaaattgacctgcccgtgaagaggcgggcataacacagcaagacgagaagaccctatggagctttaatttattaatgcaaacagtacctaacaaacccacaggtcctaaactaccaaacctgcattaaaaatttcggttggggcgacctcggagcagaacccaacctccgagcagtacatgctaagacttcaccagtcaaagcgaactactatactcaattgatccaataacttgaccaacggaacaagttaccctagggataacagcgcaatcctattctagagtccatatcaacaatagggtttacgacctcgatgttggatcaggacatcccgatggtgcagccgctattaaaggttcgtttgttcaacgattaaagtcctacgtgatctgagttcagaccggagtaatccaggtcggtttctatctacnttcaaattcctccctgtacgaaaggacaagagaaataaggcctacttcacaaagcgccttcccccgtaaatgatatcatctcaacttagtattatacccacacccacccaagaacagggtttgttaagatggcagagcccggtaatcgcataaaacttaaaactttacagtcagaggttcaattcctcttcttaacaacatacccatggccaacctcctactcctcattgtacccattctaatcgcaatggcattcctaatgcttaccgaacgaaaaattctaggctatatacaactacgcaaaggccccaacgttgtaggcccctacgggctactacaacccttcgctgacgccataaaactcttcaccaaagagcccctaaaacccgccacatctaccatcaccctctacatcaccgccccgaccttagctctcaccatcgctcttctactatgaacccccctccccatacccaaccccctggtcaacctcaacctaggcctcctatttattctagccacctctagcctagccgtttactcaatcctctgatcagggtgagcatcaaactcaaactacgccctgatcggcgcactgcgagcagtagcccaaacaatctcatatgaagtcaccctagccatcattctactatcaacattactaataagtggctcctttaacctctccacccttatcacaacacaagaacacctctgattactcctgccatcatgacccttggccataatatgatttatctccacactagcagagaccaaccgaacccccttcgaccttgccgaaggggagtccgaactagtctcaggcttcaacatcgaatacgccgcaggccccttcgccctattcttcatagccgaatacacaaacattattataataaacgccctcaccactacaatcttcctaggaacaacatatgacgcactctcccctgaactctacacaacatattttgtcaccaagaccctacttctaacctccctgttcttatgaattcgaacagcatacccccgattccgctacgaccaactcatacacctcctatgaaaaaacttcctaccactcaccctagcattacttatatgatatgtctccatacccattacaatctccagcattccccctcaaacctaagaaatatgtctgataaaagagttactttgatagagtaaataataggagcttaaacccccttatttctaggactatgagaatcgaacccatccctgagaatccaaaattctccgtgccacctatcacaccccatcctaaagtaaggtcagctaaataagctatcgggcccataccccgaaaatgttggttatacccttcccgtactaattaatcccctggcccaacccgtcatctactctaccatctttgcaggcacactcatcacagcgctaagctcgcactgattttttacctgagtaggcctagaaataaacatgctagcttttattccagttctaaccaaaaaaataaaccctcgttccacagaagctgccatcaagtatttcctcacgcaagcaaccgcatccataatccttctaatagctatcctcttcaacaatatactctccggacaatgaaccataaccaatactaccaatcaatactcatcattaataatcataatggctatagcaataaaactaggaatagccccctttcacttctgagtcccagaggttacccaaggcacccctctgacatccggcctgcttcttctcacatgacaaaaactagcccccatctcaatcatataccaaatctctccctcactaaacgtaagccttctcctcactctctcaatcttatccatcatagcaggcagttgaggtggattaaaccaaacccagctacgcaaaatcttagcatactcctcaattacccacataggatgaataatagcagttctaccgtacaaccctaacataaccattcttaatttaactatttatattatcctaactactaccgcattcctactactcaacttaaactccagcaccacgaccctactactatctcgcacctgaaacaagctaacatgactaacacccttaattccatccaccctcctctccctaggaggcctgcccccgctaaccggctttttgcccaaatgggccattatcgaagaattcacaaaaaacaatagcctcatcatccccaccatcatagccaccatcaccctccttaacctctacttctacctacgcctaatctactccacctcaatcacactactccccatatctaacaacgtaaaaataaaatgacagtttgaacatacaaaacccaccccattcctccccacactcatcgcccttaccacgctactcctacctatctccccttttatactaataatcttatagaaatttaggttaaatacagaccaagagccttcaaagccctcagtaagttgcaatacttaatttctgtaacagctaaggactgcaaaaccccactctgcatcaactgaacgcaaatcagccactttaattaagctaagcccttactagaccaatgggacttaaacccacaaacacttagttaacagctaagcaccctaatcaactggcttcaatctacttctcccgccgccgggaaaaaaggcgggagaagccccggcaggtttgaagctgcttcttcgaatttgcaattcaatatgaaaatcacctcggagctggtaaaaagaggcctaacccctgtctttagatttacagtccaatgcttcactcagccattttacctcacccccactgatgttcgccgaccgttgactattctctacaaaccacaaagacattggaacactatacctattattcggcgcatgagctggagtcctaggcacagctctaagcctccttattcgagccgagctgggccagccaggcaaccttctaggtaacgaccacatctacaacgttatcgtcacagcccatgcatttgtaataatcttcttcatagtaatacccatcataatcggaggctttggcaactgactagttcccctaataatcggtgcccccgatatggcgtttccccgcataaacaacataagcttctgactcttacctccctctctcctactcctgctcgcatctgctatagtggaggccggagcaggaacaggttgaacagtctaccctcccttagcagggaactactcccaccctggagcctccgtagacctaaccatcttctccttacacctagcaggtgtctcctctatcttaggggccatcaatttcatcacaacaattatcaatataaaaccccctgccataacccaataccaaacgcccctcttcgtctgatccgtcctaatcacagcagtcctacttctcctatctctcccagtcctagctgctggcatcactatactactaacagaccgcaacctcaacaccaccttcttcgaccccgccggaggaggagaccccattctataccaacacctattctgatttttcggtcaccctgaagtttatattcttatcctaccaggcttcggaataatctcccatattgtaacttactactccggaaaaaaagaaccatttggatacataggtatggtctgagctatgatatcaattggcttcctagggtttatcgtgtgagcacaccatatatttacagtaggaatagacgtagacacacgagcatatttcacctccgctaccataatcatcgctatccccaccggcgtcaaagtatttagctgactcgccacactccacggaagcaatatgaaatgatctgctgcagtgctctgagccctaggattcatctttcttttcaccgtaggtggcctgactggcattgtattagcaaactcatcactagacatcgtactacacgacacgtactacgttgtagcccacttccactatgtcctatcaataggagctgtatttgccatcataggaggcttcattcactgatttcccctattctcaggctacaccctagaccaaacctacgccaaaatccatttcactatcatattcatcggcgtaaatctaactttcttcccacaacactttctcggcctatccggaatgccccgacgttactcggactaccccgatgcatacaccacatgaaacatcctatcatctgtaggctcattcatttctctaacagcagtaatattaataattttcatgatttgagaagccttcgcttcgaagcgaaaagtcctaatagtagaagaaccctccataaacctggagtgactatatggatgccccccaccctaccacacattcgaagaacccgtatacataaaatctagacaaaaaaggaaggaatcgaaccccccaaagctggtttcaagccaaccccatggcctccatgactttttcaaaaaggtattagaaaaaccatttcataactttgtcaaagttaaattataggctaaatcctatatatcttaatggcacatgcagcgcaagtaggtctacaagacgctacttcccctatcatagaagagcttatcacctttcatgatcacgccctcataatcattttccttatctgcttcctagtcctgtatgcccttttcctaacactcacaacaaaactaactaatactaacatctcagacgctcaggaaatagaaaccgtctgaactatcctgcccgccatcatcctagtcctcatcgccctcccatccctacgcatcctttacataacagacgaggtcaacgatccctcccttaccatcaaatcaattggccaccaatggtactgaacctacgagtacaccgactacggcggactaatcttcaactcctacatacttcccccattattcctagaaccaggcgacctgcgactccttgacgttgacaatcgagtagtactcccgattgaagcccccattcgtataataattacatcacaagacgtcttgcactcatgagctgtccccacattaggcttaaaaacagatgcaattcccggacgtctaaaccaaaccactttcaccgctacacgaccgggggtatactacggtcaatgctctgaaatctgtggagcaaaccacagtttcatgcccatcgtcctagaattaattcccctaaaaatctttgaaatagggcccgtatttaccctatagcaccccctctaccccctctagagcccactgtaaagctaacttagcattaaccttttaagttaaagattaagagaaccaacacctctttacagtgaaatgccccaactaaatactaccgtatggcccaccataattacccccatactccttacactattcctcatcacccaactaaaaatattaaacacaaactaccacctacctccctcaccaaagcccataaaaataaaaaattataacaaaccctgagaaccaaaatgaacgaaaatctgttcgcttcattcattgcccccacaatcctaggcctacccgccgcagtactgatcattctatttccccctctattgatccccacctccaaatatctcatcaacaaccgactaatcaccacccaacaatgactaatcaaactaacctcaaaacaaatgataaccatacacaacactaaaggacgaacctgatctcttatactagtatccttaatcatttttattgccacaactaacctcctcggactcctgcctcactcatttacaccaaccacccaactatctataaacctagccatggccatccccttatgagcgggcgcagtgattataggctttcgctctaagattaaaaatgccctagcccacttcttaccacaaggcacacctacaccccttatccccatactagttattatcgaaaccatcagcctactcattcaaccaatagccctggccgtacgcctaaccgctaacattactgcaggccacctactcatgcacctaattggaagcgccaccctagcaatatcaaccattaaccttccctctacacttatcatcttcacaattctaattctactgactatcctagaaatcgctgtcgccttaatccaagcctacgttttcacacttctagtaagcctctacctgcacgacaacacataatgacccaccaatcacatgcctatcatatagtaaaacccagcccatgacccctaacaggggccctctcagccctcctaatgacctccggcctagccatgtgatttcacttccactccataacgctcctcatactaggcctactaaccaacacactaaccatataccaatgatggcgcgatgtaacacgagaaagcacataccaaggccaccacacaccacctgtccaaaaaggccttcgatacgggataatcctatttattacctcagaagtttttttcttcgcaggatttttctgagccttttaccactccagcctagcccctaccccccaattaggagggcactggcccccaacaggcatcaccccgctaaatcccctagaagtcccactcctaaacacatccgtattactcgcatcaggagtatcaatcacctgagctcaccatagtctaatagaaaacaaccgaaaccaaataattcaagcactgcttattacaattttactgggtctctattttaccctcctacaagcctcagagtacttcgagtctcccttcaccatttccgacggcatctacggctcaacattttttgtagccacaggcttccacggacttcacgtcattattggctcaactttcctcactatctgcttcatccgccaactaatatttcactttacatccaaacatcactttggcttcgaagccgccgcctgatactggcattttgtagatgtggtttgactatttctgtatgtctccatctattgatgagggtcttactcttttagtataaatagtaccgttaacttccaattaactagttttgacaacattcaaaaaagagtaataaacttcgccttaattttaataatcaacaccctcctagccttactactaataattattacattttgactaccacaactcaacggctacatagaaaaatccaccccttacgagtgcggcttcgaccctatatcccccgcccgcgtccctttctccataaaattcttcttagtagctattaccttcttattatttgatctagaaattgccctccttttacccctaccatgagccctacaaacaactaacctgccactaatagttatgtcatccctcttattaatcatcatcctagccctaagtctggcctatgagtgactacaaaaaggattagactgaaccgaattggtatatagtttaaacaaaacgaatgatttcgactcattaaattatgataatcatatttaccaaatgcccctcatttacataaatattatactagcatttaccatctcacttctaggaatactagtatatcgctcacacctcatatcctccctactatgcctagaaggaataatactatcgctgttcattatagctactctcataaccctcaacacccactccctcttagccaatattgtgcctattgccatactagtctttgccgcctgcgaagcagcggtgggcctagccctactagtctcaatctccaacacatatggcctagactacgtacataacctaaacctactccaatgctaaaactaatcgtcccaacaattatattactaccactgacatgactttccaaaaaacacataatttgaatcaacacaaccacccacagcctaattattagcatcatccctctactattttttaaccaaatcaacaacaacctatttagctgttccccaaccttttcctccgaccccctaacaacccccctcctaatactaactacctgactcctacccctcacaatcatggcaagccaacgccacttatccagtgaaccactatcacgaaaaaaactctacctctctatactaatctccctacaaatctccttaattataacattcacagccacagaactaatcatattttatatcttcttcgaaaccacacttatccccaccttggctatcatcacccgatgaggcaaccagccagaacgcctgaacgcaggcacatacttcctattctacaccctagtaggctcccttcccctactcatcgcactaatttacactcacaacaccctaggctcactaaacattctactactcactctcactgcccaagaactatcaaactcctgagccaacaacttaatatgactagcttacacaatagcttttatagtaaagatacctctttacggactccacttatgactccctaaagcccatgtcgaagcccccatcgctgggtcaatagtacttgccgcagtactcttaaaactaggcggctatggtataatacgcctcacactcattctcaaccccctgacaaaacacatagcctaccccttccttgtactatccctatgaggcataattataacaagctccatctgcctacgacaaacagacctaaaatcgctcattgcatactcttcaatcagccacatagccctcgtagtaacagccattctcatccaaaccccctgaagcttcaccggcgcagtcattctcataatcgcccacgggcttacatcctcattactattctgcctagcaaactcaaactacgaacgcactcacagtcgcatcataatcctctctcaaggacttcaaactctactcccactaatagctttttgatgacttctagcaagcctcgctaacctcgccttaccccccactattaacctactgggagaactctctgtgctagtaaccacgttctcctgatcaaatatcactctcctacttacaggactcaacatactagtcacagccctatactccctctacatatttaccacaacacaatggggctcactcacccaccacattaacaacataaaaccctcattcacacgagaaaacaccctcatgttcatacacctatcccccattctcctcctatccctcaaccccgacatcattaccgggttttcctcttgtaaatatagtttaaccaaaacatcagattgtgaatctgacaacagaggcttacgaccccttatttaccgagaaagctcacaagaactgctaactcatgcccccatgtctaacaacatggctttctcaacttttaaaggataacagctatccattggtcttaggccccaaaaattttggtgcaactccaaataaaagtaataaccatgcacactactataaccaccctaaccctgacttccctaattccccccatccttaccaccctcgttaaccctaacaaaaaaaactcatacccccattatgtaaaatccattgtcgcatccacctttattatcagtctcttccccacaacaatattcatgtgcctagaccaagaagttattatctcgaactgacactgagccacaacccaaacaacccagctctccctaagcttcaaactagactacttctccataatattcatccctgtagcattgttcgttacatggtccatcatagaattctcactgtgatatataaactcagacccaaacattaatcagttcttcaaatatctactcatcttcctaattaccatactaatcttagttaccgctaacaacctattccaactgttcatcggctgagagggcgtaggaattatatccttcttgctcatcagttgatgatacgcccgagcagatgccaacacagcagccattcaagcaatcctatacaaccgtatcggcgatatcggtttcatcctcgccttagcatgatttatcctacactccaactcatgagacccacaacaaatagcccttctaaacgctaatccaagcctcaccccactactaggcctcctcctagcagcagcaggcaaatcagcccaattaggtctccacccctgactcccctcagccatagaaggccccaccccagtctcagccctactccactcaagcactatagttgtagcaggaatcttcttactcatccgcttccaccccctagcagaaaatagcccactaatccaaactctaacactatgcttaggcgctatcaccactctgttcgcagcagtctgcgcccttacacaaaatgacatcaaaaaaatcgtagccttctccacttcaagtcaactaggactcataatagttacaatcggcatcaaccaaccacacctagcattcctgcacatctgtacccacgccttcttcaaagccatactatttatgtgctccgggtccatcatccacaaccttaacaatgaacaagatattcgaaaaataggaggactactcaaaaccatacctctcacttcaacctccctcaccattggcagcctagcattagcaggaatacctttcctcacaggtttctactccaaagaccacatcatcgaaaccgcaaacatatcatacacaaacgcctgagccctatctattactctcatcgctacctccctgacaagcgcctatagcactcgaataattcttctcaccctaacaggtcaacctcgcttccccacccttactaacattaacgaaaataaccccaccctactaaaccccattaaacgcctggcagccggaagcctattcgcaggatttctcattactaacaacatttcccccgcatcccccttccaaacaacaatccccctctacctaaaactcacagccctcgctgtcactttcctaggacttctaacagccctagacctcaactacctaaccaacaaacttaaaataaaatccccactatgcacattttatttctccaacatactcggattctaccctagcatcacacaccgcacaatcccctatctaggccttcttacgagccaaaacctgcccctactcctcctagacctaacctgactagaaaagctattacctaaaacaatttcacagcaccaaatctccacctccatcatcacctcaacccaaaaaggcataattaaactttacttcctctctttcttcttcccactcatcctaaccctactcctaatcacataacctattcccccgagcaatctcaattacaatatatacaccaacaaacaatgttcaaccagtaactactactaatcaacgcccataatcatacaaagcccccgcaccaataggatcctcccgaatcaaccctgacccctctccttcataaattattcagcttcctacactattaaagtttaccacaaccaccaccccatcatactctttcacccacagcaccaatcctacctccatcgctaaccccactaaaacactcaccaagacctcaacccctgacccccatgcctcaggatactcctcaatagccatcgctgtagtatatccaaagacaaccatcattccccctaaataaattaaaaaaactattaaacccatataacctcccccaaaattcagaataataacacacccgaccacaccgctaacaatcaatactaaacccccataaataggagaaggcttagaagaaaaccccacaaaccccattactaaacccacactcaacagaaacaaagcatacatcattattctcgcacggactacaaccacgaccaatgatatgaaaaaccatcgttgtatttcaactacaagaacaccaatgaccccaatacgcaaaactaaccccctaataaaattaattaaccactcattcatcgacctccccaccccatccaacatctccgcatgatgaaacttcggctcactccttggcgcctgcctgatcctccaaatcaccacaggactattcctagccatgcactactcaccagacgcctcaaccgccttttcatcaatcgcccacatcactcgagacgtaaattatggctgaatcatccgctaccttcacgccaatggcgcctcaatattctttatctgcctcttcctacacatcgggcgaggcctatattacggatcatttctctactcagaaacctgaaacatcggcattatcctcctgcttgcaactatagcaacagccttcataggctatgtcctcccgtgaggccaaatatcattctgaggggccacagtaattacaaacttactatccgccatcccatacattgggacagacctagttcaatgaatctgaggaggctactcagtagacagtcccaccctcacacgattctttacctttcacttcatcttgcccttcattattgcagccctagcagcactccacctcctattcttgcacgaaacgggatcaaacaaccccctaggaatcacctcccattccgataaaatcaccttccacccttactacacaatcaaagacgccctcggcttacttctcttccttctctccttaatgacattaacactattctcaccagacctcctaggcgacccagacaattataccctagccaaccccttaaacacccctccccacatcaagcccgaatgatatttcctattcgcctacacaattctccgatccgtccctaacaaactaggaggcgtccttgccctattactatccatcctcatcctagcaataatccccatcctccatatatccaaacaacaaagcataatatttcgcccactaagccaatcactttattgactcctagccgcagacctcctcattctaacctgaatcggaggacaaccagtaagctacccttttaccatcattggacaagtagcatccgtactatacttcacaacaatcctaatcctaataccaactatctccctaattgaaaacaaaatactcaaatgggcctgtccttgtagtataaactaatacaccagtcttgtaaaccggagatgaaaacctttttccaaggacaaatcagagaaaaagtctttaactccaccattagcacccaaagctaagattctaatttaaactattctctgttctttcatggggaagcagatttgggtaccacccaagtattgactcacccatcaacaaccgctatgtatttcgtacattactgccagccaccatgaatattgtacggtaccataaatacttgaccacctgtagtacataaaaacccaatccacatcaaaaccccctccccatgcttacaagcaagtacagcaatcaaccctcaactatcacacatcaactgcaactccaaagccacccctcacccactaggataccaacaaacctacccacccttaacagtacatagtacataaagccatttaccgtacatagcacattacagtcaaatcccttctcgtccccatggatgacccccctcagataggggtcccttgaccaccatcctccgtgaaatcaatatcccgcacaagagtgctactctcctcgctccgggcccataacacttgggggtagctaaagtgaactgtatccgacatctggttcctacttcagggccataaagcctaaatagcccacacgttccccttaaataagacatcacgatg

SEQ ID NO: 42 - DNA, 16571 bp, Homo sapiens mitochondrial
  3109: "n" refers to a nucleotide at position 3107 of the Cambridge Reference Sequence (CRS, Anderson et al. 1981 Nature 290:457-465), later determined to be absent from the human mtDNA sequence according to the revised CRS (rCRS, Andrews et al. 1999 Nature Genetics 23:147); "n" therefore represents a single nucleotide deletion at a position corresponding to nucleotide 3107 of SEQ ID NO:1 as provided herein.
gatcacaggtctatcaccctattaaccactcacgggagctctccatgcatttggtattttcgtctggggggtgtgcacgcgatagcattgcgagacgctggagccggagcaccctatgtcgcagtatctgtctttgattcctgccccatcccattatttatcgcacctacgttcaatattacaggcgaacatacttactaaagtgtgttaattaattaatgcttgtaggacataataataacaattgaatgtctgcacagccgctttccacacagacatcataacaaaaaatttccaccaaaccccccctcccccccgcttctggccacagcacttaaacacatctctgccaaaccccaaaaacaaagaaccctaacaccagcctaaccagatttcaaattttatcttttggcggtatgcacttttaacagtcaccccccaactaacacattattttcccctcccactcccatactactaatctcatcaatacaacccccgcccatcctacccagcacacacacaccgctgctaaccccataccccgaaccaaccaaaccccaaagacaccccccacagtttatgtagcttacctcctcaaagcaatacactgaaaatgtttagacgggctcacatcaccccataaacaaataggtttggtcctagcctttctattagctcttagtaagattacacatgcaagcatccccattccagtgagttcaccctctaaatcaccacgatcaaaagggacaagcatcaagcacgcagcaatgcagctcaaaacgcttagcctagccacacccccacgggaaacagcagtgattaacctttagcaataaacgaaagtttaactaagctatactaaccccagggttggtcaatttcgtgccagccaccgcggtcacacgattaacccaagtcaatagaagccggcgtaaagagtgttttagatcaccccctccccaataaagctaaaactcacctgagttgtaaaaaactccagttgacacaaaatagactacgaaagtggctttaacatatctgaacacacaatagctaagacccaaactgggattagataccccactatgcttagccctaaacctcaacagttaaatcaacaaaactgctcgccagaacactacgagccacagcttaaaactcaaaggacctggcggtgcttcatatccctctagaggagcctgttctgtaatcgataaaccccgatcaacctcaccacctcttgctcagcctatataccgccatcttcagcaaaccctgatgaaggctacaaagtaagcgcaagtacccacgtaaagacgttaggtcaaggtgtagcccatgaggtggcaagaaatgggctacattttctaccccagaaaactacgatagcccttatgaaacttaagggtcgaaggtggatttagcagtaaactgagagtagagtgcttagttgaacagggccctgaagcgcgtacacaccgcccgtcaccctcctcaagtatacttcaaaggacatttaactaaaacccctacgcatttatatagaggagacaagtcgtaacatggtaagtgtactggaaagtgcacttggacgaaccagagtgtagcttaacacaaagcacccaacttacacttaggagatttcaacttaacttgaccgctctgagctaaacctagccccaaacccactccaccttactaccagacaaccttagccaaaccatttacccaaataaagtataggcgatagaaattgaaacctggcgcaatagatatagtaccgcaagggaaagatgaaaaattatagccaagcataatatagcaaggactaacccctataccttctgcataatgaattaactagaaataactttgcaaggagagccaaagctaagacccccgaaaccagacgagctacctaagaacagctaaaagagcacacccgtctatgtagcaaaatagtgggaagatttataggtagaggcgacaaacctaccgagcctggtgatagctggttgtccaagatagaatcttagttcaactttaaatttgcccacagaaccctctaaatccccttgtaaatttaactgttagtccaaagaggaacagctctttggacactaggaaaaaaccttgtagagagagtaaaaaatttaacacccatagtaggcctaaaagcagccaccaattaagaaagcgttcaagctcaacacccactacctaaaaaatcccaaacatataactgaactcctcacacccaattggaccaatctatcaccctatagaagaactaatgttagtataagtaacatgaaaacattctcctccgcataagcctgcgtcagattaaaacactgaactgacaattaacagcccaatatctacaatcaaccaacaagtcattattaccctcactgtcaacccaacacaggcatgctcataaggaaaggttaaaaaaagtaaaaggaactcggcaaatcttaccccgcctgtttaccaaaaacatcacctctagcatcaccagtattagaggcaccgcctgcccagtgacacatgtttaacggccgcggtaccctaaccgtgcaaaggtagcataatcacttgttccttaaatagggacctgtatgaatggctccacgagggttcagctgtctcttacttttaaccagtgaaattgacctgcccgtgaagaggcgggcatgacacagcaagacgagaagaccctatggagctttaatttattaatgcaaacagtacctaacaaacccacaggtcctaaactaccaaacctgcattaaaaatttcggttggggcgacctcggagcagaacccaacctccgagcagtacatgctaagacttcaccagtcaaagcgaactactatactcaattgatccaataacttgaccaacggaacaagttaccctagggataacagcgcaatcctattctagagtccatatcaacaatagggtttacgacctcgatgttggatcaggacatcccgatggtgcagccgctattaaaggttcgtttgttcaacgattaaagtcctacgtgatctgagttcagaccggagtaatccaggtcggtttctatctacnttcaaattcctccctgtacgaaaggacaagagaaataaggcctacttcacaaagcgccttcccccgtaaatgatatcatctcaacttagtattatacccacacccacccaagaacagggtttgttaagatggcagagcccggtaatcgcataaaacttaaaactttacagtcagaggttcaattcctcttcttaacaacatacccatggccaacctcctactcctcattgtacccattctaatcgcaatggcattcctaatgcttaccgaacgaaaaattctaggctatatacaactacgcaaaggccccaacgttgtaggcccctacgggctactacaacccttcgctgacgccataaaactcttcaccaaggagcccctaaaacccgccacatctaccatcaccctctacatcaccgccccgaccttagctctcaccatcgctcttctactatgaacccccctccccatacccaaccccctggtcaacctcaacctaggcctcctatttattctagccacctctagcctagccgtttactcaatcctctgatcagggtgagcatcaaactcaaactacgccctgatcggcgcactgcgagcagtagcccaaacaatctcatatgaagtcaccctagccatcattctactatcaacattactaataagtggctcctttaacctctccacccttatcacaacacaagaacacctctgattactcctgccatcatgacccttggccataatatgatttatctccacactagcagagaccaaccgaacccccttcgaccttgccgaaggggagtccgaactagtctcaggcttcaacatcgaatacgccgcaggccccttcgccctattcttcatagccgaatacacaaacattattataataaacaccctcaccactacaatcttcctaggaacaacatatgacgcactctcccctgaactctacacaacatattttgtcaccaagaccctacttctaacctccctgttcttatgaattcgaacagcatacccccgattccgctacgaccaactcatacacctcctatgaaaaaacttcctaccactcaccctagcattacttatatgatatgtctccatacccattacaatctccagcattccccctcaaacctaagaaatatgtctgataaaagagttactttgatagagtaaataataggagcttaaacccccttatttctaggactatgagaatcgaacccatccctgagaatccaaaattctccgtgccacctatcacaccccatcctaaagtaaggtcagctaaataagctatcgggcccataccccgaaaatgttggttatacccttcccgtactaattaatcccctggcccaacccgtcatctactctaccatctttgcaggcacactcatcacagcgctaagctcgcactgattttttacctgagcaggcctagaaataaacatgctagcttttattccagttctaaccaaaaaaataaaccctcgttccacagaagctgccatcaagtatttcctcacgcaagcaaccgcatccataatccttctaatagctatcctcttcaacaatatactctccggacaatgaaccataaccaatactaccaatcaatactcatcattaataatcataatggctatagcaataaaactaggaatagccccctttcacttctgagtcccagaggttacccaaggcacccctctgacatccggcctgcttcttctcacatgacaaaaactagcccccatctcaatcatataccaaatctctccctcactaaacgtaagccttctcctcactctctcaatcttatccatcatagcaggcagttgaggtggattaaaccaaacccagctacgcaaaatcttagcatactcctcaattacccacataggatgaataatagcagttctaccgtacaaccctaacataaccattcttaatttaactatttatattatcctaactactaccgcattcctactactcaacttaaactccagcaccacgaccctactactatctcgcacctgaaacaagctaacatgactaacacccttaattccatccaccctcctctccctaggaggcctgcccccgctaaccggctttttgcccaaatgggccattatcgaagaattcacaaaaaacaatagcctcatcatccccaccatcatagccaccatcaccctccttaacctctacttctacctacgcctaatctactccacctcaatcacactactccccatatctaacaacgtaaaaataaaatgacagtttgaacatacaaaacccaccccattcctccccacactcatcgcccttaccacgctactcctacctatctccccttttatactaataatcttatagaaatttaggttaaatacagaccaagagccttcaaagccctcagtaagttgcaatacttaatttctgtaacagctaaggactgcaaaaccccactctgcatcaactgaacgcaaatcagccactttaattaagctaagcccttactagaccaatgggacttaaacccacaaacacttagttaacagctaagcaccctaatcaactggcttcaatctacttctcccgccgccgggaaaaaaggcgggagaagccccggcaggtttgaagctgcttcttcgaatttgcaattcaatatgaaaatcacctcggagctggtaaaaagaggcctaacccctgtctttagatttacagtccaatgcttcactcagccattttacctcacccccactgatgttcgccgaccgttgactattctctacaaaccacaaagacattggaacactatacctattattcggcgcatgagctggagtcctaggcacagctctaagcctccttattcgagccgagctgggccagccaggcaaccttctaggtaacgaccacatctacaacgttatcgtcacagcccatgcatttgtaataatcttcttcatagtaatacccatcataatcggaggctttggcaactgactagttcccctaataatcggtgcccccgatatggcgtttccccgcataaacaacataagcttctgactcttacctccctctctcctactcctgctcgcatctgctatagtggaggccggagcaggaacaggttgaacagtctaccctcccttagcagggaactactcccaccctggagcctccgtagacctaaccatcttctccttacacctagcaggtgtctcctctatcttaggggccatcaatttcatcacaacaattatcaatataaaaccccctgccataacccaataccaaacgcccctcttcgtctgatccgtcctaatcacagcagtcctacttctcctatctctcccagtcctagctgctggcatcactatactactaacagaccgcaacctcaacaccaccttcttcgaccccgccggaggaggagaccccattctataccaacacctattctgatttttcggtcaccctgaagtttatattcttatcctaccaggcttcggaataatctcccatattgtaacttactactccggaaaaaaagaaccatttggatacataggtatggtctgagctatgatatcaattggcttcctagggtttatcgtgtgagcacaccatatatttacagtaggaatagacgtagacacacgagcatatttcacctccgctaccataatcatcgctatccccaccggcgtcaaagtatttagctgactcgccacactccacggaagcaatatgaaatgatctgctgcagtgctctgagccctaggattcatctttcttttcaccgtaggtggcctgactggcattgtattagcaaactcatcactagacatcgtactacacgacacgtactacgttgtagctcacttccactatgtcctatcaataggagctgtatttgccatcataggaggcttcattcactgatttcccctattctcaggctacaccctagaccaaacctacgccaaaatccatttcactatcatattcatcggcgtaaatctaactttcttcccacaacactttctcggcctatccggaatgccccgacgttactcggactaccccgatgcatacaccacatgaaacatcctatcatctgtaggctcattcatttctctaacagcagtaatattaataattttcatgatttgagaagccttcgcttcgaagcgaaaagtcctaatagtagaagaaccctccataaacctggagtgactatatggatgccccccaccctaccacacattcgaagaacccgtatacataaaatctagacaaaaaaggaaggaatcgaaccccccaaagctggtttcaagccaaccccatggcctccatgactttttcaaaaaggtattagaaaaaccatttcataactttgtcaaagttaaattataggctaaatcctatatatcttaatggcacatgcagcgcaagtaggtctacaagacgctacttcccctatcatagaagagcttatcacctttcatgatcacgccctcataatcattttccttatctgcttcctagtcctgtatgcccttttcctaacactcacaacaaaactaactaatactaacatctcagacgctcaggaaatagaaaccgtctgaactatcctgcccgccatcatcctagtcctcatcgccctcccatccctacgcatcctttacataacagacgaggtcaacgatccctcccttaccatcaaatcaattggccaccaatggtactgaacctacgagtacaccgactacggcggactaatcttcaactcctacatacttcccccattattcctagaaccaggcgacctgcgactccttgacgttgacaatcgagtagtactcccgattgaagcccccattcgtataataattacatcacaagacgtcttgcactcatgagctgtccccacattaggcttaaaaacagatgcaattcccggacgtctaaaccaaaccactttcaccgctacacgaccgggggtatactacggtcaatgctctgaaatctgtggagcaaaccacagtttcatgcccatcgtcctagaattaattcccctaaaaatctttgaaatagggcccgtatttaccctatagcaccccctctaccccctctagagcccactgtaaagctaacttagcattaaccttttaagttaaagattaagagaaccaacacctctttacagtgaaatgccccaactaaatactaccgtatggcccaccataattacccccatactccttacactattcctcatcacccaactaaaaatattaaacacaaactaccacctacctccctcaccaaagcccataaaaataaaaaattataacaaaccctgagaaccaaaatgaacgaaaatctgttcgcttcattcattgcccccacaatcctaggcctacccgccgcagtactgatcattctatttccccctctattgatccccacctccaaatatctcatcaacaaccgactaatcaccacccaacaatgactaatcaaactaacctcaaaacaaatgataaccatacacaacactaaaggacgaacctgatctcttatactagtatccttaatcatttttattgccacaactaacctcctcggactcctgcctcactcatttacaccaaccacccaactatctataaacctagccatggccatccccttatgagcgggcgcagtgattataggctttcgctctaagattaaaaatgccctagcccacttcttaccacaaggcacacctacaccccttatccccatactagttattatcgaaaccatcagcctactcattcaaccaatagccctggccgtacgcctaaccgctaacattactgcaggccacctactcatgcacctaattggaagcaccaccctagcaatatcaaccattaaccttccctctacacttatcatcttcacaattctaattctactgactatcctagaaatcgctgtcgccttaatccaagcctacgttttcacacttctagtaagcctctacctgcacgacaacacataatgacccaccaatcacatgcctatcatatagtaaaacccagcccatgacccctaacaggggccctctcagccctcctaatgacctccggcctagccatgtgatttcacttccactccataacgctcctcatactaggcctactaaccaacacactaaccatataccaatgatggcgcgatgtaacacgagaaagcacataccaaggccaccacacaccacctgtccaaaaaggccttcgatacgggataatcctatttattacctcagaagtttttttcttcgcaggatttttctgagccttttaccactccagcctagcccctaccccccaattaggagggcactggcccccaacaggcatcaccccgctaaatcccctagaagtcccactcctaaacacatccgtattactcgcatcaggagtatcaatcacctgagctcaccatagtctaatagaaaacaaccgaaaccaaataattcaagcactgctcattacaattttactgggcctctattttaccctcctacaagcctcagagtacttcgagtctcccttcaccatttccgacggcatctacggctcaacattttttgtagccacaggcttccacggacttcacgtcattattggctcaactttcctcactatctgcttcatccgccaactaatatttcactttacatccaaacatcactttggcttcgaagccgccgcctgatactggcattttgtagatgtggtttgactatttctgtatgtctccatctattgatgagggtcttactcttttagtataaatagtaccgttaacttccaattaactagttttgacaacattcaaaaaagagtaataaacttcgccttaattttaataatcaacaccctcctagccttactactaataattattacattttgactaccacaactcaacggctacatagaaaaatccaccccttacgagtgcggcttcgaccctatatcccccgcccgcgtccctttctccataaaattcttcttagtagctattaccttcttattatttgatctagaaattgccctccttttacccctaccatgagccctacaaacaactaacctgccactaatagttatgtcatccctcttattaatcatcatcctagccctaagtctggcctatgagtgactacaaaaaggattagactgaaccgaattggtatatagtttaaacaaaacgaatgatttcgactcattaaattatgataatcatatttaccaaatgcccctcatttacataaatattatactagcatttaccatctcacttctaggaatactagtatatcgctcacacctcatgtcctccctactatgcctagaaggaataatactatcgctgttcattatagctactctcataaccctcaacacccactccctcttagccaatattgtgcctattgccatactagtctttgccgcctgcgaagcagcggtgggcctagccctactagtctcaatctccaacacatatggcctagactacgtacataacctaaacctactccaatgctaaaactaatcgtcccaacaattatattactaccactgacatgactttccaaaaaacacataatttgaatcaacacaaccacccacagcctaattattagcatcatccctctactattttttaaccaaatcaacaacaacctatttagctgttccccaaccttttcctccgaccccctaacaacccccctcctaatactaactacctgactcctacccctcacaatcatggcaagccaacgccacttatccagtgaaccactatcacgaaaaaaactctacctctctatactaatctccctacaaatctccttaattataacattcacagccacagaactaatcatattttatatcttcttcgaaaccacacttatccccaccttggctatcatcacccgatgaggcaaccagccagaacgcctgaacgcaggcacatacttcctattctacaccctagtaggctcccttcccctactcatcgcactaatttacactcacaacaccctaggctcactaaacattctactactcaccctcactgcccaagaactatcaaactcctgagccaacaacttaatatgactagcttacacaatagcttttatagtaaagatacctctttacggactccacttatgactccctaaagcccatgtcgaagcccccatcgctgggtcaatagtacttgccgcagtactcttgaaactaggcggctatggtataatacgcctcacactcattctcaaccccctgacaaaacacatagcctaccccttccttgtactatccctatgaggcataattataacaagctccatctgcctacgacaaacagacctaaaatcgctcattgcatactcttcaatcagccacatagccctcgtagtaacagccattctcatccaaaccccctgaagcttcaccggcgcagtcattctcataatcgcccacggacttacatcctcattactattctgcctagcaaactcaaactacgaacgcactcacagtcgcatcataatcctctctcaaggacttcaaactctactcccactaatagctttttgatgacttctagcaagcctcgctaacctcgccttaccccccactattaacctactgggagaactctctgtgctagtaaccacgttctcctgatcaaatatcactctcctacttacaggactcaacatactagtcacagccctatactccctctacatatttaccacaacacaatggggctcactcacccaccacattaacaacataaaaccctcattcacacgagaaaacaccctcatgttcatacacctatcccccattctcctcctatccctcaaccccgacatcattaccgggttttcctcttgtaaatatagtttaaccaaaacatcagattgtgaatctgacaacagaggcttacgaccccttatttaccgagaaagctcacaagaactgctaactcatgcccccatgtctaacaacatggctttctcaacttttaaaggataacagctatccattggtcttaggccccaagaattttggtgcaactccaaataaaagtaataaccatgcacactactataaccaccctaaccctaacttccctaattccccccatccttaccaccctcgttaaccctaacaaaaaaaactcatacccccattatgtaaaatccattgtcgcatccacctttattatcagtctcttccccacaacaatattcatgtgcctagaccaagaagttattatctcgaactgacactgagccacaacccaaacaacccagctctccctaagcttcaaactagactacttctccataatattcatccctgtagcattgttcgttacatggtccatcatagaattctcactgtgatatataaactcagacccaaacattaatcagttcttcaaatatctactcatcttcctaattaccatactaatcttagttaccgctaacaacctattccaactgttcatcggctgagagggcgtaggaattatatccttcttgctcatcagttgatgatacgcccgagcagatgccaacacagcagccattcaagcaatcctatacaaccgtatcggcgatatcggtttcatcctcgccttagcatgatttatcctacactccaactcatgagacccacaacaaatagcccttctaaacgctaatccaagcctcaccccactactaggcctcctcctagcagcagcaggcaaatcagcccaattaggtctccacccctgactcccctcagccatagaaggccccaccccagtctcagccctactccactcaagcactatagttgtagcaggaatcttcttactcatccgcttccaccccctagcagaaaatagcccactaatccaaactctaacactatgcttaggcgctatcaccactctgttcgcagcagtctgcgcccttacacaaaatgacatcaaaaaaatcgtagccttctccacttcaagtcaactaggactcataatagttacaatcggcatcaaccaaccacacctagcattcctgcacatctgtacccacgccttcttcaaagccatactatttatgtgctccgggtccatcatccacaaccttaacaatgaacaagatattcgaaaaataggaggactactcaaaaccatacctctcacttcaacctccctcaccattggcagcctagcattagcaggaatacctttcctcacaggtttctactccaaagaccacatcatcgaaaccgcaaacatatcatacacaaacgcctgagccctatctattactctcatcgctacctccctgacaagcgcctatagcactcgaataattcttctcaccctaacaggtcaacctcgcttccccacccttactaacattaacgaaaataaccccaccctactaaaccccattaaacgcctggcagccggaagcctattcgcaggatttctcattactaacaacatttcccccgcatcccccttccaaacaacaatccccctctacctaaaactcacagccctcgctgtcactttcctaggacttctaacagccctagacctcaactacctaaccaacaaacttaaaataaaatccccactatgcacattttatttctccaacatactcggattctaccctagcatcacacaccggacaatcccctatctaggccttcttacgagccaaaacctgcccctactcctcctagacctaacctgactagaaaagctattacctaaaacaatttcacagcaccaaatctccacctccatcatcacctcaacccaaaaaggcataattaaactttacttcctctctttcttcttcccactcatcctaaccctactcctaatcacataacctattcccccgagcaatttcaattacaatatatacaccaacaaacaatgttcaaccagtaactactactaatcaacgcccataatcatacaaagcccccgcaccaataggatcctcccgaatcaaccctgacccctctccttcataaattattcagcttcctacactattaaagtttaccacaaccaccaccccatcatactctttcacccacagcaccaatcctacctccatcgctaaccccactaaaacactcaccaagacctcaacccctgacccccatgcctcaggatactcctcaatagccatcgctgtagtatatccaaagacaaccatcattccccctaaataaattaaaaaaactattaaacccatataacctcccccaaaattcagaataataacacacccgaccacaccgctaacaatcaatactaaacccccataaataggagaaggcttagaagaaaaccccacaaaccccattactaaacccacactcaacagaaacaaagcatacatcattattctcgcacggactacaaccacgaccaatgatatgaaaaaccatcgttgtatttcaactacaagaacaccaatgaccccaatacgcaaaattaaccccctaataaaattaattaaccactcactcatcgacctccccaccccatccaacatctccgcatgatgaaacttcggctcactccttggcgcctgcctgatcctccaaatcaccacaggactattcctagccatgcactactcaccagacgcctcaaccgccttttcatcaatcgcccacatcactcgagacgtaaattatggctgaatcatccgctaccttcacgccaatggcgcctcaatattctttatctgcctcttcctacacatcgggcgaggcctatattacggatcatttctctactcagaaacctgaaacatcggcattatcctcctgcttgcaactatagcaacagccttcataggctatgtcctcccgtgaggccaaatatcattctgaggggccacagtaattacaaacttactatccgccatcccatacattgggacagacctagttcaatgaatctgaggaggctactcagtagacagtcccaccctcacacgattctttacctttcacttcatcttgcccttcattattgcagccctagcagcactccacctcctattcttgcacgaaacgggatcaaacaaccccctaggaatcacctcccattccgataaaatcaccttccacccttactacacaatcaaagacgccctcggcttacttctcttccttctctccttaatgacattaacactattctcaccagacctcctaggcgacccagacaattataccctagccaaccccttaaacacccctccccacatcaagcccgaatgatatttcctattcgcctacacaattctccgatccgtccctaacaaactaggaggcgtccttgccctattactatccatcctcatcctagcaataatccccatcctccatatatccaaacaacaaagcataatatttcgcccactaagccaatcactttattgactcctagccgcagacctcctcattctaacctgaatcggaggacaaccagtaagctacccttttaccatcattggacaagtagcatccgtactatacttcacaacaatcctaatcctaataccaactatctccctaattgaaaacaaaatactcaaatgggcctgtccttgtagtataaactaatacaccagtcttgtaaaccggagatgaaaacctttttccaaggacaaatcagagaaaaagtctttaactccaccattagcacccaaagctaagattctaatttaaactattctctgttctttcatggggaagcagatttgggtaccacccaagtattgactcacccatcaacaaccgctatgtatttcgtacattactgccagccaccatgaatattgtacggtaccataaatacttgaccacctgtagtacataaaaacccaatccacatcaaaaccccctccccatgcttacaagcaagtacagcaatcaacccccaactatcacacatcaactgcaactccaaagccacccctcacccactaggataccaacaaacctacccacccttaacagtacatagcacataaagccatttaccgtacatagcacattacagtcaaatcccttctcgcccccatggatgacccccctcagataggggtcccttgaccaccatcctccgtgaaatcaatatcccgcacaagagtgctactctcctcgctccgggcccataacacttgggggtagctaaagtgaactgtatccgacatctggttcctacttcagggccataaagcctaaatagcccacacgttccccttaaataagacatcacgatg

SEQ ID NO: 43 - DNA, 16573 bp, Homo sapiens mitochondrial
  3111: "n" refers to a nucleotide at position 3107 of the Cambridge Reference Sequence (CRS, Anderson et al. 1981 Nature 290:457-465), later determined to be absent from the human mtDNA sequence according to the revised CRS (rCRS, Andrews et al. 1999 Nature Genetics 23:147); "n" therefore represents a single nucleotide deletion at a position corresponding to nucleotide 3107 of SEQ ID NO:1 as provided herein.
gatcacaggtctatcaccctattaaccactcacgggagctctccatgcatttggtattttcgtctggggggtgtgcacgcgatagcattgcgagacgctggagccggagcaccctatgtcgcagtatctgtctttgattcctgcctcatcctattatttatcgcacctacgttcaatattacaggcgaacatacttactaaagtgtgttaattaattaatgcttgtaggacataataataacaattgaatgtctgcacagccgctttccacacagacatcataacaaaaaatttccaccaaaccccccctcccccccgcttctggccacagcacttaaacacatctctgccaaaccccaaaaacaaagaaccctaacaccagcctaaccagatttcaaattttatcttttggcggtatgcacttttaacagtcaccccccaactaacacattattttcccctcccactcccatactactaatctcatcaatacaaccctcgcccatcctacccagcacacacacaccacgctgctaaccccataccccgaaccaaccaaaccccaaagacaccccccacagtttatgtagcttacctcctcaaagcaatacactgaaaatgtttagacgggctcacatcaccccataaacaaataggtttggtcctagcctttctattagctcttagtaagattacacatgcaagcatccccgttccagtgagttcaccctctaaatcaccacgatcaaaagggacaagcatcaagcacgcagcaatgcagctcaaaacgcttagcctagccacacccccacgggaaacagcagtgattaacctttagcaataaacgaaagtttaactaagctatactaaccccagggttggtcaatttcgtgccagccaccgcggtcacacgattaacccaagtcaatagaagccggcgtaaagagtgttttagatcaccccctccccaataaagctaaaactcacctgagttgtaaaaaactccagttgacacaaaatagactacgaaagtggctttaacatatctgaacacacaatagctaagacccaaactgggattagataccccactatgcttagccctaaacctcaacagttaaatcaacaaaactgctcgccagaacactacgagccacagcttaaaactcaaaggacctggcggtgcttcatacccctctagaggagcctgttctgtaatcgataaaccccgatcaacctcaccacctcttgctcagcctatataccgccatcttcagcaaaccctgatgaaggctacaaagtaagcgcaagtacccacgtaaagacgttaggtcaaggtgtagcccatgaggtggcaagaaatgggctacattttctaccccagaaaactacgatagcccttatgaaacttaagggtcgaaggtggatttagcagtaaactgagagtagagtgcttagttgaacagggccctgaagcgcgtacacaccgcccgtcaccctcctcaagtatacttcaaaggacatttaactaaaacccctacgcatttatatagaggagacaagtcgtaacatggtaagtgtactggaaagtgcacttggacgaaccagagtgtagcttaacacaaagcacccaacttacacttaggagatttcaacttaacttgaccgctctgagctaaacctagccccaaacccactccaccttactaccagacaaccttagccaaaccatttacccaaataaagtataggcgatagaaattgaaacctggcgcaatagatatagtaccgcaagggaaagatgaaaaattatagccaagcataatatagcaaggactaacccctataccttctgcataatgaattaactagaaataactttgcaaggagagccaaagctaagacccccgaaaccagacgagctacctaagaacagctaaaagagcacacccgtctatgtagcaaaatagtgggaagatttataggtagaggcgacaaacctaccgagcctggtgatagctggttgtccaagatagaatcttagttcaactttaaatttgcccacagaaccctctaaatccccttgtaaatttaactgttagtccaaagaggaacagctctttggacactaggaaaaaaccttgtagagagagtaaaaaatttaacacccatagtaggcctaaaagcagccaccaattaagaaagcgttcaagctcaacacccactacctaaaaaatcccaaacatataactgaactcctcacacccaattggaccaatctatcaccctatagaagaactaatgttagtataagtaacatgaaaacattctcctccgcataagcctgcgtcagattaaaacactgaactgacaattaacagcccaatatctacaatcaaccaacaagtcattattaccctcactgtcaacccaacacaggcatgctcataaggaaaggttaaaaaaagtaaaaggaactcggcaaatcttaccccgcctgtttaccaaaaacatcacctctagcatcaccagtattagaggcaccgcctgcccagtgacacatgtttaacggccgcggtaccctaaccgtgcaaaggtagcataatcacttgttccttaaatagggacctgtatgaatggctccacgagggttcagctgtctcttacttttaaccagtgaaattgacctgcccgtgaagaggcgggcatgacacagcaagacgagaagaccctatggagctttaatttattaatgcaaacagtacctaacaaacccacaggtcctaaactaccaaacctgcattaaaaatttcggttggggcgacctcggagcagaacccaacctccgagcagtacatgctaagacttcaccagtcaaagcgaactactatactcaattgatccaataacttgaccaacggaacaagttaccctagggataacagcgcaatcctattctagagtccatatcaacaatagggtttacgacctcgatgttggatcaggacatcccgatggtgcagccgctattaaaggttcgtttgttcaacgattaaagtcctacgtgatctgagttcagaccggagtaatccaggtcggtttctatctacnttcaaattcctccctgtacgaaaggacaagagaaataaggcctacttcacaaagcgccttcccccgtaaatgatatcatctcaacttagtattatacccacacccacccaagaacagggtttgttaagatggcagagcccggtaatcgcataaaacttaaaactttacagtcagaggttcaattcctcttcttaacaacatacccatggccaacctcctactcctcattgtacccattctaatcgcaatggcattcctaatgcttaccgaacgaaaaattctaggctatatacaactacgcaaaggccccaacgttgtaggcccctacgggctactacaacccttcgctgacgccataaaactcttcaccaaggagcccctaaaacccgccacatctaccatcaccctctacatcaccgccccgaccttagctctcaccatcgctcttctactatgaacccccctccccatacccaaccccctggtcaacctcaacctaggcctcctatttattctagccacctctagcctagccgtttactcaatcctctgatcagggtgagcatcaaactcaaactacgccctgatcggcgcactgcgagcagtagcccaaacaatctcatatgaagtcaccctagccatcattctactatcaacattactaataagtggctcctttaacctctccacccttatcacaacacaagaacacctctgattactcctgccatcatgacccttggccataatatgatttatctccacactagcagagaccaaccgaacccccttcgaccttgccgaaggggagtccgaactagtctcaggcttcaacatcgaatacgccgcaggccccttcgccctattcttcatagccgaatacacaaacattattataataaacaccctcaccactacaatcttcctaggaacaacatatgacgcactctcccctgaactctacacaacatattttgtcaccaagaccctacttctaacctccctgttcttatgaattcgaacagcatacccccgattccgctacgaccaactcatacacctcctatgaaaaaacttcctaccactcaccctagcattacttatatgatatgtctccatacccattacaatctccagcattccccctcaaacctaagaaatatgtctgataaaagagttactttgatagagtaaataataggagcttaaacccccttatttctaggactatgagaatcgaacccatccctgagaatccaaaattctccgtgccacctatcacaccccatcctaaagtaaggtcagctaaataagctatcgggcccataccccgaaaatgttggttatacccttcccgtactaattaatcccctggcccaacccgtcatctactctaccatctttgcaggcacactcatcacagcgctaagctcgcactgattttttacctgagtaggcctagaaataaacatgctagcttttattccagttctaaccaaaaaaataaaccctcgttccacagaagctgccatcaagtatttcctcacgcaagcaaccgcatccataatccttctaatagctatcctcttcaacaatatactctccggacaatgaaccataaccaatactaccaatcaatactcatcattaataatcataatggctatagcaataaaactaggaatagccccctttcacttctgagtcccagaggttacccaaggcacccctctgacatccggcctgcttcttctcacatgacaaaaactagcccccatctcaatcatataccaaatctctccctcactaaacgtaagccttctcctcactctctcaatcttatccatcatagcaggcagttgaggtggattaaaccaaacccagctacgcaaaatcttagcatactcctcaattacccacataggatgaataatagcagttctaccgtacaaccctaacataaccattcttaatttaactatttatattatcctaactactaccgcattcctactactcaacttaaactccagcaccacgaccctactactatctcgcacctgaaacaagctaacatgactaacacccttaattccatccaccctcctctccctaggaggcctgcccccgctaaccggctttttgcccaaatgggccattatcgaagaattcacaaaaaacaatagcctcatcatccccaccatcatagccaccatcaccctccttaacctctacttctacctacgcctaatctactccacctcaatcacactactccccatatctaacaacgtaaaaataaaatgacagtttgaacatacaaaacccaccccattcctccccacactcatcgcccttaccacgctactcctacctatctccccttttatactaataatcttatagaaatttaggttaaatacagaccaagagccttcaaagccctcagtaagttgcaatacttaatttctgtaacagctaaggactgcaaaaccccactctgcatcaactgaacgcaaatcagccactttaattaagctaagcccttactagaccaatgggacttaaacccacaaacacttagttaacagctaagcaccctaatcaactggcttcaatctacttctcccgccgccgggaaaaaaggcgggagaagccccggcaggtttgaagctgcttcttcgaatttgcaattcaatatgaaaatcacctcggagctggtaaaaagaggcctaacccctgtctttagatttacagtccaatgcttcactcagccattttacctcacccccactgatgttcgccgaccgttgactattctctacaaaccacaaagacattggaacactatacctattattcggcgcatgagctggagtcctaggcacagctctaagcctccttattcgagccgagctgggccagccaggcaaccttctaggtaacgaccacatctacaacgttatcgtcacagcccatgcatttgtaataatcttcttcatagtaatacccatcataatcggaggctttggcaactgactagttcccctaataatcggtgcccccgatatggcgtttccccgcataaacaacataagcttctgactcttacctccctctctcctactcctgctcgcatctgctatagtggaggccggagcaggaacaggttgaacagtctaccctcccttagcagggaactactcccaccctggagcctccgtagacctaaccatcttctccttacacctagcaggtgtctcctctatcttaggggccatcaatttcatcacaacaattatcaatataaaaccccctgccataacccaataccaaacgcccctcttcgtctgatccgtcctaatcacagcagtcctacttctcctatctctcccagtcctagctgctggcatcactatactactaacagaccgcaacctcaacaccaccttcttcgaccccgccggaggaggagaccccattctataccaacacctattctgatttttcggtcaccctgaagtttatattcttatcctaccaggcttcggaataatctcccatattgtaacttactactccggaaaaaaagaaccatttggatacataggtatggtctgagctatgatatcaattggcttcctagggtttatcgtgtgagcacaccatatatttacagtaggaatagacgtagacacacgagcatatttcacctccgctaccataatcatcgctatccccaccggcgtcaaagtatttagctgactcgccacactccacggaagcaatatgaaatgatctgctgcagtgctctgagccctaggattcatctttcttttcaccgtaggtggcctgactggcattgtattagcaaactcatcactagacatcgtactacacgacacgtactacgttgtagctcacttccactatgtcctatcaataggagctgtatttgccatcataggaggcttcattcactgatttcccctattctcaggctacaccctagaccaaacctacgccaaaatccatttcactatcatattcatcggcgtaaatctaactttcttcccacaacactttctcggcctatccggaatgccccgacgttactcggactaccccgatgcatacaccacatgaaacatcctatcatctgtaggctcattcatttctctaacagcagtaatattaataattttcatgatttgagaagccttcgcttcgaagcgaaaagtcctaatagtagaagaaccctccataaacctggagtgactatatggatgccccccaccctaccacacattcgaagaacccgtatacataaaatctagacaaaaaaggaaggaatcgaaccccccaaagctggtttcaagccaaccccatggcctccatgactttttcaaaaaggtattagaaaaaccatttcataactttgtcaaagttaagttataggctaaatcctatatatcttaatggcacatgcagcgcaagtaggtctacaagacgctacttcccctatcatagaagagcttatcacctttcatgatcacgccctcataatcattttccttatctgcttcctagtcctgtatgcccttttcctaacactcacaacaaaactaactaatactaacatctcagacgctcaggaaatagaaaccgtctgaactatcctgcccgccatcatcctagtcctcatcgccctcccatccctacgcatcctttacataacagacgaggtcaacgatccctcccttaccatcaaatcaattggccaccaatggtactgaacctacgagtacaccgactacggcggactaatcttcaactcctacatacttcccccattattcctagaaccaggcgacctgcgactccttgacgttgacaatcgagtagtactcccgattgaagcccccattcgtataataattacatcacaagacgtcttgcactcatgagctgtccccacattaggcttaaaaacagatgcaattcccggacgtctaaaccaaaccactttcaccgctacacgaccgggggtatactacggtcaatgctctgaaatctgtggagcaaaccacagtttcatgcccatcgtcctagaattaattcccctaaaaatctttgaaatagggcccgtatttaccctatagcaccccctctaccccctctagagcccactgtaaagctaacttagcattaaccttttaagttaaagattaagagaaccaacacctctttacagtgaaatgccccaactaaatactaccgtatggcccaccataattacccccatactccttacactattcctcatcacccagctaaaaatattaaacacaaactaccacctacctccctcaccaaagcccataaaaataaaaaattataacaaaccctgagaatcaaaatgaacgaaaatctgttcgcttcattcattgcccccacaatcctaggcctacccgccgcagtactgatcattctatttccccctctattgatccccacctccaaatatctcatcaacaaccgactaatcaccacccaacaatgactaatcaaactaacctcaaaacaaatgataaccatacacaacactaaaggacgaacctgatctcttatactagtatccttaatcatttttattgccacaactaacctcctcggactcctgcctcactcatttacaccaaccacccaactatctataaacctagccatggccatccccttatgagcgggcgcagtgattataggctttcgctctaagattaaaaatgccctagcccacttcttaccacaaggcacacctacaccccttatccccatactagttattatcgaaaccatcagcctactcattcaaccaatagccctggccgtacgcctaaccgctaacattactgcaggccacctactcatgcacctaattggaagcaccaccctagcaatatcaaccattaaccttccctctacacttatcatcttcacaattctaattctactgactatcctagaaatcgctgtcgccttaatccaagcctacgttttcacacttctagtaagcctctacctgcacgacaacacataatgacccaccaatcacatgcctatcatatagtaaaacccagcccatgacccctaacaggggccctctcagccctcctaatgacctccggcctagccatgtgatttcacttccactccataacgctcctcatactaggcctactaaccaacacactaaccatataccaatgatggcgcgatgtaacacgagaaagcacataccaaggccaccacacaccacctgtccaaaaaggccttcgatacgggataatcctatttattacctcagaagtttttttcttcgcaggatttttctgagccttttaccactccagcctagcccctaccccccaattaggagggcactggcccccaacaggcatcaccccgctaaatcccctagaagtcccactcctaaacacatccgtattactcgcatcaggagtatcaatcacctgagctcaccatagtctaatagaaaacaaccgaaaccaaataattcaagcactgctcattacaattttactgggtctctattttaccctcctacaagcctcagagtacttcgagtctcccttcaccatttccgacggcatctacggctcaacattttttgtagccacaggcttccacggacttcacgtcattattggctcaactttcctcactatctgcttcatccgccaactaatatttcactttacatccaaacatcactttggcttcgaagccgccgcctgatactggcattttgtagatgtggtttgactatttctgtatgtctccatctattgatgagggtcttactcttttagtataaatagtaccgttaacttccaattaactagttttgacaacattcaaaaaagagtaataaacttcgccttaattttaataatcaacaccctcctagccttactactaataattattacattttgactaccacaactcaacggctacatagaaaaatccaccccttacgagtgcggcttcgaccctatatcccccgcccgcgtccctttctccataaaattcttcttagtagctattaccttcttattatttgatctagaaattgccctccttttacccctaccatgagccctacaaacaactaacctgccactaatagttatgtcatccctcttattaatcatcatcctagccctaagtctggcctatgagtgactacaaaaaggattagactgagccgaattggtatatagtttaaacaaaacgaatgatttcgactcattaaattatgataatcatatttaccaaatgcccctcatttacataaatattatactagcatttaccatctcacttctaggaatactagtatatcgctcacacctcatgtcctccctactatgcctagaaggaataatactatcgctgttcattatagctactctcataaccctcaacacccactccctcttagccaatattgtgcctattgccatactagtctttgccgcctgcgaagcagcggtgggcctagccctactagtctcaatctccaacacatatggcctagactacgtacataacctaaacctactccaatgctaaaactaatcgtcccaacaattatattactaccactgacatgactttccaaaaaacacataatttgaatcaacacaaccacccacagcctaattattagcatcatccctctactattttttaaccaaatcaacaacaacctatttagctgttccccaaccttttcctccgaccccctaacaacccccctcctaatactaactacctgactcctacccctcacaatcatggcaagccaacgccacttatccagtgaaccactatcacgaaaaaaactctacctctctatactaatctccctacaaatctccttaattataacattcacagccacagaactaatcatattttatatcttcttcgaaaccacacttatccccaccttggttatcatcacccgatgaggcaaccagccagaacgcctgaacgcaggcacatacttcctattctacaccctagtaggctcccttcccctactcatcgcactaatttacactcacaacaccctaggctcactaaacattctactactcaccctcactgcccaagaactatcaaactcctgagccaacaacttaatatgactagcttacacaatagcttttatagtaaagatacctctttacggactccacttatgactccctaaagcccatgtcgaagcccccatcgctgggtcaatagtacttgccgcagtactcttgaaactaggcggctatggtataatacgcctcacactcattctcaaccccctgacaaaacacatagcctaccccttccttgtactatccctatgaggcataattataacaagctccatctgcctacgacaaacagacctaaaatcgctcattgcatactcttcaatcagccacatagccctcgtagtaacagccattctcatccaaaccccctgaagcttcaccggcgcagtcattctcataatcgcccacggacttacatcctcattactattctgcctagcaaactcaaactacgaacgcactcacagtcgcatcataatcctctctcaaggacttcaaactctactcccactaatagctttttgatgacttctagcaagcctcgctaacctcgccttaccccccactattaacctactgggagaactctctgtgctagtaaccacgttctcctgatcaaatatcactctcctacttacaggactcaacatactagtcacagccctatactccctctacatatttaccacaacacaatggggctcactcacccaccacattaacaacataaaaccctcattcacacgagaaaacaccctcatgttcatacacctatcccccattctcctcctatccctcaaccccgacatcattaccgggttttcctcttgtaaatatagtttaaccaaaacatcagattgtgaatctgacaacagaggcttacgaccccttatttaccgagaaagctcacaagaactgctaactcatgcccccatgtctaacaacatggctttctcaacttttaaaggataacagctatccattggtcttaggccccaagaattttggtgcaactccaaataaaagtaataaccatgcacactactataaccaccctaaccctaacttccctaattccccccatccttaccaccctcgttaaccctaacaaaaaaaactcatacccccattatgtaaaatccattgtcgcatccacctttattatcagtctcttccccacaacaatattcatgtgcctagaccaagaagttattatctcgaactgacactgagccacaacccaaacaacccagctctccctaagcttcaaactagactacttctccataatattcatccctgtagcattgttcgttacatggtccatcatagaattctcactgtgatatataaactcagacccaaacattaatcagttcttcaaatatctactcatcttcctaattaccatactaatcttagttaccgctaacaacctattccaactgttcatcggctgagagggcgtaggaattatatccttcttgctcatcagttgatgatacgcccgagcagatgccaacacagcagccattcaagcaatcctatacaaccgtatcggcgatatcggtttcatcctcgccttagcatgatttatcctacactccaactcatgagacccacaacaaatagcccttctaaacgctaatccaagcctcaccccactactaggcctcctcctagcagcagcaggcaaatcagcccaattaggtctccacccctgactcccctcagccatagaaggccccaccccagtctcagccctactccactcaagcactatagttgtagcaggaatcttcttactcgtccgcttccaccccctagcagaaaatagcccactaatccaaactctaacactatgcttaggcgctatcaccactctgttcgcagcagtctgcgcccttacacaaaatgacatcaaaaaaatcgtagccttctccacttcaagtcaactaggactcataatagttacaatcggcatcaaccaaccacacctagcattcctgcacatctgtacccacgccttcttcaaagccatactatttatgtgctccgggtccatcatccacaaccttaacaatgaacaagatattcgaaaaataggaggactactcaaaaccatacctctcacttcaacctccctcaccattggcagcctagcattagcaggaatacctttcctcacaggtttctactccaaagaccacatcatcgaaaccgcaaacatatcatacacaaacgcctgagccctatctattactctcatcgctacctccctgacaagcgcctatagcactcgaataattcttctcaccctaacaggtcaacctcgcttccccacccttactaacattaacgaaaataaccccaccctactaaaccccattaaacgcctggcagccggaagcctattcgcaggatttctcattactaacaacatttcccccgcatcccccttccaaacaacaatccccctctacctaaaactcacagccctcgctgtcactttcctaggacttctaacagccctagacctcaactacctaaccaacaaacttaaaataaaatccccactatgcacattttatttctccaacatactcggattctaccctagcatcacacaccgcacaatcccctatctaggccttcttacgagccaaaacctgcccctactcctcctagacctaacctgactagaaaagctattacctaaaacaatttcacagcaccaaatctccacctccatcatcacctcaacccaaaaaggcataattaaactttacttcctctctttcttcttcccactcatcctaaccctactcctaatcacataacctattcccccgagcaatttcaattacaatatatacaccaacaaacaatgttcaaccagtaactactactaatcaacgcccataatcatacaaagcccccgcaccaataggatcctcccgaatcaaccctgacccctctccttcataaattattcagcttcctacactattaaagtttaccacaaccaccaccccatcatactctttcacccacagcaccaatcctacctccatcgctaaccccactaaaacactcaccaagacctcaacccctgacccccatgcctcaggatactcctcaatagccatcgctgtagtatatccaaagacaaccatcattccccctaaataaattaaaaaaactattaaacccatataacctcccccaaaattcagaataataacacacccgaccacaccgctaacaatcaatactaaacccccataaataggagaaggcttagaagaaaaccccacaaaccccattactaaacccacactcaacagaaacaaagcatacatcattattctcgcacggactacaaccacgaccaatgatatgaaaaaccatcgttgtatttcaactacaagaacaccaatgaccccaatacgcaaaattaaccccctaataaaattaattaaccactcactcatcgacctccccaccccatccaacatctccgcatgatgaaacttcggctcactccttggcgcctgcctgatcctccaaatcaccacaggactattcctagccatgcactactcaccagacgcctcaaccgccttttcatcaatcgcccacatcactcgagacgtaaattatggctgaatcatccgctaccttcacgccaatggcgcctcaatattctttatctgcctcttcctacacatcgggcgaggcctatattacggatcatttctctactcagaaacctgaaacatcggcattatcctcctgcttgcaactatagcaacagccttcataggctatgtcctcccgtgaggccaaatatcattctgaggggccacagtaattacaaacttactatccgccatcccatacattgggacagacctagttcaatgaatctgaggaggctactcagtagacagtcccaccctcacacgattctttacctttcacttcatcttgcccttcattattgcagccctagcagcactccacctcctattcttgcacgaaacgggatcaaacaaccccctaggaatcacctcccattccgataaaatcaccttccacccttactacacaatcaaagacgccctcggcttacttctcttccttctctccttaatgacattaacactattctcaccagacctcctaggcgacccagacaattataccctagccaaccccttaaacacccctccccacatcaagcccgaatgatatttcctattcgcctacacaattctccgatccgtccctaacaaactaggaggcgtccttgccctattactatccatcctcatcctagcaataatccccatcctccatatatccaaacaacaaagcataatatttcgcccactaagccaatcactttattgactcctagccgcagacctcctcattctaacctgaatcggaggacaaccagtaagctacccttttaccatcattggacaagtagcatccgtactatacttcacaacaatcctaatcctaataccaactatctccctaattgaaaacaaaatactcaaatgggcctgtccttgtagtataaactaatacaccagtcttgtaaaccggagatgaaaacctttttccaaggacaaatcagagaaaaagtctttaactccaccattagcacccaaagctaagattctaatttaaactattctctgttctttcatggggaagcagatttgggtaccacccaagtattgactcacccatcaacaaccgctatgtatttcgtacattactgccagccaccatgaatattgtacggtaccataaatacttgaccacctgtagtacataaaaacccaatccacatcaaaaccccctccccatgcttacaagcaagtacagcaatcaacccccaactatcacacatcaactgcaactccaaagccacccctcacccactaggataccaacaaacctacccacccttaacagtacatagcacataaagccatttaccgtacatagcacattacagtcaaatcccttctcgtccccatggatgacccccctcagataggggtcccttgaccaccatcctccgtgaaatcaatatcccgcacaagagtgctactctcctcgctccgggcccataacacttgggggtagctaaagtgaactgtatccgacatctggttcctacttcagggccataaagcctaaatagcccacacgttccccttaaataagacatcacgatg

SEQ ID NO: 44 - DNA, 16570 bp, Homo sapiens mitochondrial
  3108: "n" refers to a nucleotide at position 3107 of the Cambridge Reference Sequence (CRS, Anderson et al. 1981 Nature 290:457-465), later determined to be absent from the human mtDNA sequence according to the revised CRS (rCRS, Andrews et al. 1999 Nature Genetics 23:147); "n" therefore represents a single nucleotide deletion at a position corresponding to nucleotide 3107 of SEQ ID NO:1 as provided herein.
gatcacaggtctatcaccctattaaccactcacgggagctctccatgcatttggtattttcgtctggggggtgtgcacgcgatagcattgcgagacgctggagccggagcaccctatgtcgcagtatctgtctttgattcctgcctcatcctattatttatcgcacctacgttcaatattacaggcgaacatacttactaaagtgtgttaattaattaatgcttgtaggacataataataacaattgaatgtctgcacagccgctttccacacagacatcataacaaaaaatttccaccaaaccccccctcccccgccttctggccacagcacttaaacacatctctgccaaaccccaaaaacaaagaaccctaacaccagcctaaccagatttcaaattttatcttttggcggtatgcacttttaacagtcaccccccaactaacacattattttcccctcccactcccatactactaatctcatcaatacaacccccgcccatcctacccagcacacacacaccgctgctaaccccataccccgaaccaaccaaaccccaaagacaccccccacagtttatgtagcttacctcctcaaagcaatacactgaaaatgtttagacgggctcacatcaccccataaacaaataggtttggtcctagcctttctattagctcttagtaagattacacatgcaagcatccccgttccagtgagttcaccctctaaatcaccacgatcaaaagggacaagcatcaagcacgcagcaatgcagctcaaaacgcttagcctagccacacccccacgggaaacagcagtgattaacctttagcaataaacgaaagtttaactaagctatactaaccccagggttggtcaatttcgtgccagccaccgcggtcacacgattaacccaagtcaatagaagccggcgtaaagagtgttttagatcaccccctccccaataaagctaaaactcacctgagttgtaaaaaactccagttgacacaaaatagactacgaaagtggctttaacatatctgaacacacaatagctaagacccaaactgggattagataccccactatgcttagccctaaacctcaacagttaaatcaacaaaactgctcgccagaacactacgagccacagcttaaaactcaaaggacctggcggtgcttcatatccctctagaggagcctgttctgtaatcgataaaccccgatcaacctcaccacctcttgctcagcctatataccgccatcttcagcaaaccctgatgaaggctacaaagtaagcgcaagtacccacgtaaagacgttaggtcaaggtgtagcccatgaggtggcaagaaatgggctacattttctaccccagaaaactacgatagcccttatgaaacttaagggtcgaaggtggatttagcagtaaactgagagtagagtgcttagttgaacagggccctgaagcgcgtacacaccgcccgtcaccctcctcaagtatacttcaaaggacatttaactaaaacccctacgcatttatatagaggagacaagtcgtaacatggtaagtgtactggaaagtgcacttggacgaaccagagtgtagcttaacacaaagcacccaacttacacttaggagatttcaacttaacttgaccgctctgagctaaacctagccccaaacccactccaccttactaccagacaaccttagccaaaccatttacccaaataaagtataggcgatagaaattgaaacctggcgcaatagatatagtaccgcaagggaaagatgaaaaattataaccaagcataatatagcaaggactaacccctataccttctgcataatgaattaactagaaataactttgcaaggagagccaaagctaagacccccgaaaccagacgagctacctaagaacagctaaaagagcacacccgtctatgtagcaaaatagtgggaagatttataggtagaggcgacaaacctaccgagcctggtgatagctggttgtccaagatagaatcttagttcaactttaaatttgcccacagaaccctctaaatccccttgtaaatttaactgttagtccaaagaggaacagctctttggacactaggaaaaaaccttgtagagagagtaaaaaatttaacacccatagtaggcctaaaagcagccaccaattaagaaagcgttcaagctcaacacccactacctaaaaaatcccaaacatataactgaactcctcacacccaattggaccaatctatcaccctatagaagaactaatgttagtataagtaacatgaaaacattctcctccgcataagcctgcgtcagattaaaacactgaactgacaattaacagcccaatatctacaatcaaccaacaagtcattattaccctcactgtcaacccaacacaggcatgctcataaggaaaggttaaaaaaagtaaaaggaactcggcaaatcttaccccgcctgtttaccaaaaacatcacctctagcatcaccagtattagaggcaccgcctgcccagtgacacatgtttaacggccgcggtaccctaaccgtgcaaaggtagcataatcacttgttccttaaatagggacctgtatgaatggctccacgagggttcagctgtctcttacttttaaccagtgaaattgacctgcccgtgaagaggcgggcatgacacagcaagacgagaagaccctatggagctttaatttattaatgcaaacagtacctaacaaacccacaggtcctaaactaccaaacctgcattaaaaatttcggttggggcgacctcggagcagaacccaacctccgagcagtacatgctaagacttcaccagtcaaagcgaactactatactcaattgatccaataacttgaccaacggaacaagttaccctagggataacagcgcaatcctattctagagtccatatcaacaatagggtttacgacctcgatgttggatcaggacatcccgatggtgcagccgctattaaaggttcgtttgttcaacgattaaagtcctacgtgatctgagttcagaccggagtaatccaggtcggtttctatctacnttcaaattcctccctgtacgaaaggacaagagaaataaggcctacttcacaaagcgccttcccccgtaaatgatatcatctcaacttagcattatacccacacccacccaagaacagggtttgttaagatggcagagcccggtaatcgcataaaacttaaaactttacagtcagaggttcaattcctcttcttaacaacatacccatggccaacctcctactcctcattgtacccattctaatcgcaatggcattcctaatgcttaccgaacgaaaaattctaggctatatacaactacgcaaaggccccaacgttgtaggcccctacgggctactacaacccttcgctgacgccataaaactcttcaccaaagagcccctaaaacccgccacatctaccatcaccctctacatcaccgccccgaccttagctctcaccatcgctcttctactatgaacccccctccccatacccaaccccctggtcaacctcaacctaggcctcctatttattctagccacctctagcctagccgtttactcaatcctctgatcagggtgagcatcaaactcaaactacgccctgatcggcgcactgcgagcagtagcccaaacaatctcatatgaagtcaccctagccatcattctactatcaacattactaataagtggctcctttaacctctccacccttatcacaacacaagaacacctctgattactcctgccatcatgacccttggccataatatgatttatctccacactagcagagaccaaccgaacccccttcgaccttgccgaaggggagtccgaactagtctcaggcttcaacatcgaatacgccgcaggccccttcgccctattcttcatagccgaatacacaaacattattataataaacaccctcaccactacaatcttcctaggaacaacatatgacgcactctcccctgaactctacacaacatattttgtcaccaagaccctacttctaacctccctgttcttatgaattcgaacagcatacccccgattccgctacgaccaactcatacacctcctatgaaaaaacttcctaccactcaccctagcattacttatatgatatgtctccatacccattacaatctccagcattccccctcaaacctaagaaatatgtctgataaaagagttactttgatagagtaaataataggagcttaaacccccttatttctaggactatgagaatcgaacccatccctgagaatccaaaattctccgtgccacctatcacaccccatcctaaagtaaggtcagctaaataagctatcgggcccataccccgaaaatgttggttatacccttcccgtactaattaatcccctggcccaacccgtcatctactctaccatctttgcaggcacactcatcacagcgctaagctcgcactgatttttcacctgagtaggcctagaaataaacatgctagcttttattccagttctaaccaaaaaaataaaccctcgttccacagaagctgccatcaagtatttcctcacgcaagcaaccgcatccataatccttctaatagctatcctcttcaacaatatactctccggacaatgaaccataaccaatactaccaatcaatactcatcattaataatcataatggctatagcaataaaactaggaatagccccctttcacttctgagtcccagaggttacccaaggcacccctctgacatccggcctgcttcttctcacatgacaaaaactagcccccatctcaatcatataccaaatctctccctcactaaacgtaagccttctcctcactctctcaatcttatccatcatagcaggcagttgaggtggattaaaccaaacccagctacgcaaaatcttagcatactcctcaattacccacataggatgaataatagcagttctaccgtacaaccctaacataaccattcttaatttaactatttatattatcctaactactaccgcattcctactactcaacttaaactccagcaccacgaccctactactatctcgcacctgaaacaagctaacatgactaacacccttaattccatccaccctcctctccctaggaggcctgcccccgctaaccggctttttgcccaaatgggccattatcgaagaattcacaaaaaacaatagcctcatcatccccaccatcatagccaccatcaccctccttaacctctacttctacctacgcctaatctactccacctcaatcacactactccccatatctaacaacgtaaaaataaaatgacagtttgaacatacaaaacccaccccattcctccccacactcatcgcccttaccacgctactcctacctatctccccttttatactaataatcttatagaaatttaggttaaatacagaccaagagccttcaaagccctcagtaagttgcaatacttaatttctgtaacagctaaggactgcaaaaccccactctgcatcaactgaacgcaaatcagccactttaattaagctaagcccttactagaccaatgggacttaaacccacaaacacttagttaacagctaagcaccctaatcaactggcttcaatctacttctcccgccgccgggaaaaaaggcgggagaagccccggcaggtttgaagctgcttcttcgaatttgcaattcaatatgaaaatcacctcggagctggtaaaaagaggcctaacccctgtctttagatttacagtccaatgcttcactcagccattttacctcacccccactgatgttcgccgaccgttgactattctctacaaaccacaaagacattggaacactatacctattattcggcgcatgagctggagtcctaggcacagctctaagcctccttattcgagccgagctgggccagccaggcaaccttctaggtaacgaccacatctacaacgttatcgtcacagcccatgcatttgtaataatcttcttcatagtaatacccatcataatcggaggctttggcaactgactagttcccctaataatcggtgcccccgatatggcgtttccccgcataaacaacataagcttctgactcttacctccctctctcctactcctgctcgcatctgctatagtggaggccggagcaggaacaggttgaacagtctaccctcccttagcagggaactactcccaccctggagcctccgtagacctaaccatcttctccttacacctagcaggtgtctcctctatcttaggggccatcaatttcatcacaacaattatcaatataaaaccccctgccataacccaataccaaacgcccctcttcgtctgatccgtcctaatcacagcagtcctacttctcctatctctcccagtcctagctgctggcatcactatactactaacagaccgcaacctcaacaccaccttcttcgaccccgccggaggaggagaccccattctataccaacacctattctgatttttcggtcaccctgaagtttatattcttatcctaccaggcttcggaataatctcccatattgtaacttactactccggaaaaaaagaaccatttggatacataggtatggtctgagctatgatatcaattggcttcctagggtttatcgtgtgagcacaccatatatttacagtaggaatagacgtagacacacgagcatatttcacctccgctaccataatcatcgctatccccaccggcgtcaaagtatttagctgactcgccacactccacggaagcaatatgaaatgatctgctgcagtgctctgagccctaggattcatctttcttttcaccgtaggtggcctgactggcattgtattagcaaactcatcactagacatcgtactacacgacacgtactacgttgtagctcacttccactatgtcctatcaataggagctgtatttgccatcataggaggcttcattcactgatttcccctattctcaggctacaccctagaccaaacctacgccaaaatccatttcactatcatattcatcggcgtaaatctaactttcttcccacaacactttctcggcctatccggaatgccccgacgttactcggactaccccgatgcatacaccacatgaaacatcctatcatctgtaggctcattcatttctctaacagcagtaatattaataattttcatgatttgagaagccttcgcttcgaagcgaaaagtcctaatagtagaagaaccctccataaacctggagtgactatatggatgccccccaccctaccacacattcgaagaacccgtatacataaaatctagacaaaaaaggaaggaatcgaaccccccaaagctggtttcaagccaaccccatggcctccatgactttttcaaaaaggtattagaaaaaccatttcataactttgtcaaagttaaattataggctaaatcctatatatcttaatggcacatgcagcgcaagtaggtctacaagacgctacttcccctatcatagaagagcttatcacctttcatgatcacgccctcataatcattttccttatctgcttcctagtcctgtatgcccttttcctaacactcacaacaaaactaactaatactaacatctcagacgctcaggaaatagaaaccgtctgaactatcctgcccgccatcatcctagtcctcatcgccctcccatccctacgcatcctttacataacagacgaggtcaacgatccctcccttaccatcaaatcaattggccaccaatggtactgaacctacgagtacaccgactacggcggactaatcttcaactcctacatacttcccccattattcctagaaccaggcgacctgcgactccttgacgttgacaatcgagtagtactcccgattgaagcccccattcgtataataattacatcacaagacgtcttgcactcatgagctgtccccacattaggcttaaaaacagatgcaattcccggacgtctaaaccaaaccactttcaccgctacacgaccgggggtatactacggtcaatgctctgaaatctgtggagcaaaccacagtttcatgcccatcgtcctagaattaattcccctaaaaatctttgaaatagggcccgtatttaccctatagcaccccctctaccccctctagagcccactgtaaagctaacttagcattaaccttttaagttaaagattaagagaaccaacacctctttacagtgaaatgccccaactaaatactaccgtatggcccaccataattacccccatactccttacactattcctcatcacccaactaaaaatattaaacacaaactaccacctacctccctcaccaaagcccataaaaataaaaaattataacaaaccctgagaaccaaaatgaacgaaaatctgttcgcttcattcattgcccccacaatcctaggcctacccgccgcagtactgatcattctatttccccctctattgatccccacctccaaatatctcatcaacaaccgactaatcaccacccaacaatgactaatcaaactaacctcaaaacaaatgataaccatacacaacactaaaggacgaacctgatctcttatactagtatccttaatcatttttattgccacaactaacctcctcggactcctgcctcactcatttacaccaaccacccaactatctataaacctagccatggccatccccttatgagcgggcgcagtgattataggctttcgctctaagattaaaaatgccctagcccacttcttaccacaaggcacacctacaccccttatccccatactagttattatcgaaaccatcagcctactcattcaaccaatagccctggccgtacgcctaaccgctaacattactgcaggccacctactcatgcacctaattggaagcgccaccctagcaatatcaaccattaaccttccctctacacttatcatcttcacaattctaattctactgactatcctagaaatcgctgtcgccttaatccaagcctacgttttcacacttctagtaagcctctacctgcacgacaacacataatgacccaccaatcacatgcctatcatatagtaaaacccagcccatgacccctaacaggggccctctcagccctcctaatgacctccggcctagccatgtgatttcacttccactccataacgctcctcatactaggcctactaaccaacacactaaccatataccaatgatggcgcgatgtaacacgagaaagcacataccaaggccaccacacaccacctgtccaaaaaggccttcgatacgggataatcctatttattacctcagaaatttttttcttcgcaggatttttctgagccttttaccactccagcctagcccctaccccccaattaggagggcactggcccccaacaggcatcaccccgctaaatcccctagaagtcccactcctaaacacatccgtattactcgcatcaggagtatcaatcacctgagctcaccatagtctaatagaaagcaaccgaaaccaaacaattcaagcactgcttattacaattttactgggtctctattttaccctcctacaagcctcagagtacttcgagtctcccttcaccatttccgacggcatctacggctcaacattttttgtagccacaggcttccacggacttcacgtcattattggctcaactttcctcactatctgcttcatccgccaactaatatttcactttacatccaaacatcactttggcttcgaagccgccgcctgatactggcattttgtagatgtggtttgactatttctgtatgtctccatctattgatgagggtcttactcttttagtataaatagtaccgttaacttccaattaactagttttgacaacattcaaaaaagagtaataaacttcgccttaattttaataatcaacaccctcctagccttactactaataattattacattttgactaccacaactcaacggctacatagaaaaatccaccccttacgagtgcggcttcgaccctatatcccccgcccgcgtccctttctccataaaattcttcttagtagctattaccttcttattatttgatctagaaattgccctccttttacccctaccatgagccctacaaacaactaacctgccactaatagttatgtcatccctcttattaatcatcatcctagccctaagtctggcctatgagtgactacaaaaaggattagactgaaccgaattggtatatagtttaaacaaaacgaatgatttcgactcattaaattatgataatcatatttaccaaatgcccctcatttacataaatattatactagcatttaccatctcacttctaggaatactagtatatcgctcacacctcatatcctccctactatgcctagaaggaataatactatcgctgttcattatagctactctcataaccctcaacacccactccctcttagccaatattgtgcctattgccatactagtctttgccgcctgcgaagcagcggtgggcctagccctactagtctcaatctccaacacatatggcctagactacgtacataacctaaacctactccaatgctaaaactaatcgtcccaacaattatattactaccactgacatgactttccaaaaaacacataatttgaatcaacacaaccacccacagcctaattattagcatcatccctctactattttttaaccaaatcaacaacaacctatttagctgttccccaaccttttcctccgaccccctaacaacccccctcctaatactaactacctgactcctacccctcacaatcatggcaagccaacgccacttatccagtgaaccactatcacgaaaaaaactctacctctctatactaatctccctacaaatctccttaattataacattcacagccacagaactaatcatattttatatcttcttcgaaaccacacttatccccaccttggctatcatcacccgatgaggcaaccagccagaacgcctgaacgcaggcacatacttcctattctacaccctagtaggctcccttcccctactcatcgcactaatttacactcacaacaccctaggctcactaaacattctactactcactctcactgcccaagaactatcaaactcctgagccaacaacttaatatgactagcttacacaatagcttttatagtaaagatacctctttacggactccacttatgactccctaaagcccatgtcgaagcccccatcgctgggtcaatagtacttgccgcagtactcttgaaactaggcggctatggtataatacgcctcacactcattctcaaccccctgacaaaacacatagcctaccccttccttgtactatccctatgaggcataattataacaagctccatctgcctacgacaaacagacctaaaatcgctcattgcatactcttcaatcagccacatagccctcgtagtaacagccattctcatccaaaccccctgaagcttcaccggcgcagtcattctcataatcgcccacggacttacatcctcattactattctgcctagcaaactcaaactacgaacgcactcacagtcgcatcataatcctctctcaaggacttcaaactctactcccactaatagctttttgatgacttctagcaagcctcgctaacctcgccttaccccccactattaacctactgggagaactctctgtgctagtaaccacgttctcctgatcaaatatcactctcctacttacaggactcaacatactagtcacagccctatactccctctacatatttaccacaacacaatggggctcactcacccaccacattaacaacataaaaccctcattcacacgagaaaacaccctcatgttcatacacctatcccccattctcctcctatccctcaaccccgacatcattaccgggttttcctcttgtaaatatagtttaaccaaaacatcagattgtgaatctgacaacagaggcttacgaccccttatttaccgagaaagctcacaagaactgctaactcatgcccccatgtctaacaacatggctttctcaacttttaaaggataacagctatccattggtcttaggccccaagaattttggtgcaactccaaataaaagtaataaccatgcacactactataaccaccctaaccctaacttccctaattccccccatccttaccaccctcgttaaccctaacaaaaaaaactcatacccccattatgtaaaatccattgtcgcatccacctttattatcagtctcttccccacaacaatattcatgtgcctagaccaagaagttattatctcgaactgacactgagccacaacccaaacaacccagctctccctaagcttcaaactagactacttctccataatattcatccctgtagcattgttcgttacatggtccatcatagaattctcactgtgatatataaactcagacccaaacattaatcagttcttcaaatatctactcatcttcctaattaccatactaatcttagttaccgctaacaacctattccaactgttcatcggctgagagggcgtaggaattatatccttcttgctcatcagttgatgatacgcccgagcagatgccaacacagcagccattcaagcaatcctatacaaccgtatcggcgatatcggtttcatcctcgccttagcatgatttatcctacactccaactcatgagacccacaacaaatagcccttctaaacgctaatccaagcctcaccccactactaggcctcctcctagcagcagcaggcaaatcagcccaattaggtctccacccctgactcccctcagccatagaaggccccaccccagtctcagccctactccactcaagcactatagttgtagcaggaatcttcttactcatccgcttccaccccctagcagaaaatagcccactaatccaaactctaacactatgcttaggcgctatcaccactctgttcgcagcagtctgcgcccttacacaaaatgacatcaaaaaaatcgtagccttctccacttcaagtcaactaggactcataatagttacaatcggcatcaaccaaccacacctagcattcctgcacatctgtacccacgccttcttcaaagccatactatttatgtgctccgggtccatcatccacaaccttaacaatgaacaagatattcgaaaaataggaggactactcaaaaccatacctctcacttcaacctccctcaccattggcagcctagcattagcaggaatacctttcctcacaggtttctactccaaagaccacatcatcgaaaccgcaaacatatcatacacaaacgcctgagccctatctattactctcatcgctacctccctgacaagcgcctatagcactcgaataatccttctcaccctaacaggtcaacctcgcttccccacccttactaacattaacgaaaataaccccaccctactaaaccccattaaacgcctggcagccggaagcctattcgcaggatttctcattactaacaacatttcccccgcatcccccttccaaacaacaatccccctctacctaaaactcacagccctcgctgtcactttcctaggacttctaacagccctagacctcaactacctaaccaacaaacttaaaataaaatccccactatgcacattttatttctccaacatactcggattctaccctagcatcacacaccgcacaatcccctatctaggccttcttacgagccaaaacctgcccctactcctcctagacctaacctgactagaaaagctattacctaaaacaatttcacagcaccaaatctccacctccatcatcacctcaacccaaaaaggcataattaaactttacttcctctctttcttcttcccactcatcctaaccctactcctaatcacataacctattcccccgagcaatctcaattacaatatatacaccaacaaacaatgttcaaccagtaactactactaatcaacgcccataatcatacaaagcccccgcaccaataggatcctcccgaatcaaccctgacccctctccttcataaattattcagcttcctacactattaaagtttaccacaaccaccaccccatcatactctttcacccacagcaccaatcctacctccatcgctaaccccactaaaacactcaccaagacctcaacccctgacccccatgcctcaggatactcctcaatagccatcgctgtagtatatccaaagacaaccatcattccccctaaataaattaaaaaaactattaaacccatataacctcccccaaaattcagaataataacacacccgaccacaccgctaataatcaatactaaacccccataaataggagaaggcttagaagaaaaccccacaaaccccattactaaacccacactcaacagaaacaaagcatacatcattattctcgcacggactacaaccacgaccaatgatatgaaaaaccatcgttgtatttcaactacaagaacaccaatgaccccaatacgcaaaattaaccccctaataaaattaattaaccgctcattcatcgacctccccaccccatccaacatctccgcatgatgaaacttcggctcactccttggcgcctgcctgatcctccaaatcaccacaggactattcctagccatgcactactcaccagacgcctcaaccgccttttcatcaatcgcccacatcactcgagacgtaaattatggctgaatcatccgctaccttcacgccaatggcgcctcaatattctttatctgcctcttcctacacatcgggcgaggcctatattacggatcatttctctactcagaaacctgaaacatcggcattatcctcctgcttgcaactatagcaacagccttcataggctatgtcctcccgtgaggccaaatatcattctgaggggccacagtaattacaaacttactatccgccatcccatacattggggcagacctagttcaatgaatctgaggaggctactcagtagacagtcccaccctcacacgattctttacctttcacttcatcttgcccttcattattgcagccctagcagcactccacctcctattcttgcacgaaacgggatcaaacaaccccctaggaatcacctcccattccgataaaatcaccttccacccttactacacaatcaaagacgccctcggcttacttctcttccttctctccttaatgacattaacactattctcaccagacctcctaggcgacccagacaattataccctagccaaccccttaaacacccctccccacatcaagcccgaatgatatttcctattcgcctacacaattctccgatccgtccctaacaaactaggaggcgtccttgccctattactatccatcctcatcctagcaataatccccatcctccatatatccaaacaacaaagcataatatttcgcccactaagccaatcactttattgactcctagccgcagacctcctcattctaacctgaatcggaggacaaccagtaagctacccttttaccatcattggacaagtagcatccgtactatacttcacaacaatcctaatcctaataccaactatctccctaattgaaaacaaaatactcaaatgggcctgtccttgtagtataaactaatacaccagtcttgtaaaccggagatgaaaacctttttccaaggacaaatcagagaaaaagtctttaactccaccattagcacccaaagctaagattctaatttaaactattctctgttctttcatggggaagcagatttgggtaccacccaagtattgactcacccatcaacaaccgctatgtatttcgtacattactgccagccaccatgaatattgtacggtaccataaatacttgaccacctgtagtacataaaaacccaatccacatcaaaaccccctcctcatgcttacaagcaagtacagcaatcaaccctcaactatcacacatcaactgcaactccaaagtcacccctcacccattaggataccaacaaacctactcacccttaacagtacatagtacataaagccatttaccgtacatagcacattacagtcaaatcccttctcgtccccatggatgacccccctcagataggggtcccttggccaccatcctccgtgaaatcaatatcccgcacaagagtgctactctcctcgctccgggcccataacacttgggggtagctaaagtgaactgtatccgacatctggttcctacttcagggtcataaagcctaaatagcccacacgttccccttaaataagacatcacgatg

SEQ ID NO: 45 - DNA, 16571 bp, Homo sapiens mitochondrial
  3109: "n" refers to a nucleotide at position 3107 of the Cambridge Reference Sequence (CRS, Anderson et al. 1981 Nature 290:457-465), later determined to be absent from the human mtDNA sequence according to the revised CRS (rCRS, Andrews et al. 1999 Nature Genetics 23:147); "n" therefore represents a single nucleotide deletion at a position corresponding to nucleotide 3107 of SEQ ID NO:1 as provided herein.
gatcacaggtctatcaccctattaaccactcacgggagctctccatgcatttggtattttcgtctggggggtatgcacgcgatagcattgcgagacgctggagccggagcaccctatgtcgcagtatctgtctttgattcctgcctcatcccattatttatcgcacctacgttcaatattacaggcgaacatacttactaaagtgtgttaattaattaatgcttgtaggacataataataacaattgaatgtctgcacagccgctttccacacagacatcataacaaaaaatttccaccaaaccccccctcccccccgcttctggccacagcacttaaacacatctctgccaaaccccaaaaacaaagaaccctaacaccagcctaaccagatttcaaattttatcttttggcggtatgcacttttaacagtcaccccccaactaacacattattttcccctcccactcccatactactaatctcatcaatacaacccccgcccatcctacccagcacacacacaccgctgctaaccccataccccgaaccaaccaaaccccaaagacaccccccacagtttatgtagcttacctcctcaaagcaatacactgaaaatgtttagacgggctcacatcaccccataaacaaataggtttggtcctagcctttctattagctcttagtaagattacacatgcaagcatccccgttccagtgagttcaccctctaaatcaccacgatcaaaagggacaagcatcaagcacgcagcaatgcagctcaaaacgcttagcctagccacacccccacgggaaacagcagtgattaacctttagcaataaacgaaagtttaactaagctatactaaccccagggttggtcaatttcgtgccagccaccgcggtcacacgattaacccaagtcaatagaagccggcgtaaagagtgttttagatcaccccctccccaataaagctaaaactcacctgagttgtaaaaaactccagttgacacaaaatagactacgaaagtggctttaacatatctgaacacacaatagctaagacccaaactgggattagataccccactatgcttagccctaaacctcaacagttaaatcaacaaaactgctcgccagaacactacgagccacagcttaaaactcaaaggacctggcggtgcttcatatccctctagaggagcctgttctgtaatcgataaaccccgatcaacctcaccacctcttgctcagcctatataccgccatcttcagcaaaccctgatgaaggctacaaagtaagcgcaagtacccacgtaaagacgttaggtcaaggtgtagcccatgaggtggcaagaaatgggctacattttctaccccagaaaactacgatagcccttatgaaacttaagggtcgaaggtggatttagcagtaaactgagagtagagtgcttagttgaacagggccctgaagcgcgtacacaccgcccgtcaccctcctcaagtatacttcaaaggacatttaactaaaacccctacgcatttatatagaggagacaagtcgtaacatggtaagtgtactggaaagtgcacttggacgaaccagagtgtagcttaacacaaagcacccaacttacacttaggagatttcaacttaacttgaccgctctgagctaaacctagccccaaacccactccaccttactaccagacaaccttagccaaaccatttacccaaataaagtataggcgatagaaattgaaacctggcgcaatagatatagtaccgcaagggaaagatgaaaaattataaccaagcataatatagcaaggactaacccctataccttctgcataatgaattaactagaaataactttgcaaggagagccaaagctaagacccccgaaaccagacgagctacctaagaacagctaaaagagcacacccgtctatgtagcaaaatagtgggaagatttataggtagaggcgacaaacctaccgagcctggtgatagctggttgtccaagatagaatcttagttcaactttaaatttgcccacagaaccctctaaatccccttgtaaatttaactgttagtccaaagaggaacagctctttggacactaggaaaaaaccttgtagagagagtaaaaaatttaacacccatagtaggcctaaaagcagccaccaattaagaaagcgttcaagctcaacacccactacctaaaaaatcccaaacatataactgaactcctcacacccaattggaccaatctatcaccctatagaagaactaatgttagtataagtaacatgaaaacattctcctccgcataagcctgcgtcagattaaaacactgaactgacaattaacagcccaatatctacaatcaaccaacaagtcattattaccctcactgtcaacccaacacaggcatgctcataaggaaaggttaaaaaaagtaaaaggaactcggcaaatcttaccccgcctgtttaccaaaaacatcacctctagcatcaccagtattagaggcaccgcctgcccagtgacacatgtttaacggccgcggtaccctaaccgtgcaaaggtagcataatcacttgttccttaaatagggacctgtatgaatggctccacgagggttcagctgtctcttacttttaaccagtgaaattgacctgcccgtgaagaggcgggcatgacacagcaagacgagaagaccctatggagctttaatttattaatgcaaacagtacctaacaaacccacaggtcctaaactaccaaacctgcattaaaaatttcggttggggcgacctcggagcagaacccaacctccgagcagtacatgctaagacttcaccagtcaaagcgaactactatactcaattgatccaataacttgaccaacggaacaagttaccctagggataacagcgcaatcctattctagagtccatatcaacaatagggtttacgacctcgatgttggatcaggacatcccgatggtgcagccgctattaaaggttcgtttgttcaacgattaaagtcctacgtgatctgagttcagaccggagtaatccaggtcggtttctatctacnttcaaattcctccctgtacgaaaggacaagagaaataaggcctacttcacaaagcgccttcccccgtaaatgatatcatctcaacttagtattatacccacacccacccaagaacagggtttgttaagatggcagagcccggtaatcgcataaaacttaaaactttacagtcagaggttcaattcctcttcttaacaacatacccatggccaacctcctactcctcattgtacccattctaatcgcaatggcattcctaatgcttaccgaacgaaaaattctaggctatatacaactacgcaaaggccccaacgttgtaggcccctacgggctactacaacccttcgctgacgccataaaactcttcaccaaagagcccctaaaacccgccacatctaccatcaccctctacatcaccgccccgaccttagctctcaccgtcgctcttctactatgaacccccctccccatacccaaccccctggtcaacctcaacctaggcctcctatttattctagccacctctagcctagccgtttactcaatcctctgatcagggtgagcatcaaactcaaactacgccctgatcggcgcactgcgagcagtagcccaaacaatctcatatgaagtcaccctagccatcattctactatcaacattactaataagtggctcctttaacctctccacccttatcacaacacaagaacacctctgattactcctgccatcatgacccttggccataatatgatttatctccacactagcagagaccaaccgaacccccttcgaccttgccgaaggggagtccgaactagtctcaggcttcaacatcgaatacgccgcaggccccttcgccctattcttcatagccgaatacacaaacattattataataaacaccctcaccactacaatcttcctaggaacaacatatgacgcactctcccctgaactctacacaacatattttgtcaccaagaccctacttctaacctccctgttcttatgaattcgaacagcatacccccgattccgctacgaccaactcatacacctcctatgaaaaaacttcctaccactcaccctagcattacttatatgatatgtctccatacccattacaatctccagcattccccctcaaacctaagaaatatgtctgataaaagagttactttgatagagtaaataataggagcttaaacccccttatttctaggactatgagaatcgaacccatccctgagaatccaaaattctccgtgccacctatcacaccccatcctaaagtaaggtcagctaaataagctatcgggcccataccccgaaaatgttggttatacccttcccgtactaattaatcccctggcccaacccgtcatctactctaccatctttgcaggcacactcatcacagcgctaagctcgcactgattttttacctgagtaggcctagaaataaacatgctagcttttattccagttctaaccaaaaaaataaaccctcgttccacagaagctgccatcaagtatttcctcacgcaagcaaccgcatccataatccttctaatagctatcctcttcaacaatatactctccggacaatgaaccataaccaatactaccaatcaatactcatcattaataatcataatggctatagcaataaaactaggaatagccccctttcacttctgagtcccagaggttacccaaggcacccctctgacatccggcctgcttcttctcacatgacaaaaactagcccccatctcaatcatataccaaatctctccctcactaaacgtaagccttctcctcactctctcaatcttatccatcatagcaggcagttgaggtggattaaaccaaacccagctacgcaaaatcttagcatactcctcaattacccacataggatgaataatagcagttctaccgtacaaccctaacataaccattcttaatttaactatttatattatcctaactactaccgcattcctactactcaacttaaactccagcaccacgaccctactactatctcgcacctgaaacaagctaacatgactaacacccttaattccatccaccctcctctccctaggaggcctgcccccgctaaccggctttttgcccaaatgggccattatcgaagaattcacaaaaaacaatagcctcatcatccccaccatcatagccaccatcaccctccttaacctctacttctacctacgcctaatctactccacctcaatcacactactccccatatctaacaacgtaaaaataaaatgacagtttgaacatacaaaacccaccccattcctccccacactcatcgcccttaccacgctactcctacctatctccccttttatactaataatcttatagaaatttaggttaaatacagaccaagagccttcaaagccctcagtaagttgcaatacttaatttctgtaacagctaaggactgcaaaaccccactctgcatcaactgaacgcaaatcagccactttaattaagctaagcccttactagaccaatgggacttaaacccacaaacacttagttaacagctaagcaccctaatcaactggcttcaatctacttctcccgccgccgggaaaaaaggcgggagaagccccggcaggtttgaagctgcttcttcgaatttgcaattcaatatgaaaatcacctcggagctggtaaaaagaggcctaacccctgtctttagatttacagtccaatgcttcactcagccattttacctcacccccactgatgttcgccgaccgttgactattctctacaaaccacaaagacattggaacactatacctattattcggcgcatgagctggagtcctaggcacagctctaagcctccttattcgagccgaactgggccagccaggcaaccttctaggtaacgaccacatctacaacgttatcgtcacagcccatgcatttgtaataatcttcttcatagtaatacccatcataatcggaggctttggcaactgactagttcccctaataatcggtgcccccgatatggcgtttccccgcataaacaacataagcttctgactcttacctccctctctcctactcctgctcgcatctgctatagtggaggccggagcaggaacaggttgaacagtctaccctcccttagcagggaactactcccaccctggagcctccgtagacctaaccatcttctccttacacctagcaggtgtctcctctatcttaggggccatcaatttcatcacaacaattatcaatataaaaccccctgccataacccaataccaaacgcccctcttcgtctgatccgtcctaatcacagcagtcctacttctcctatctctcccagtcctagctgctggcatcactatactactaacagaccgcaacctcaacaccaccttcttcgaccccgccggaggaggagaccccattctataccaacacctattctgatttttcggtcaccctgaagtttatattcttatcctaccaggcttcggaataatctcccatattgtaacttactactccggaaaaaaagaaccatttggatacataggtatggtctgagctatgatatcaattggcttcctagggtttatcgtgtgagcacaccatatatttacagtaggaatagacgtagacacacgagcatatttcacctccgctaccataatcatcgctatccccaccggcgtcaaagtatttagctgactcgccacactccacggaagcaatatgaaatgatctgctgcagtgctctgagccctaggattcatctttcttttcaccgtaggtggcctgactggcattgtattagcaaactcatcactagacatcgtactacacgacacgtactacgttgtagctcacttccactatgtcctatcaataggagctgtatttgccatcataggaggcttcattcactgatttcccctattctcaggctacaccctagaccaaacctacgccaaaatccatttcactatcatattcatcggcgtaaatctaactttcttcccacaacactttctcggcctatccggaatgccccgacgttactcggactaccccgatgcatacaccacatgaaacatcctatcatctgtaggctcattcatttctctaacagcagtaatattaataattttcatgatttgagaagccttcgcttcgaagcgaaaagtcctaatagtagaagaaccctccataaacctggagtgactatatggatgccccccaccctaccacacattcgaagaacccgtatacataaaatctagacaaaaaaggaaggaatcgaaccccccaaagctggtttcaagccaaccccatggcctccatgactttttcaaaaaggtattagaaaaaccatttcataactttgtcaaagttaaattataggctaaatcctatatatcttaatggcacatgcagcgcaagtaggtctacaagacgctacttcccctatcatagaagagcttatcacctttcatgatcacgccctcataatcattttccttatctgcttcctagtcctgtatgcccttttcctaacactcacaacaaaactaactaatactaacatctcagacgctcaggaaatagaaaccgtctgaactatcctgcccgccatcatcctagtcctcatcgccctcccatccctacgcatcctttacataacagacgaggtcaacgatccctcccttaccatcaaatcaattggccaccaatggtactgaacctacgagtacaccgactacggcggactaatcttcaactcctacatacttcccccattattcctagaaccaggcgacctgcgactccttgacgttgacaatcgagtagttctcccgattgaagcccccattcgtataataattacatcacaagacgtcttgcactcatgagctgtccccacattaggcttaaaaacagatgcaattcccggacgtctaaaccaaaccactttcaccgctacacgaccgggggtatactacggtcaatgctctgaaatctgtggagcaaaccacagtttcatgcccatcgtcctagaattaattcccctaaaaatctttgaaatagggcccgtatttaccctatagcaccccctctaccccctctagagcccactgtaaagctaacttagcattaaccttttaagttaaagattaagagaaccaacacctctttacagtgaaatgccccaactaaatactaccgtatggcccaccataattacccccatactccttacactattcctcatcacccaactaaaaatattaaacacaaactaccacctacctccctcaccaaagcccataaaaataaaaaattataacaaaccctgagaaccaaaatgaacgaaaatctgttcgcttcattcattgcccccacaatcctaggcctacccgccgcagtactgatcattctatttccccctctattgatccccacctccaaatatctcatcaacaaccgactaatcaccacccaacaatgactaatcaaactaacctcaaaacaaatgataaccatacacaacactaaaggacgaacctgatctcttatactagtatccttaatcatttttattgccacaactaacctcctcggactcctgcctcactcatttacaccaaccacccaactatctataaacctagccatggccatccccttatgagcgggcgcagtgattataggctttcgctctaagattaaaaatgccctagcccacttcttaccacaaggcacacctacaccccttatccccatactagttattatcgaaaccatcagcctactcattcaaccaatagccctggccgtacgcctaaccgctaacattactgcaggccacctactcatgcacctaattggaagcgccaccctagcaatatcaaccattaaccttccctctacacttatcatcttcacaattctaattctactgactatcctagaaatcgctgtcgccttaatccaagcctacgttttcacacttctagtaagcctctacctgcacgacaacacataatgacccaccaatcacatgcctatcatatagtaaaacccagcccatgacccctaacaggggccctctcagccctcctaatgacctccggcctagccatgtgatttcacttccactccataacgctcctcatactaggcctactaaccaacacactaaccatataccaatgatggcgcgatgtaacacgagaaagcacataccaaggccaccacacaccacctgtccaaaaaggccttcgatacgggataatcctatttattacctcagaagtttttttcttcgcaggatttttctgagccttttaccactccagcctagcccctaccccccaattaggagggcactggcccccaacaggcatcaccccgctaaatcccctagaagtcccactcctaaacacatccgtattactcgcatcaggagtatcaatcacctgagctcaccatagtctaatagaaaacaaccgaaaccaaataattcaagcactgcttattacaattttactgggtctctattttaccctcctacaagcctcagagtacttcgagtctcccttcaccatttccgacggcatctacggctcaacattttttgtagccacaggcttccacggacttcacgtcattattggctcaactttcctcactatctgcttcatccgccaactaatatttcactttacatccaaacatcactttggcttcgaagccgccgcctgatactggcattttgtagatgtggtttgactatttctgtatgtctccatctattgatgagggtcttactcttttagtataaatagtaccgttaacttccaattaactagttttgacaacattcaaaaaagagtaataaacttcgccttaattttaataatcaacaccctcctagccttactactaataattattacattttgactaccacaactcaacggctacatagaaaaatccaccccttacgagtgcggcttcgaccctatatcccccgcccgcgtccctttctccataaaattcttcttagtagctattaccttcttattatttgatctagaaattgccctccttttacccctaccatgagccctacaaacaactaacctgccactaatagttatgtcatccctcttattaatcatcatcctagccctaagtctggcctatgagtgactacaaaaaggattagactgaaccgaattggtatatagtttaaacaaaacgaatgatttcgactcattaaattatgataatcatatttaccaaatgcccctcatttacataaatattatactagcatttaccatctcacttctaggaatactagtatatcgctcacacctcatatcctccctactatgcctagaaggaataatactatcgctgttcattatagctactctcataaccctcaacacccactccctcttagccaatattgtgcctattgccatactagtctttgccgcctgcgaagcagcggtgggcctagccctactagtctcaatctccaacacatatggcctagactacgtacataacctaaacctactccaatgctaaaactaatcgtcccaacaattatattactaccactgacatgactttccaaaaaacacataatttgaatcaacacaaccacccacagcctaattattagcatcatccctctactattttttaaccaaatcaacaacaacctatttagctgttccccaaccttttcctccgaccccctaacaacccccctcctaatactaactacctgactcctacccctcacaatcatggcaagccaacgccacttatccagtgaaccactatcacgaaaaaaactctacctctctatactaatctccctacaaatctccttaattataacattcacagccacagaactaatcatattttatatcttcttcgaaaccacacttatccccaccttggctatcatcacccgatgaggcaaccagccagaacgcctgaacgcaggcacatacttcctattctacaccctagtaggctcccttcccctactcatcgcactaatttacactcacaacaccctaggctcactaaacattctactactcactctcactgcccaagaactatcaaactcctgagccaacaacttaatatgactagcttacacaatagcttttatagtaaagatacctctttacggactccacttatgactccctaaagcccatgtcgaagcccccatcgctgggtcaatagtacttgccgcagtactcttaaaactaggcggctatggtataatacgcctcacactcattctcaaccccctgacaaaacacatagcctaccccttccttgtactatccctatgaggcataattataacaagctccatctgcctacgacaaacagacctaaaatcgctcattgcatactcttcaatcagccacatagccctcgtagtaacagccattctcatccaaaccccctgaagcttcaccggcgcagtcattctcataatcgcccacgggcttacatcctcattactattctgcctagcaaactcaaactacgaacgcactcacagtcgcatcataatcctctctcaaggacttcaaactctactcccactaatagctttttgatgacttctagcaagcctcgctaacctcgccttaccccccactattaacctactgggagaactctctgtgctagtaaccacgttctcctgatcaaatatcactctcctacttacaggactcaacatactagtcacagccctatactccctctacatatttaccacaacacaatggggctcactcacccaccacattaacaacataaaaccctcattcacacgagaaaacaccctcatgttcatacacctatcccccattctcctcctatccctcaaccccgacatcattaccgggttttcctcttgtaaatatagtttaaccaaaacatcagattgtgaatctgacaacagaggcttacgaccccttatttaccgagaaagctcacaagaactgctaactcatgcccccatgtctaacaacatggctttctcaacttttaaaggataacagctatccattggtcttaggccccaaaaattttggtgcaactccaaataaaagtaataaccatgcacactactataaccaccctaaccctgacttccctaattccccccatccttaccaccctcgttaaccctaacaaaaaaaactcatacccccattatgtaaaatccattgtcgcatccacctttattatcagtctcttccccacaacaatattcatgtgcctagaccaagaagttattatctcgaactgacactgagccacaacccaaacaacccagctctccctaagcttcaaactagactacttctccataatattcatccctgtagcattgttcgttacatggtccatcatagaattctcactgtgatatataaactcagacccaaacattaatcagttcttcaaatacctactcatcttcctaattaccatactaatcttagttaccgctaacaacctattccaactgttcatcggctgagagggcgtaggaattatatccttcttgctcatcagttgatgatacgcccgagcagatgccaacacagcagccattcaagcaatcctatacaaccgtatcggcgatatcggtttcatcctcgccttagcatgatttatcctacactccaactcatgagacccacaacaaatagcccttctaaacgctaatccaagcctcaccccactactaggcctcctcctagcagcagcaggcaaatcagcccaattaggtctccacccctgactcccctcagccatagaaggccccaccccagtctcagccctactccactcaagcactatagttgtagcaggaatcttcttactcatccgcttccaccccctagcagaaaatagcccactaatccaaactctaacactatgcttaggcgctatcaccactctgttcgcagcagtctgcgcccttacacaaaatgacatcaaaaaaatcgtagccttctccacttcaagtcaactaggactcataatagttacaatcggcatcaaccaaccacacctagcattcctgcacatctgtacccacgccttcttcaaagccatactatttatgtgctccgggtccatcatccacaaccttaacaatgaacaagatattcgaaaaataggaggactactcaaaaccatacctctcacttcaacctccctcaccattggcagcctagcattagcaggaatacctttcctcacaggtttctactccaaagaccacatcatcgaaaccgcaaacatatcatacacaaacgcctgagccctatctattactctcatcgctacctccctgacaagcgcctatagcactcgaataattcttctcaccctaacaggtcaacctcgcttccccacccttactaacattaacgaaaataaccccaccctactaaaccccattaaacgcctggcagccggaagcctattcgcaggatttctcattactaacaacatttcccccgcatcccccttccaaacaacaatccccctctacctaaaactcacagccctcgctgtcactttcctaggacttctaacagccctagacctcaactacctaaccaacaaacttaaaataaaatccccactatgcacattttatttctccaacatactcggattctaccctagcatcacacaccgcacaatcccctatctaggccttcttacgagccaaaacctgcccctactcctcctagacctaacctgactagaaaagctattacctaaaacaatttcacagcaccaaatctccacctccatcatcacctcaacccaaaaaggcataattaaactttacttcctctctttcttcttcccactcatcctaaccctactcctaatcacataacctattcccccgagcaatctcaattacaatatatacaccaacaaacaatgttcaaccagtaactactactaatcaacgcccataatcatacaaagcccccgcaccaataggatcctcccgaatcaaccctgacccctctccttcataaattattcagcttcctacactattaaagtttaccacaaccaccaccccatcatactctttcacccacagcaccaatcctacctccatcgctaaccccactaaaacactcaccaagacctcaacccctgacccccatgcctcaggatactcctcaatagccatcgctgtagtatatccaaagacaaccatcattccccctaaataaattaaaaaaactattaaacccatataacctcccccaaaattcagaataataacacacccgaccacaccgctaacaatcaatactaaacccccataaataggagaaggcttagaagaaaaccccacaaaccccattactaaacccacactcaacagaaacaaagcatacatcattattctcgcacggactacaaccacgaccaatgatatgaaaaaccatcgttgtatttcaactacaagaacaccaatgaccccaatacgcaaaactaaccccctaataaaattaattaaccactcattcatcgacctccccaccccatccaacatctccgcatgatgaaacttcggctcactccttggcgcctgcctgatcctccaaatcaccacaggactattcctagccatgcactactcaccagacgcctcaaccgccttttcatcaatcgcccacatcactcgagacgtaaattatggctgaatcatccgctaccttcacgccaatggcgcctcaatattctttatctgcctcttcctacacatcgggcgaggcctatattacggatcatttctctactcagaaacctgaaacatcggcattatcctcctgcttgcaactatagcaacagccttcataggctatgtcctcccgtgaggccaaatatcattctgaggggccacagtaattacaaacttactatccgccatcccatacattggggcagacctagttcaatgaatctgaggaggctactcagtagacagtcccaccctcacacgattctttacctttcacttcatcttgcccttcattattgcagccctagcagcactccacctcctattcttgcacgaaacgggatcaaacaaccccctaggaatcacctcccattccgataaaatcaccttccacccttactacacaatcaaagacgccctcggcttacttctcttccttctctccttaatgacattaacactattctcaccagacctcctaggcgacccagacaattataccctagccaaccccttaaacacccctccccacatcaagcccgaatgatatttcctattcgcctacacaattctccgatccgtccctaacaaactaggaggcgtccttgccctattactatccatcctcatcctagcaataatccccatcctccatatatccaaacaacaaagcataatatttcgcccactaagccaatcactttattgactcctagccgcagacctcctcattctaacctgaatcggaggacaaccagtaagctacccttttaccatcattggacaagtagcatccgtactatacttcacaacaatcctaatcctaataccaactatctccctaattgaaaacaaaatactcaaatgggcctgtccttgtagtataaactaatacaccagtcttgtaaaccggagatgaaaacctttttccaaggacaaatcagagaaaaagtctttaactccaccattagcacccaaagctaagattctaatttaaactattctctgttctttcatggggaagcagatttgggtaccacccaagtattgactcacccatcaacaaccgctatgtatttcgtacattactgccagccaccatgaatattgtacggtaccataaatacttgaccacctgtagtacataaaaacccaatccacatcaaaaccccctccccatgcttacaagcaagtacagcaatcaaccctcaactatcacacatcaactgcaactccaaagccacccctcacccactaggataccaacaaacctacccacccttaacagtacatagtacataaagccatttaccgtacatagcacattacagtcaaatcccttctcgtccccatggatgacccccctcagataggggtcccttgaccaccatcctccgtgaaatcaatatcccgcacaagagtgctactctcctcgctccgggcccataacacttgggggtagctaaagtgaactgtatccgacatctggttcctacttcagggccataaagcctaaatagcccacacgttccccttaaataagacatcacgatg

SEQ ID NO: 46 - DNA, 16571 bp, Homo sapiens mitochondrial
  3109: "n" refers to a nucleotide at position 3107 of the Cambridge Reference Sequence (CRS, Anderson et al. 1981 Nature 290:457-465), later determined to be absent from the human mtDNA sequence according to the revised CRS (rCRS, Andrews et al. 1999 Nature Genetics 23:147); "n" therefore represents a single nucleotide deletion at a position corresponding to nucleotide 3107 of SEQ ID NO:1 as provided herein.
gatcacaggtctatcaccctattaaccactcacgggagctctccatgcatttggtattttcgtctggggggtgtgcacgcgatagcattgcgagacgctggagccggagcaccctatgtcgcagtatctgtctttgattcctgcctcatcctattatttatcgcacctacgttcaatattacaggcgaacatacttactaaagtgtgttaattaattaatgcttgtaagacataataataacaattgaatgtctgcacagccgctttccacacagacatcataacaaaaaattttcaccaaaccccccctcccccccgcttctggccacagcacttaaacacatctctgccaaaccccaaaaacaaagaaccctaacaccagcctaaccagatttcaaattttatcttttggcggtatgcacttttaacagtcaccccccaactaacacattattttcccctctcactcccatactactaatctcatcaacacaacccccgcccatcctacccagcacacacacaccgctgctaaccccataccccgaaccaaccaaaccccaaagacaccccccacagtttatgtagcttacctcctcaaagcaatacactgaaaatgtttagacgggctcacatcaccccataaacaaataggtttggtcctagcctttctattagctcttagtaagattacacatgcaagcatccccgttccagtgagttcaccctctaaatcaccacgatcaaaagggacaagcatcaagcacgcagcaatgcagctcaaaacgcttagcctagccacacccccacgggaaacagcagtgattaacctttagcaataaacgaaagtttaactaagctatactaaccccagggttggtcaatttcgtgccagccaccgcggtcacacgattaacccaagtcaatagaagccggcgtaaagagtgttttagatcaccccctccccaataaagctaaaactcacctgagttgtaaaaaactccagttgacacaaaatagactacgaaagtggctttaacatatctgaacacacaatagctaagacccaaactgggattagataccccactatgcttagccctaaacctcaacagttaaatcaacaaaactgctcgccagaacactacgagccacagcttaaaactcaaaggacctggcggtgcttcatatccctctagaggagcctgttctgtaatcgataaaccccgatcaacctcaccacctcttgctcagcctatataccgccatcttcagcaaaccctgatgaaggctacaaagtaagcgcaagtacccacgtaaagacgttaggtcaaggtgtagcccatgaggtggcaagaaatgggctacattttctaccccagaaaactacgatagcccttatgaaacttaagggtcgaaggtggatttagcagtaaactgagagtagagtgcttagttgaacagggccctgaagcgcgtacacaccgcccgtcaccctcctcaagtatacttcaaaggacatttaactaaaacccctacgcatttatatagaggagacaagtcgtaacatggtaagtgtactggaaagtgcacttggacgaaccagagtgtagcttaacacaaagcacccaacttacacttaggagatttcaacttaacttgaccgctctgagctaaacctagccccaaacccactccaccttactaccagacaaccttagccaaaccatttacccaaataaagtataggcgatagaaattgaaacctggcgcaatagatatagtaccgcaagggaaagatgaaaaattataaccaagcataatatagcaaggactaacccctataccttctgcataatgaattaactagaaataactttgcaaggagagccaaagctaagacccccgaaaccagacgagctacctaagaacagctaaaagagcacacccgtctatgtagcaaaatagtgggaagatttataggtagaggcgacaaacctaccgagcctggtgatagctggttgtccaagatagaatcttagttcaactttaaatttgcccacagaaccctctaaatccccttgtaaatttaactgttagtccaaagaggaacagctctttggacactaggaaaaaaccttgtagagagagtaaaaaatttaacacccatagtaggcctaaaagcagccaccaattaagaaagcgttcaagctcaacacccactacctaaaaaatcccaaacatataactgaactcctcacacccaattggaccaatctatcaccctatagaagaactaatgttagtataagtaacatgaaaacattctcctccgcataagcctgcgtcagattaaaacactgaactgacaattaacagcccaatatctacaatcaaccaacaagtcattattaccctcactgtcaacccaacacaggcatgctcataaggaaaggttaaaaaaagtaaaaggaactcggcaaatcttaccccgcctgtttaccaaaaacatcacctctagcatcaccagtattagaggcaccgcctgcccagtgacacatgtttaacggccgcggtaccctaaccgtgcaaaggtagcataatcacttgttccttaaatagggacctgtatgaatggctccacgagggttcagctgtctcttacttttaaccagtgaaattgacctgcccgtgaagaggcgggcatgacacagcaagacgagaagaccctatggagctttaatttattaatgcaaacagtacctaacaaacccacaggtcctaaactaccaaacctgcattaaaaatttcggttggggcgacctcggagcagaacccaacctccgagcagtacatgctaagacttcaccagtcaaagcgaactactatactcaattgatccaataacttgaccaacggaacaagttaccctagggataacagcgcaatcctattctagagtccatatcaacaatagggtttacgacctcgatgttggatcaggacatcccaatggtgcagccgctattaaaggttcgtttgttcaacgattaaagtcctacgtgatctgagttcagaccggagtaatccaggtcggtttctatctacnttcaaattcctccctgtacgaaaggacaagagaaataaggcctacttcacaaagcgccttcccccgtaaatgatatcatctcaacttagtattatacccacacccacccaagaacagggtttgttaagatggcagagcccggtaatcgcataaaacttaaaactttacagtcagaggttcaattcctcttcttaacaacatacccatggccaacctcctactcctcattgtacccattctaatcgcaatggcattcctaatgcttaccgaacgaaaaattctaggctatatacaactacgcaaaggccccaacgttgtaggcccctacgggctactacaacccttcgctgacgccataaaactcttcaccaaagagcccctaaaacccgccacatctaccatcaccctctacatcaccgccccgaccttagctctcaccatcgctcttctactatgaacccccctccccatacccaaccccctggtcaacctcaacctaggcctcctatttattctagccacctctagcctagccgtttactcaatcctctgatcagggtgagcatcaaactcaaactacgccctgatcggcgcactgcgagcagtagcccaaacaatctcatatgaagtcaccctagccatcattctactatcaacattactaataagtggctcctttaacctctccacccttatcacaacacaagaacacctctgattactcctgccatcatgacccttggccataatatgatttatctccacactagcagagaccaaccgaacccccttcgaccttgccgaaggggagtccgaactagtctcaggcttcaacatcgaatacgccgcaggccccttcgccctattcttcatagccgaatacacaaacattattataataaacaccctcaccactacaatcttcctaggaacaacatatgacgcactctcccctgaactctacacaacatattttgtcaccaagaccctacttctaacctccctgttcttatgaattcgaacagcatacccccgattccgctacgaccaactcatacacctcctatgaaaaaacttcctaccactcaccctagcattacttatatgacatgtctccatacccattacaatctccagcattccccctcaaacctaagaaatatgtctgataaaagagttactttgatagagtaaataataggagcttaaacccccttatttctaggactatgagaatcgaacccatccctgagaatccaaaattctccgtgccacctatcacaccccatcctaaagtaaggtcagctaaataagctatcgggcccataccccgaaaatgttggttatacccttcccgtactaattaatcccctggcccaacccgtcatctactctaccatctttgcaggcacactcatcacagcgctaagctcgcactgattttttacctgagtaggcctagaaataaacatgctagcttttattccagttctaaccaaaaaaataaaccctcgttccacagaagctgccatcaagtatttcctcacgcaagcaaccgcatccataatccttctaatagctatcctcttcaacaatatactctccggacaatgaaccataaccaatactaccaatcaatactcatcattaataatcataatggctatagcaataaaactaggaatagccccctttcacttctgagtcccagaggttacccaaggcacccctctgacatccggcctgcttcttctcacatgacaaaaactagcccccatctcaatcatataccaaatctctccctcactaaacgtaagccttctcctcactctctcaatcttatccatcatagcaggcagttgaggtggattaaaccaaacccagctacgcaaaatcttagcatactcctcaattacccacataggatgaataatagcagttctaccgtacaaccctaacataaccattcttaatttaactatttatattatcctaactactaccgcattcctactactcaacttaaactccagcaccacgaccctactactatctcgcacctgaaacaagctaacatgactaacacccttaattccatccaccctcctctccctaggaggcctgcccccgctaaccggctttttgcccaaatgggccattatcgaagaattcacaaaaaacaatagcctcatcatccccaccatcatagccaccatcaccctccttaacctctacttctacctacgcctaatctactccacctcaatcacactactccccatatctaacaacgtaaaaataaaatgacagtttgaacatacaaaacccaccccattcctccccacactcatcgcccttaccacgctactcctacctatctccccttttatactaataatcttatagaaatttaggttaaatacagaccaagagccttcaaagccctcagtaagttgcaatacttaatttctgtaacagctaaggactgcaaaaccccactctgcatcaactgaacgcaaatcagccactttaattaagctaagcccttactagaccaatgggacttaaacccacaaacacttagttaacagctaagcaccctaatcaactggcttcaatctacttctcccgccgccgggaaaaaaggcgggagaagccccggcaggtttgaagctgcttcttcgaatttgcaattcaatatgaaaatcacctcggagctggtaaaaagaggcctaacccctgtctttagatttacagtccaatgcttcactcagccattttacctcacccccactgatgttcgccgaccgttgactattctctacaaaccacaaagacattggaacactatacctattattcggcgcatgagctggagtcctaggcacagctctaagcctccttattcgagccgagctgggccagccaggcaaccttctaggtaacgaccacatctacaacgttatcgtcacagcccatgcatttgtaataatcttcttcatagtaatacccatcataatcggaggctttggcaactgactagttcccctaataatcggtgcccccgatatggcgtttccccgcataaacaacataagcttctgactcttacctccctctctcctactcctgctcgcatctgctatagtggaggccggagcaggaacaggttgaacagtctaccctcccttagcagggaactactcccaccctggagcctccgtagacctaaccatcttctccttacacctagcaggtgtctcctctatcttaggggccatcaatttcatcacaacaattatcaatataaaaccccctgccataacccaataccaaacgcccctcttcgtctgatccgtcctaatcacagcagtcctacttctcctatctctcccagtcctagctgctggcatcactatactactaacagaccgcaacctcaacaccaccttcttcgaccccgccggaggaggagaccccattctataccaacacctattctgatttttcggtcaccctgaagtttatattcttatcctaccaggcttcggaataatctcccatattgtaacttactactccggaaaaaaagaaccatttggatacataggtatggtctgagctatgatatcaattggcttcctagggtttatcgtgtgagcacaccatatatttacagtaggaatagacgtagacacacgagcatatttcacctccgctaccataatcatcgctatccccaccggcgtcaaagtatttagctgactcgccacactccacggaagcaatatgaaatgatctgctgcagtgctctgagccctaggattcatctttcttttcaccgtaggtggcctgactggcattgtattagcaaactcatcactagacatcgtactacacgacacgtactacgttgtagctcacttccactatgtcctatcaataggagctgtatttgccatcataggaggcttcattcactgatttcccctattctcaggctacaccctagaccaaacctacgccaaaatccatttcactatcatattcatcggcgtaaatctaactttcttcccacaacactttctcggcctatccggaatgccccgacgttactcggactaccccgatgcatacaccacatgaaacatcctatcatctgtaggctcattcatttctctaacagcagtaatattaataattttcatgatttgagaagccttcgcttcgaagcgaaaagtcctaatagtagaagaaccctccataaacctggagtgactatatggatgccccccaccctaccacacattcgaagaacccgtatacataaaatctagacaaaaaaggaaggaatcgaaccccccaaagctggtttcaagccaaccccatggcctccatgactttttcaaaaaggtattagaaaaaccatttcataactttgtcaaagttaaattataggctaaatcctatatatcttaatggcacatgcagcgcaagtaggtctacaagacgctacttcccctatcatagaagagcttatcacctttcatgatcacgccctcataatcattttccttatctgcttcctagtcctgtatgccctcttcctaacactcacaacaaaactaactaatactaacatctcagacgctcaggaaatagaaaccgtctgaactatcctgcccgccatcatcctagtcctcatcgccctcccatccctacgcatcctttacataacagacgaggtcaacgatccctcccttaccatcaaatcaattggccaccaatggtactgaacctacgagtacaccgactacggcggactaatcttcaactcctacatacttcccccattattcctagaaccaggcgacctgcgactccttgacgttgacaatcgagtagtactcccgattgaagcccccattcgtataataattacatcacaagacgtcttgcactcatgagctgtccccacattaggcttaaaaacagatgcaattcccggacgtctaaaccaaaccactttcaccgctacacgaccgggggtatactacggtcaatgctctgaaatctgtggagcaaaccacagtttcatgcccatcgtcctagaattaattcccctaaaaatctttgaaatagggcccgtatttaccctatagcaccccctctaccccctctagagcccactgtaaagctaacttagcattaaccttttaagttaaagattaagagaaccaacacctctttacagtgaaatgccccaactaaatactaccgtatggcccaccataattacccccatactccttacactattcctcatcacccaactaaaaatattaaacacaaactaccacctacctccctcaccaaagcccataaaaataaaaaattataacaaaccctgagaaccaaaatgaacgaaaatctgttcgcttcattcattgcccccacaatcctaggcctacccgccgcagtactgatcattctatttccccctctattgatccccacctccaaatatctcatcaacaaccgactaatcaccacccaacaatgactaatcaaactaacctcaaaacaaatgataaccatacacaacactaaaggacgaacctgatctcttatactagtatccttaatcatttttattgccacaactaacctcctcggactcctgcctcactcatttacaccaaccacccaactatctataaacctagccatggccatccccttatgagcgggcgcagtgattataggctttcgctctaagattaaaaatgccctagcccacttcttaccacaaggcacacctacaccccttatccccatactagttattatcgaaaccatcagcctactcattcaaccaatagccctggccgtacgcctaaccgctaacattactgcaggccacctactcatgcacctaattggaagcgccaccctagcaatatcaaccattaaccttccctctacacttatcatcttcacaattctaattctactgactatcctagaaatcgctgtcgccttaatccaagcctacgttttcacacttctagtaagcctctacctgcacgacaacacataatgacccaccaatcacatgcctatcatatagtaaaacccagcccatgacccctaacaggggccctctcagccctcctaatgacctccggcctagccatgtgatttcacttccactccataacgctcctcatactaggcctactaaccaacacactaaccatataccaatgatggcgcgatgtaacacgagaaagcacataccaaggccaccacacaccacctgtccaaaaaggccttcgatacgggataatcctatttattacctcagaagtttttttcttcgcaggatttttctgagccttttaccactccagcctagcccctaccccccaattaggaggacactggcccccaacaggcatcaccccgctaaatcccctagaagtcccactcctaaacacatccgtattactcgcatcaggagtatcaatcacctgagctcaccatagtctaatagaaaacaaccgaaaccaaataattcaagcactgcttattacaattttactgggtctctattttaccctcctacaagcctcagagtacttcgagtctcccttcaccatttccgacggcatctacggctcaacattttttgtagccacaggcttccacggacttcacgtcattattggctcaactttcctcactatctgcttcatccgccaactaatatttcactttacatccaaacatcactttggcttcgaagccgccgcctgatactggcattttgtagatgtggtttgactatttctgtatgtctccatctattgatgagggtcttactcttttagtataaatagtaccgttaacttccaattaactagttttgacaacattcaaaaaagagtaataaacttcgccttaattttaataatcaacaccctcctagccttactactaataattattacattttgactaccacaactcaacggctacatagaaaaatccaccccttacgagtgcggcttcgaccctatatcccccgcccgcgtccctttctccataaaattcttcttagtagctattaccttcttattatttgatctagaaattgccctccttttacccctaccatgagccctacaaacaactaacctgccactaatagttatgtcatccctcttattaatcatcatcctagccctaagtctggcctatgagtgactacaaaaaggattagactgagccgaattggtatatagtttaaacaaaacgaatgatttcgactcattaaattatgataatcatatttaccaaatgcccctcatttacataaatattatactagcatttaccatctcacttctaggaatactagtatatcgctcacacctcatatcctccctactatgcctagaaggaataatactatcgctgttcattatagctactctcataaccctcaacacccactccctcttagccaatattgtgcctattgccatactagtctttgccgcctgcgaagcagcggtgggcctagccctactagtctcaatctccaacacatatggcctagactacgtacataacctaaacctactccaatgctaaaactaatcgtcccaacaattatattactaccactgacatgactttccaaaaaacacataatttgaatcaacacaaccacccacagcctaattattagcatcatccctctactattttttaaccaaatcaacaacaacctatttagctgttccccaaccttttcctccgaccccctaacaacccccctcctaatactaactacctgactcctacccctcacaatcatggcaagccaacgccacttatccagtgaaccactatcacgaaaaaaactctacctctctatactaatctccctacaaatctccttaattataacattcacagccacagaactaatcatattttatatcttcttcgaaaccacacttatccccaccttggctatcatcacccgatgaggcaaccagccagaacgcctgaacgcaggcacatacttcctattctacaccctagtaggctcccttcccctactcatcgcactgatttacactcacaacaccctaggctcactaaacattctactactcactctcactgcccaagaactatcaaactcctgagccaacaacttaatatgactagcttacacaatagcttttatagtaaagatacctctttacggactccacttatgactccctaaagcccatgtcgaagcccccatcgctgggtcaatagtacttgccgcagtactcttaaaactaggcggctatggtataatacgcctcacactcattctcaaccccctgacaaaacacatagcctaccccttccttgtactatccctatgaggcataattataacaagctccatctgcctacgacaaacagacctaaaatcgctcattgcatactcttcaatcagccacatagccctcgtagtaacagccattctcatccaaaccccctgaagcttcaccggcgcagtcattctcataatcgcccacggacttacatcctcattactattctgcctagcaaactcaaactacgaacgcactcacagtcgcatcataatcctctctcaaggacttcaaactctactcccactaatagctttttgatgacttctagcaagcctcgctaacctcgccttaccccccactattaacctactgggagaactctctgtgctagtaaccacgttctcctgatcaaatatcactctcctacttacaggactcaacatactagtcacagccctatactccctctacatatttaccacaacacaatggggctcactcacccaccacattaacaacataaaaccctcattcacacgagaaaacaccctcatgttcatacacctatcccccattctcctcctatccctcaaccccgacatcattaccgggttttcctcttgtaaatatagtttaaccaaaacatcagattgtgaatctgacaacagaggcttacgaccccttatttaccgagaaagctcacaagaactgctaactcatgcccccatgtctaacaacatggctttctcaacttttaaaggataacagctatccattggtcttaggccccaaaaattttggtgcaactccaaataaaagtaataaccatgcacactactataaccaccctaaccctgacttccctaattccccccatccttaccaccctcgttaaccctaacaaaaaaaactcatacccccattatgtaaaatccattgtcgcatccacctttattatcagtctcttccccacaacaatattcatgtgcctagaccaagaagttattatctcgaactgacactgagccacaacccaaacaacccagctctccctaagcttcaaactagactacttctccataatattcatccctgtggcattgttcgttacatggtccatcatagaattctcactgtgatatataaactcagacccaaacattaatcagttcttcaaatatctactcatcttcctaattaccatactaatcttagttaccgctaacaacctattccaactgttcatcggctgagagggcgtaggaattatatccttcttgctcatcagttgatgatacgcccgagcagatgccaacacagcagccattcaagcaatcctatacaaccgtatcggcgatatcggtttcatcctcgccttagcatgatttatcctacactccaactcatgagacccacaacaaatagcccttctaaacgctaatccaagcctcaccccactactaggcctcctcctagcagcagcaggcaaatcagcccaattaggtctccacccctgactcccctcagccatagaaggccccaccccagtctcagccctactccactcaagcactatagttgtagcaggaatcttcttactcatccgcttccaccccctagcagaaaatagcccactaatccaaactctaacactatgcttaggcgctatcaccactctgttcgcagcagtctgcgcccttacacaaaatgacatcaaaaaaatcgtagccttctccacttcaagtcaactaggactcataatagttacaatcggcatcaaccaaccacacctagcattcctgcacatctgtacccacgccttcttcaaagccatactatttatgtgctccgggtccatcatccacaaccttaacaatgaacaagatattcgaaaaataggaggactactcaaaaccatacctctcacttcaacctccctcaccattggcagcctagcattagcaggaatacctttcctcacaggtttctactccaaagaccacatcatcgaaaccgcaaacatatcatacacaaacgcctgagccctatctattactctcatcgctacctccctgacaagcgcctatagcactcgaataattcttctcaccctaacaggtcaacctcgcttccccacccttactaacattaacgaaaataaccccaccctactaaaccccattaaacgcctgacagccggaagcctattcgcaggatttctcattactaacaacatttcccccgcatcccccttccaaacaacaatccccctctacctaaaactcacagccctcgctgtcactttcctaggacttctaacagccctagacctcaactacctaaccaacaaacttaaaataaaatccccactatgcacattttatttctccaacatactcggattctaccctagcatcatacaccgcacaatcccctatctaggccttcttacgagccaaaacctgcccctactcctcctagacctaacctgactagaaaagctattacctaaaacaatttcacagcaccaaatctccacctccatcatcacctcaacccaaaaaggcataattaaactttacttcctctctttcttcttcccactcatcctaaccctactcctaatcacataacctattcccccgagcaatctcaattacaatatatacaccaacaaacaatgttcaaccagtaactactactaatcaacgcccataatcatacaaagcccccgcaccaataggatcctcccgaatcaaccctgacccctctccttcataaattattcagcttcctacactattaaagtttaccacaaccaccaccccatcatactctttcacccacagcaccaatcctacctccatcgctaaccccactaaaacactcaccaagacctcaacccctgacccccatgcctcaggatactcctcaatagccatcgctgtagtatatccaaagacaaccatcattccccctaaataaattaaaaaaactattaaacccatataacctcccccaaaattcagaataataacacacccgaccacaccgctaacaatcaatactaaacccccataaataggagaaggcttagaagaaaaccccacaaaccccattactaaacccacactcaacagaaacaaagcatacatcattattctcgcacggactacaaccacgaccaatgatatgaaaaaccatcgttgtatttcaactacaagaacaccaatgaccccaatacgcaaaattaaccccctaataaaattaattaaccactcactcatcgacctccccaccccatccaacatctccgcatgatgaaacttcggctcactccttggcgcctgcctgatcctccaaatcaccacaggactattcctagccatgcactactcaccagacgcctcaaccgccttttcatcaatcgcccacatcactcgagacgtaaattatggctgaatcatccgctaccttcacgccaatggcgcctcaatattctttatctgcctcttcctacacatcgggcgaggcctatattacggatcatttctctactcagaaacctgaaacatcggcattatcctcctgcttgcaactatagcaacagccttcataggctatgtcctcccgtgaggccaaatatcattctgaggggccacagtaattacaaacttactatccgccatcccatacattgggacagacctagttcaatgaatctgaggaggctactcagtagacagtcccaccctcacacgattctttacctttcacttcatcttgcccttcattattgcagccctagcagcactccacctcctattcttgcacgaaacgggatcaaacaaccccctaggaatcacctcccattccgataaaatcaccttccacccttactacacaatcaaagacgccctcggcttacttctcttcattctctccttaatgacattaacactattctcaccagacctcctaggcgacccagacaattataccctagccaaccccttaaacacccctccccacatcaagcccgaatgatatttcctattcgcctacacaattctccgatccgtccctaacaaactaggaggcgtccttgccctattactatccatcctcatcctagcaataatccccatcctccatatatccaaacaacaaagcataatatttcgcccactaagccaatcactttattgactcctagccgcagacctcctcattctaacctgaatcggaggacaaccagtaagctacccttttaccatcattggacaagtagcatccgtactatacttcacaacaatcctaatcctaataccaactatctccctaattgaaaacaaaatactcaaatgggcctgtccttgtagtataaactaatacaccagtcttgtaaaccggagatgaaaacctttttccaaggacaaatcagagaaaaagtctttaactccaccattagcacccaaagctaagattctaatttaaactattctctgttctttcatggggaagcagatttgggtaccacccaagtattgacttacccatcaacaaccgctatgtatttcgtacattactgccagccaccatgaatattgcacggtaccataaatacttgaccacctgtagtacataaaaacccaatccacatcaaaaccccctccccatgcttacaagcaagtacagcaatcaaccctcaactatcacacatcaactgcaactccaaagccacccctcacccactaggataccaacaaacctacccacccttaacagtacatagtacataaagccatttaccgtacatagcacattacagtcaaatcccttctcgtccccatggatgacccccctcagataggggtcccttgaccaccatcctccgtgaaatcaatatcccgcacaagagtgctactctcctcgctccgggcccataacacttgggggtagctaaagtgaactgtatccgacatctggttcctacttcagggtcataaagcctaaatagcccacacgttccccttaaataagacatcacgatg

SEQ ID NO: 47 - DNA, 16570 bp, Homo sapiens mitochondrial
  3108: "n" refers to a nucleotide at position 3107 of the Cambridge Reference Sequence (CRS, Anderson et al. 1981 Nature 290:457-465), later determined to be absent from the human mtDNA sequence according to the revised CRS (rCRS, Andrews et al. 1999 Nature Genetics 23:147); "n" therefore represents a single nucleotide deletion at a position corresponding to nucleotide 3107 of SEQ ID NO:1 as provided herein.
gatcacaggtctatcaccctattaaccactcacgggagctctccatgcatttggtattttcgtctggggggtgtgcacgcgatagcattgcgagacgctggagccggagcaccctatgtcgcagtatctgtctttgattcctgcctcatcccattatttatcgcacctacgttcaatattacaggcgaacatacttactaaagtgtgttaattaattaatgcttgtaggacataataataacaattgatgtctgcacagccgctttccacacagacatcataacaaaaaatttccaccaaaccccccctcccccgccttctggccacagcacttaaacacatctctgccaaaccccaaaaacaaagaaccctaacaccagcctaaccagatttcaaattttatcttttggcggtatgcacttttaacagtcaccccccaactaacacattattttcccctcccactcccatactactaatctcatcaacacaacccccgcccatcctacccagcacacacacaccgctgctaaccccataccccgaaccaaccaaaccccaaagacaccccccacagtttatgtagcttacctccctcaaagcaatacactgaaaatgtttagacgggctcacatcaccccataaacaaataggtttggtcctagcctttctattagctcttagtaagattacacatgcaagcatccccgttccagtgagttcaccctctaaatcaccacgatcaaaagggacaagcatcaagcacgcagcaatgcagctcaaaacgcttagcctagccacacccccacgggaaacagcagtgattaacctttagcaataaacgaaagtttaactaagctatactaaccccagggttggtcaatttcgtgccagccaccgcggtcacacgattaacccaagtcaatagaagccggcgtaaagagtgttttagatcaccccctccccaataaagctaaaactcacctgagttgtaaaaaactccagttgacacaaaatagactacgaaagtggctttaacatatctgaacacacaatagctaagacccaaactgggattagataccccactatgcttagccctaaacctcaacagttaaatcaacaaaactgctcgccagaacactacgagccacagcttaaaactcaaaggacctggcggtgcttcatatccctctagaggagcctgttctgtaatcgataaaccccgatcaacctcaccacctcttgctcagcctatataccgccatcttcagcaaaccctgatgaaggctacaaagtaagcgcaagtacccacgtaaagacgttaggtcaaggtgtagcccatgaggtggcaagaaatgggctacattttctaccccagaaaactacgatagcccttatgaaacttaagggtcgaaggtggatttagcagtaaactgagagtagagtgcttagttgaacagggccctgaagcgcgtacacaccgcccgtcaccctcctcaagtatacttcaaaggacatttaactaaaacccctacgcatttatatagaggagacaagtcgtaacatggtaagtgtactggaaagtgcacttggacgaaccagagtgtagcttaacacaaagcacccaacttacacttaggagatttcaacttaacttgaccgctctgagctaaacctagccccaaacccactccaccttactaccagacaaccttagccaaaccatttacccaaataaagtataggcgatagaaattgaaacctggcgcaatagatatagtaccgcaagggaaagatgaaaaattataaccaagcataatatagcaaggactaacccctataccttctgcataatgaattaactagaaataactttgcaaggagagccaaagctaagacccccgaaaccagacgagctacctaagaacagctaaaagagcacacccgtctatgtagcaaaatagtgggaagatttataggtagaggcgacaaacctaccgagcctggtgatagctggttgtccaagatagaatcttagttcaactttaaatttgcccacagaaccctctaaatccccttgtaaatttaactgttagtccaaagaggaacagctctttggacactaggaaaaaaccttgtagagagagtaaaaaatttaacacccatagtaggcctaaaagcagccaccaattaagaaagcgttcaagctcaacacccactacctaaaaaatcccaaacatataactgaactcctcacacccaattggaccaatctatcaccctatagaagaactaatgttagtataagtaacatgaaaacattctcctccgcataagcctgcgtcagattaaaacactgaactgacaattaacagcccaatatctacaatcaaccaacaagtcattattaccctcactgtcaacccaacacaggcatgctcataaggaaaggttaaaaaaagtaaaaggaactcggcaaatcttaccccgcctgtttaccaaaaacatcacctctagcatcaccagtattagaggcaccgcctgcccagtgacacatgtttaacggccgcggtaccctaaccgtgcaaaggtagcataatcacttgttccttaaatagggacctgtatgaatggctccacgagggttcagctgtctcttacttttaaccagtgaaattgacctgcccgtgaagaggcgggcatgacacagcaagacgagaagaccctatggagctttaatttattaatgcaaacagtacctaacaaacccacaggtcctaaactaccaaacctgcattaaaaatttcggttggggcgacctcggagcagaacccaacctccgagcagtacatgctaagacttcaccagtcaaagcgaactactatactcaattgatccaataacttgaccaacggaacaagttaccctagggataacagcgcaatcctattctagagtccatatcaacaatagggtttacgacctcgatgttggatcaggacatcccgatggtgcagccgctattaaaggttcgtttgttcaacgattaaagtcctacgtgatctgagttcagaccggagtaatccaggtcggtttctatctacnttcaaattcctccctgtacgaaaggacaagagaaataaggcctacttcacaaagcgccttcccccgtaaatgatatcatctcaacttagtattatacccacacccacccaagaacagggtttgttaagatggcagagcccggtaatcgcataaaacttaaaactttacagtcagaggttcaattcctcttcttaacaacatacccatggccaacctcctactcctcattgtacccattctaatcgcaatggcattcctaatgcttaccgaacgaaaaattctaggctatatacaactacgcaaaggccccaacgttgtaggcccctacgggctactacaacccttcgctgacgccataaaactcttcaccaaagagcccctaaaacccgccacatctaccatcaccctctacatcaccgccccgaccttagctctcaccatcgcacttctactatgaacccccctccccatacccaaccccctggtcaacctcaacctaggcctcctatttattctagccacctctagcctagccgtttactcaatcctctgatcagggtgagcatcaaactcaaactacgccctgatcggcgcactgcgagcagtagcccaaacaatctcatatgaagtcaccctagccatcattctactatcaacattactaataagtggctcctttaacctctccacccttatcacaacacaagaacacctctgattactcctgccatcatgacccttggccataatatgatttatctccacactagcagagaccaaccgaacccccttcgaccttgccgaaggggagtccgaactagtctcaggcttcaacatcgaatacgccgcaggccccttcgccctattcttcatagccgaatacacaaacattattataataaacaccctcaccactacaatcttcctaggaacaacatatgacgcactctcccctgaactctacacaacatattttgtcaccaagaccctacttctaacctccctgttcttatgaattcgaacagcatacccccgattccgctacgaccaactcatacacctcctatgaaaaaacttcctaccactcaccctagcattacttatatgatatgtctccatacccattacaatctccagcattccccctcaaacctaagaaatatgtctgataaaagagttactttgatagagtaaataataggagcttaaacccccttatttctaggactatgagaatcgaacccatccctgagaatccaaaattctccgtgccacctatcacaccccatcctaaagtaaggtcagctaaataagctatcgggcccataccccgaaaatgttggttatacccttcccgtactaattaatcccctggcccaacccgtcatctactctaccatctttgcaggcacactcatcacagcgctaagctcgcactgattttttacctgagtaggcctagaaataaacatgctagcttttattccagttctaaccaaaaaaataaaccctcgttccacagaagctgccatcaagtatttcctcacgcaagcaaccgcatccataatccttctaatagctatcctcttcaacaatatactctccgggcaatgaaccataaccaatactaccaatcaatactcatcattaataatcataatggctatagcaataaaactaggaatagccccctttcacttctgagtcccagaggttacccaaggcacccctctgacatccggcctgcttcttctcacatgacaaaaactagcccccatctcaatcatataccaaatctctccctcactaaacgtaagccttctcctcactctctcaatcttatccatcatagcaggcagttgaggtggattaaaccaaacccagctacgcaaaatcttagcatactcctcaattacccacataggatgaataatagcagttctaccgtacaaccctaacataaccattcttaatttaactatttatattatcctaactactaccgcattcctactactcaacttaaactccagcaccacgaccctactactatctcgcacctgaaacaagctaacatgactaacacccttaattccatccaccctcctctccctaggaggcctgcccccgctaaccggctttttgcccaaatgggccattatcgaagaattcacaaaaaacaatagcctcatcatccccaccatcatagccaccatcaccctccttaacctctacttctacctacgcctaatctactccacctcaatcacactactccccatatctaacaacgtaaaaataaaatgacagtttgaacatacaaaacccaccccattcctccccacactcatcgcccttaccacgctactcctacctatctccccttttatactaataatcttatagaaatttaggttaaatacagaccaagagccttcaaagccctcagtaagttgcaatacttaatttctgtaacagctaaggactgcaaaaccccactctgcatcaactgaacgcaaatcagccactttaattaagctaagcccttactagaccaatgggacttaaacccacaaacacttagttaacagctaagcaccctaatcaactggcttcaatctacttctcccgccgccgggaaaaaaggcgggagaagccccggcaggtttgaagctgcttcttcgaatttgcaattcaatatgaaaatcacctcggagctggtaaaaagaggcctaacccctgtctttagatttacagtccaatgcttcactcagccattttacctcacccccactgatgttcgccgaccgttgactattctctacaaaccacaaagacattggaacactatacctattattcggcgcatgagctggagtcctaggcacagctctaagcctccttattcgagccgagctgggccagccaggcaaccttctaggtaacgaccacatctacaacgttatcgtcacagcccatgcatttgtaataatcttcttcatagtaatacccatcataatcggaggctttggcaactgactagttcccctaataatcggtgcccccgatatggcgtttccccgcataaacaacataagcttctgactcttacctccctctctcctactcctgctcgcatctgctatagtggaggccggagcaggaacaggttgaacagtctaccctcccttagcagggaactactcccaccctggagcctccgtagacctaaccatcttctccttacacctagcaggtgtctcctctatcttaggggccatcaatttcatcacaacaattatcaatataaaaccccctgccataacccaataccaaacgcccctcttcgtctgatccgtcctaatcacagcagtcctacttctcctatctctcccagtcctagctgctggcatcactatactactaacagaccgcaacctcaacaccaccttcttcgaccccgccggaggaggagaccccattctataccaacacctattctgatttttcggtcaccctgaagtttatattcttatcctaccaggcttcggaataatctcccatattgtaacttactactccggaaaaaaagaaccatttggatacataggtatggtctgagctatgatatcaattggcttcctagggtttatcgtgtgagcacaccatatatttacagtaggaatagacgtagacacacgagcatatttcacctccgctaccataatcatcgctatccccaccggcgtcaaagtatttagctgactcgccacactccacggaagcaatatgaaatgatctgctgcagtgctctgagccctaggattcatctttcttttcaccgtaggtggcctgactggcattgtattagcaaactcatcactagacatcgtactacacgacacgtactacgttgtagctcacttccactatgtcctatcaataggagctgtatttgccatcataggaggcttcattcactgatttcccctattctcaggctacaccctagaccaaacctacgccaaaatccatttcactatcatattcatcggcgtaaatctaactttcttcccacaacactttctaggcctatccggaatgccccgacgttactcggactaccccgatgcatacaccacatgaaacatcctatcatctgtaggctcattcatttctctaacagcagtaatattaataattttcatgatttgagaagccttcgcttcgaagcgaaaagtcctaatagtagaagaaccctccataaacctggagtgactatatggatgccccccaccctaccacacattcgaagaacccgtatacataaaatctagacaaaaaaggaaggaatcgaaccccccaaagctggtttcaagccaaccccatggcctccatgactttttcaaaaaggtattagaaaaaccatttcataactttgtcaaagttaaattataggctaaatcctatatatcttaatggcacatgcagcgcaagtaggtctacaagacgctacttcccctatcatagaagagcttatcacctttcatgatcacgccctcataatcattttccttatctgcttcttagtcctgtatgcccttttcctaacactcacaacaaaactaactaatactaacatctcagacgctcaggaaatagaaaccgtctgaactatcctgcccgccatcatcctagtcctcatcgccctcccatccctacgcatcctttacataacagacgaggtcaacgatccctcccttaccatcaaatcaattggccaccaatggtactgaacctacgagtacaccgactacggcggactaatcttcaactcctacatacttcccccattattcctagaaccaggcgacctgcgactccttgacgttgacaatcgagtagtactcccgattgaagcccccattcgtataataattacatcacaagacgtcttgcactcatgagctgtccccacattaggcttaaaaacagatgcaattcccggacgtctaaaccaaaccactttcaccgctacacgaccgggggtatactacggtcaatgctctgaaatctgtggagcaaaccacagtttcatgcccatcgtcctagaattaattcccctaaaaatctttgaaatagggcccgtatttaccctatagcaccccctctaccccctctagagcccactgtaaagctaacttagcattaaccttttaagttaaagattaagagaaccaacacctctttacagtgaaatgccccaactaaatactaccgtatggcccaccataattacccccatactccttacactattcctcatcacccaactaaaaatattaaacacaaactaccacctacctccctcaccaaagcccataaaaataaaaaattataacaaaccctgagaaccaaaatgaacgaaaatctgttcgcttcattcattgcccccacaatcctaggcctacccgccacagtactgatcattctatttccccctctattgatccccacctccaaatatctcatcaacaaccgactaatcaccacccaacaatgactaatcaaactaacctcaaaacaaatgatagccatacacaacactaaaggacgaacctgatctcttatactagtatccttaatcatttttattgccacaactaacctcctcggactcctgcctcactcatttacaccaaccacccaactatctataaacctagccatggccatccccttatgagcgggcgcagtgattataggctttcgctctaagattaaaaatgccctagcccacttcttaccacaaggcacacctacaccccttatccccatactagttattatcgaaaccatcagcctactcattcaaccaatagccctggccgtacgcctaaccgctaacattactgcaggccacctactcatgcacctaattggaagcgccaccctagcaatatcaaccattaaccttccctctacacttatcatcttcacaattctaattctactgactatcctagaaatcgctgtcgccttaatccaagcctacgttttcacacttctagtaagcctctacctgcacgacaacacataatgacccaccaatcacatgcctatcatatagtaaaacccagcccatgacccctaacaggggccctctcagccctcctaatgacctccggcctagccatgtgatttcacttccactccataacgctcctcatactaggcctactaaccaacacactaaccatataccaatgatggcgcgatgtaacacgagaaagcacataccaaggccaccacacaccacctgtccaaaaaggccttcgatacgggataatcctatttattacctcagaagtttttttcttcgcaggatttttctgagccttttaccactccagcctagcccctaccccccaactaggggggcactggcccccaacaggcatcaccccgctaaatcccctagaagtcccactcctaaacacatccgtattactcgcatcaggagtatcaatcacctgagctcaccatagtctaatagaaaacaaccgaaaccaaataattcaagcactgcttattacaattttactgggtctctattttaccctcctacaagcctcagagtacttcgagtctcccttcaccatttccgacggcatctacggctcaacattttttgtagccacaggcttccacggacttcacgtcattattggctcaactttcctcactatctgcttcatccgccaactaatatttcactttacatccaaacatcactttggcttcgaagccgccgcctgatactggcattttgtagatgtggtttgactatttctgtatgtctccatctattgatgagggtcttactcttttagtataaatagtaccgttaacttccaattaactagttttgacaacattcaaaaaagagtaataaacttcgccttaattttaataatcaacaccctcctagccttactactaataattattacattttgactaccacaactcaacggctacatagaaaaatccaccccttacgagtgcggcttcgaccctatatcccccgcccgcgtccctttctccataaaattcttcttagtagctattaccttcttattatttgatctagaaattgccctccttttacccctaccatgagccctacaaacaactaacctgccactaatagttatgtcatccctcttattaatcatcatcctagccctaagtctggcctatgagtgactacaaaaaggattagactgagctgaattggtatatagtttaaacaaaacgaatgatttcgactcattaaattatgacaatcatatttaccaaatgcccctcatttacataaatattatactagcatttaccatctcacttctaggaatactagtatatcgctcacacctcatatcctccctactatgcctagaaggaataatactatcgctgttcattatagctactctcataaccctcaacacccactccctcttagccaatattgtgcctattgccatactagtctttgccgcctgcgaagcagcggtgggcctagccctactagtctcaatctccaacacatatggcctagactacgtacataacctaaacctactccaatgctaaaactaatcgtcccaacaattatattactaccactgacatgactttccaaaaaacacataatttgaatcaacacaaccacccacagcctaattattagcatcatccccctactattttttaaccaaatcaacaacaacctatttagctgttccccaaccttttcctccgaccccctaacaacccccctcctaatactaactacctgactcctacccctcacaatcatggcaagccaacgccacttatccagtgaaccactatcacgaaaaaaactctacctctctatactaatctccctacaaatctccttaattataacattcacagccacagaactaatcatattttatatcttcttcgaaaccacacttatccccaccttggctatcatcacccgatgaggcaaccagccagaacgcctgaacgcaggcacatacttcctattctacaccctagtaggctcccttcccctactcatcgcactaatttacactcacaacaccctaggctcactaaacattctactactcactctcactgcccaagaactatcaaactcctgagccaacaacttaatatgactagcttacacaatagcttttatagtaaagatacctctttacggactccacttatgactccctaaagcccatgtcgaagcccccatcgctgggtcaatagtacttgccgcagtactcttaaaactaggcggctatggtataatacgcctcacactcattctcaaccccctgacaaaacacatagcctaccccttccttgtactatccctatgaggcataattataacaagctccatctgcctacgacaaacagacctaaaatcgctcattgcatactcttcaatcagccacatagccctcgtagtaacagccattctcatccaaaccccctgaagcttcaccggcgcagtcattctcataatcgcccacggacttacatcctcattactattctgcctagcaaactcaaactacgaacgcactcacagtcgcatcataatcctctctcaaggacttcaaactctactcccactaatagctttttgatgacttctagcaagcctcgctaacctcgccttaccccccactattaacctactgggagaactctctgtgctagtaaccacattctcctgatcaaatatcactctcctacttacaggactcaacatactagtcacagccctatactccctctacatatttaccacaacacaatggggctcactcacccaccacattaacaacataaaaccctcattcacacgagaaaacaccctcatgttcatacacctatcccccattctcctcctatccctcaaccccgacatcattaccgggttttcctcttgtaaatatagtttaaccaaaacatcagattgtgaatctgacaacagaggcttacgaccccttatttaccgagaaagctcacaagaactgctaactcatgcccccatgtctaacaacatggctttctcaacttttaaaggataacagctatccattggtcttaggccccaaaaattttggtgcaactccaaataaaagtaataaccatgcacactactataaccaccctaaccctgacttccctaattccccccatccttaccaccctcgttaaccctaacaaaaaaaactcatacccccattatgtaaaatccattgtcgcatccacctttattatcagtctcttccccacaacaatattcatgtgcctagaccaagaagttattatctcgaactgacactgagccacaacccaaacaacccagctctccctaagcttcaaactagactacttctccataatattcatccctgtagcattgttcgttacatggtccatcatagaattctcactgtgatatataaactcagacccaaacattaatcagttcttcaaatatctactcattttcctaattaccatactaatcttagttaccgctaacaacctattccaactgttcatcggctgagagggcgtaggaattatatccttcttgctcatcagttgatgatacgcccgagcagatgccaacacagcagccattcaagcaatcctatacaaccgtatcggcgatatcggtttcatcctcgccttagcatgatttatcctacactccaactcatgagacccacaacaaatagcccttctaaacgctaatccaagcctcaccccactactaggcctcctcctagcagcagcaggcaaatcagcccaattaggtctccacccctgactcccctcagccatagaaggccccaccccagtctcagccctactccactcaagcactatagttgtagcaggaatcttcttactcatccgcttccaccccctagcagaaaatagcccactaatccaaactctaacactatgcttaggcgctatcaccactctgttcgcagcagtctgcgcccttacacaaaatgacatcaaaaaaatcgtagccttctccacttcaagtcagctaggactcataatagttacaatcggcatcaaccaaccacacctagcattcctgcacatctgtacccacgccttcttcaaagccatactatttatgtgctccgggtccatcatccacaaccttaacaatgaacaagatattcgaaaaataggaggactactcaaaaccatacctctcacttcaacctccctcaccattggcagcctagcattagcaggaatacctttcctcacaggtttctactccaaagaccacatcatcgaaaccgcaaacatatcatacacaaacgcctgagccctatctattactctcatcgctacctccctgacaagcgcctatagcactcgaataattcttctcaccctaacaggtcaacctcgcttccccacccttactaacattaacgaaaataaccccaccctactaaaccccattaaacgcctggcagccggaagcctattcgcaggatttctcattactaacaacatttcccccgcatcccccttccaaacaacaatccccctctacctaaaactcacagccctcgctgtcactttcctaggacttctaacagccctagacctcaactacctaaccaacaaacttaaaataaaatccccactatgcacattttatttctccaacatactcggattctaccctagcatcacacaccgcacaatcccctatctaggccttcttacgagccaaaacctgcccctactcctcctagacctaacctgactagaaaagctattacctaaaacaatttcacagcaccaaatctccacctccatcatcacctcaacccaaaaaggcataattaaactttacttcctctctttcttcttcccactcatcctaaccctactcctaatcacataacctattcccccgagcaatctcaattacaatatatacaccaacaaacaatgttcaaccagtaactactactaatcaacgcccataatcatacaaagcccccgcaccaataggatcctcccgaatcaaccctgacccctctccttcataaattattcagcttcctacactactaaagtttaccacaaccaccaccccatcatactctttcacccacagcaccaatcctacctccatcgctaaccccactaaaacactcaccaagacctcaacccctgacccccatgcctcaggatactcctcaatagccatcgctgtagtatatccaaagacaaccatcattccccctaaataaattaaaaaaactattaaacccatataacctcccccaaaattcagaataataacacacccgaccacaccgctaacaatcaatactaaacccccataaataggagaaggcttagaagaaaaccccacaaaccccattactaaacccacactcaacagaaacaaagcatacatcattattctcgcacggactacaaccacgaccaatgatatgaaaaaccatcgttgtatttcaactacaagaacaccaatgaccccaatacgcaaaattaaccccctaataaaactaattaaccactcattcatcgacctccccaccccatccaacatctccgcatgatgaaacttcggctcactccttggcgcctgcctgatcctccaaatcaccacaggactattcctagccatgcactactcaccagacgcctcaaccgccttttcatcaatcgcccacatcactcgagacgtaaattatggctgaatcatccgctaccttcacgccaatggcgcctcaatattctttatctgcctcttcctacacatcggacgaggcctatattacggatcatttctctactcagaaacctgaaacatcggcattatcctcctgcttgcaactatagcaacagccttcataggctatgtcctcccgtgaggccaaatatcattctgaggggccacagtaattacaaacttactatccgccatcccatacattgggacagacctagttcaatgaatctgaggaggctactcagtagacagtcccaccctcacacgattctttacctttcacttcatcttacccttcattattgcagccctagcagcactccacctcctattcttgcacgaaacgggatcaaacaaccccctaggaatcacctcccattccgataaaatcaccttccacccttactacacaatcaaagacgccctcggcttacttctcttccttctctccttaatgacattaacactattctcacctgacctcctaggcgacccagacaattataccctagccaaccccttaaacacccctccccacatcaagcccgaatgatatttcctattcgcctacacaattctccgatccgtccctaacaaactaggaggcgtccttgccctattactatccatcctcatcctagcaataatccccatcctccatatatccaaacaacaaagcataatatttcgcccactaagccaatcactttattgactcctagccgcagacctcctcattctaacctgaatcggaggacaaccagtaagctacccttttaccatcattggacaagtagcatccgtactatacttcacaacaatcctaatcctaataccaactatctccctaattgaaaacaaaatactcaaatgggcctgtccttgtagtataaactaatacaccagtcttgtaaaccggagatgaaaacctttttccaaggacaaatcagagaaaaagtctttaactccaccattagcacccaaagctaagattctaatttaaactattctctgttctttcatggggaagcagatttgggtaccacccaagtattgactcacccatcaacaaccgctatgtatttcgtacattactgccagccaccatgaatattgtacggtaccataaatacttgaccacctgtagtacataaaaacccaatccacatcaaaaccccctccccatgcttacaagcaagtacagcaatcaaccttcaactatcatacatcaactgcaactccaaagccacccctcacccactaggataccaacaaacccacccaccctcaacagtacatagtacataaagccatttatcgtacatagcacattacagtcaaatcccttctcgtccccatggatgacccccctcagataggggtcccttgaccaccatcctccgtgaaatcaatatcccgcacaagagtgctactctcctcgctccgggcccataacacttgggggtagctaaagtgaactgtatccgacatctggttcctacttcaggtccataaagtctaaatagcccacacgttccccttaaataagacatcacgatg

SEQ ID NO: 48 - DNA, 16570 bp, Homo sapiens mitochondrial
  3108: "n" refers to a nucleotide at position 3107 of the Cambridge Reference Sequence (CRS, Anderson et al. 1981 Nature 290:457-465), later determined to be absent from the human mtDNA sequence according to the revised CRS (rCRS, Andrews et al. 1999 Nature Genetics 23:147); "n" therefore represents a single nucleotide deletion at a position corresponding to nucleotide 3107 of SEQ ID NO:1 as provided herein.
gatcacaggtctatcaccctattaaccactcacgggagctctccatgcatttggtattttcgtctggggggtatgcacgcgatagcattgcgagacgctggagccggagcaccctatgtcgcagtatctgtctttgattcctgcctcatcctattatttatcgcacctacgttcaatattacaggcgaacatacttactaaagtgtgttaattaattaatgcttgtaggacataataataacaattgaatgtctgcacagccgctttccacacagacatcataacaaaaaatttccaccaaaccccccctcccccgccttctggccacagcacttaaacacatctctgccaaaccccaaaaacaaagaaccctaacaccagcctaaccagatttcaaattttatcttttggcggtatgcacttttaacagtcaccccccaactaacacattattttcccctcccactcccatactaccaatctcatcaatacaacccccgcccatcctacccagcacacacacaccgctgctaaccccataccccgaaccaaccaaaccccaaagacaccccccacagtttatgtagcttacctcctcaaagcaatacactgaaaatgtttagacgggctcacatcaccccataaacaaataggtttggtcctagcctttctattagctcttagtaagattacacatgcaagcatccccgttccagtgagttcaccctctaaatcaccacgatcaaaagggacaagcatcaagcacgcagcaatgcagctcaaaacgcttagcctagccacacccccacgggaaacagcagtgattaacctttagcaataaacgaaagtttaactaagctatactaaccccagggttggtcaatttcgtgccagccaccgcggtcacacgattaacccaagtcaatagaagccggcgtaaagagtgttttagatcaccccctccccaataaagctaaaactcacctgagttgtaaaaaactccagttgacacaaaatagactacgaaagtggctttaacatatctgaacacacaatagctaagacccaaactgggattagataccccactatgcttagccctaaacctcaacagttaaatcaacaaaactgctcgccagaacactacgagccacagcttaaaactcaaaggacctggcggtgcttcatatccctctagaggagcctgttctgtaatcgataaaccccgatcaacctcaccacctcttgctcagcctatataccgccatcttcagcaaaccctgatgaaggctacaaagtaagcgcaagtacccacgtaaagacgttaggtcaaggtgtagcccatgaggtggcaagaaatgggctacattttctaccccagaaaactacgatagcccttatgaaacttaagggtcgaaggtggatttagcagtaaactgagagtagagtgcttagttgaacagggccctgaagcgcgtacacaccgcccgtcaccctcctcaagtatacttcaaaggacatttaactaaaacccctacgcatttatatagaggagacaagtcgtaacatggtaagtgtactggaaagtgcacttggacgaaccagagtgtagcttaacacaaagcacccaacttacacttaggagatttcaacttaacttgaccgctctgagctaaacctagccccaaacccactccaccttactaccagacaaccttagccaaaccatttacccaaataaagtataggcgatagaaattgaaacctggcgcaatagatatagtaccgcaagggaaagatgaaaaattataaccaagcataatatagcaaggactaacccctataccttctgcataatgaattaactagaaataactttgcaaggagagccaaagctaagacccccgaaaccagacgagctacctaagaacagctaaaagagcacacccgtctatgtagcaaaatagtgggaagatttataggtagaggcgacaaacctaccgagcctggtgatagctggttgtccaagatagaatcttagttcaactttaaatttgcccacagaaccctctaaatccccttgtaaatttaactgttagtccaaagaggaacagctctttggacactaggaaaaaaccttgtagagagagtaaaaaatttaacacccatagtaggcctaaaagcagccaccaattaagaaagcgttcaagctcaacacccactacctaaaaaatcccaaacatataactgaactcctcacacccaattggaccaatctatcaccctatagaagaactaatgttagtataagtaacatgaaaacattctcctccgcataagcctgcgtcagattaaaacactgaactgacaattaacagcccaatatctacaatcaaccaacaagtcattattaccctcactgtcaacccaacacaggcatgctcataaggaaaggttaaaaaaagtaaaaggaactcggcaaatcttaccccgcctgtttaccaaaaacatcacctctagcatcaccagtattagaggcaccgcctgcccagtgacacatgtttaacggccgcggtaccctaaccgtgcaaaggtagcataatcacttgttccttaaatagggacctgtatgaatggctccacgagggttcagctgtctcttacttttaaccagtgaaattgacctgcccgtgaagaggcgggcataacacagcaagacgagaagaccctatggagctttaatttattaatgcaaacagtacctaacaaacccacaggtcctaaactaccaaacctgcattaaaaatttcggttggggcgacctcggagcagaacccaacctccgagcagtacatgctaagacttcaccagtcaaagcgaactactatactcaattgatccaataacttgaccaacggaacaagttaccctagggataacagcgcaatcctattctagagtccatatcaacaatagggtttacgacctcgatgttggatcaggacatcccaatggtgcagccgctattaaaggttcgtttgttcaacgattaaagtcctacgtgatctgagttcagaccggagtaatccaggtcggtttctatctacnttcaaattcctccctgtacgaaaggacaagagaaataaggcctacttcacaaagcgccttcccccgtaaatgatatcatctcaacttagtattatacccacacccacccaagaacagggtttgttaagatggcagagcccggtaatcgcataaaacttaaaactttacagtcagaggttcaattcctcttcttaacaacatacccatggccaacctcctactcctcattgtacccattctaatcgcaatggcattcctaatgcttaccgaacgaaaaattctaggctatatacaactacgcaaaggccccaacgttgtaggcccctacgggctactacaacccttcgctgacgccataaaactcttcaccaaagagcccctaaaacccgccacatctaccatcaccctctacatcaccgccccgaccttagctctcaccatcgctcttctactatgaacccccctccccatacccaaccccctggtcaacctcaacctaggcctcctatttattctagccacctctagcctagccgtttactcaatcctctgatcagggtgagcatcaaactcaaactacgccctgatcggcgcactgcgagcagtagcccaaacaatctcatatgaagtcaccctagccatcattctactatcaacattactaataagtggctcctttaacctctccacccttatcacaacacaagaacacctctgattactcctgccatcatgacccttggccataatatgatttatctccacactagcagagaccaaccgaacccccttcgaccttgccgaaggggagtccgaactagtctcaggcttcaacatcgaatacgccgcaggccccttcgccctattcttcatagccgaatacacaaacattattataataaacaccctcaccactacaatcttcctaggaacaacatatgacgcactctcccctgaactctacacaacatattttgtcaccaagaccctacttctaacctccctgttcttatgaattcgaacagcatacccccgattccgctacgaccaactcatacacctcctatgaaaaaacttcctaccactcaccctagcattacttatatgatatgtctccatacccattacaatctccagcattccccctcaaacctaagaaatatgtctgataaaagagttactttgatagagtaaataataggagcttaaacccccttatttctaggactatgagaatcgaacccatccctgagaatccaaaattctccgtgccacctatcacaccccatcctaaagtaaggtcagctaaataagctatcgggcccataccccgaaaatgttggttatacccttcccgtactaattaatcccctggcccaacccgtcatctactctaccatctttgcaggcacactcatcacagcgctaagctcgcactgattttttacctgagtaggcctagaaataaacatgctagcttttattccagttctaaccaaaaaaataaaccctcgttccacagaagctgccatcaagtatttcctcacgcaagcaaccgcatccataatccttctaatagctatcctcttcaacaatatactctccggacaatgaaccataaccaatactaccaatcaatactcatcattaataatcataatggctatagcaataaaactaggaatagccccctttcacttctgagtcccagaggttacccaaggcacccctctgacatccggcctgcttcttctcacatgacaaaaactagcccccatctcaatcatataccaaatctctccctcactaaacgtaagccttctcctcactctctcaatcttatccatcatagcaggcagttgaggtggattaaaccaaacccagctacgcaaaatcttagcatactcctcaattacccacataggatgaataatagcagttctaccgtacaaccctaacataaccattcttaatttaactatttatattatcctaactactaccgcattcctactactcaacttaaactccagcaccacgaccctactactatctcgcacctgaaacaagctaacatgactaacacccttaattccatccaccctcctctccctaggaggcctgcccccgctaaccggctttttgcccaaatgggccattatcgaagaattcacaaaaaacaatagcctcatcatccccaccatcatagccaccatcaccctccttaacctctacttctacctacgcctaatctactccacctcaatcacactactccccatatctaacaacgtaaaaataaaatgacagtttgaacatacaaaacccaccccattcctccccacactcatcgcccttaccacgctactcctacctatctccccttttatactaataatcttatagaaatttaggttaaatacagaccaagagccttcaaagccctcagtaagttgcaatacttaatttctgtaacagctaaggactgcaaaaccccactctgcatcaactgaacgcaaatcagccactttaattaagctaagcccttactagaccaatgggacttaaacccacaaacacttagttaacagctaagcaccctaatcaactggcttcaatctacttctcccgccgccgggaaaaaaggcgggagaagccccggcaggtttgaagctgcttcttcgaatttgcaattcaatatgaaaatcacctcggagctggtaaaaagaggcctaacccctgtctttagatttacagtccaatgcttcactcagccattttacctcacccccactgatgttcgccgaccgttgactattctctacaaaccacaaagacattggaacactatacctattattcggcgcatgagctggagtcctaggcacagctctaagcctccttattcgagccgagctgggccagccaggcaaccttctaggtaacgaccacatctacaacgttatcgtcacagcccatgcatttgtaataatcttcttcatagtaatacccatcataatcggaggctttggcaactgactagttcccctaataatcggtgcccccgatatggcgtttccccgcataaacaacataagcttctgactcttacctccctctctcctactcctgctcgcatctgctatagtggaggccggagcaggaacaggttgaacagtctaccctcccttagcagggaactactcccaccctggagcctccgtagacctaaccatcttctccttacacctagcaggtgtctcctctatcttaggggccatcaatttcatcacaacaattatcaatataaaaccccctgccataacccaataccaaacgcccctcttcgtctgatccgtcctaatcacagcagtcctacttctcctatctctcccagtcctagctgctggcatcactatactactaacagaccgcaacctcaacaccaccttcttcgaccccgccggaggaggagaccccattctataccaacacctattctgatttttcggtcaccctgaagtttatattcttatcctaccaggcttcggaataatctcccatattgtaacttactactccggaaaaaaagaaccatttggatacataggtatggtctgagctatgatatcaattggcttcctagggtttatcgtgtgagcacaccatatatttacagtaggaatagacgtagacacacgagcatatttcacctccgctaccataatcatcgctatccccaccggcgtcaaagtatttagctgactcgccacactccacggaagcaatatgaaatgatctgctgcagtgctctgagccctaggattcatctttcttttcaccgtaggtggcctgactggcattgtattagcaaactcatcactagacatcgtactacacgacacgtactacgttgtagcccacttccactatgtcctatcaataggagctgtatttgccatcataggaggcttcattcactgatttcccctattctcaggctacaccctagaccaaacctacgccaaaatccatttcactatcatattcatcggcgtaaatctaactttcttcccacaacactttctcggcctatccggaatgccccgacgttactcggactaccccgatgcatacaccacatgaaacatcctatcatctgtaggctcattcatttctctaacagcagtaatattaataattttcatgatttgagaagccttcgcttcgaagcgaaaagtcctaatagtagaagaaccctccataaacctggagtgactatatggatgccccccaccctaccacacattcgaagaacccgtatacataaaatctagacaaaaaaggaaggaatcgaaccccccaaagctggtttcaagccaaccccatggcctccatgactttttcaaaaaggtattagaaaaaccatttcataactttgtcaaagttaaattataggctaaatcctatatatcttaatggcacatgcagcgcaagtaggtctacaagacgctacttcccctatcatagaagagcttatcacctttcatgatcacgccctcataatcattttccttatctgcttcctagtcctgtatgcccttttcctaacactcacaacaaaactaactaatactaacatctcagacgctcaggaaatagaaaccgtctgaactatcctgcccgccatcatcctagtcctcatcgccctcccatccctacgcatcctttacataacagacgaggtcaacgatccctcccttaccatcaaatcaattggccaccaatggtactgaacctacgagtacaccgactacggcggactaatcttcaactcctacatacttcccccattattcctagaaccaggcgacctgcgactccttgacgttgacaatcgagtagtactcccgattgaagcccccattcgtataataattacatcacaagacgtcttgcactcatgagctgtccccacattaggcttaaaaacagatgcaattcccggacgtctaaaccaaaccactttcaccgctacacgaccgggggtatactacggtcaatgctctgaaatctgtggagcaaaccacagtttcatgcccatcgtcctagaattaattcccctaaaaatctttgaaatagggcccgtatttaccctatagcaccccctctaccccctctagagcccactgtaaagctaacttagcattaaccttttaagttaaagattaagagaaccaacacctctttacagtgaaatgccccaactaaatactaccgtatggcccaccataattacccccatactccttacactattcctcatcacccaactaaaaatattaaacacaaactaccacctacctccctcaccaaagcccataaaaataaaaaattataacaaaccctgagaaccaaaatgaacgaaaatctgttcgcttcattcattgcccccacaatcctaggcctacccgccgcagtactgatcattctatttccccctctattgatccccacctccaaatatctcatcaacaaccgactaatcaccacccaacaatgactaatcaaactaacctcaaaacaaatgataaccatacacaacactaaaggacgaacctgatctcttatactagtatccttaatcatttttattgccacaactaacctcctcggactcctgcctcactcatttacaccaaccacccaactatctataaacctagccatggccatccccttatgagcgggcgcagtgattataggctttcgctctaagattaaaaatgccctagcccacttcttaccacaaggcacacctacaccccttatccccatactagttattatcgaaaccatcagcctactcattcaaccaatagccctggccgtacgcctaaccgctaacattactgcaggccacctactcatgcacctaattggaagcgccaccctagcaatatcaaccattaaccttccctctacacttatcatcttcacaattctaattctactgactatcctagaaatcgctgtcgccttgatccaagcctacgttttcacacttctagtaagcctctacctgcacgacaacacataatgacccaccaatcacatgcctatcatatagtaaaacccagcccatgacccctaacaggggccctctcagccctcctaatgacctccggcctagccatgtgatttcacttccactccataacgctcctcatactaggcctactaaccaacacactaaccatataccaatgatggcgcgatgtaacacgagaaagcacataccaaggccaccacacaccacctgtccaaaaaggccttcgatacgggataatcctatttattacctcagaagtttttttcttcgcaggatttttctgagccttttaccactccagcctagcccctaccccccaattaggagggcactggcccccaacaggcatcaccccgctaaatcccctagaagtcccactcctaaacacatccgtattactcgcatcaggagtatcaatcacctgagctcaccatagtctaatagaaaacaaccgaaaccaaataattcaagcactgcttattacaattttactgggtctctattttaccctcctacaagcctcagagtacttcgagtctcccttcaccatttccgacggcatctacggctcaacattttttgtagccacaggcttccacggacttcacgtcattattggctcaactttcctcactatctgcttcatccgccaactaatatttcactttacatccaaacatcactttggcttcgaagccgccgcctgatactggcattttgtagatgtggtttgactatttctgtatgtctccatctattgatgagggtcttactcttttagtataaatagtaccgttaacttccaattaactagttttgacaacattcaaaaaagagtaataaacttcgccttaattttaataatcaacaccctcctagccttactactaataattattacattttgactaccacaactcaacggctacatagaaaaatccaccccttacgagtgcggcttcgaccctatatcccccgcccgcgtccctttctccataaaattcttcttagtagctattaccttcttattatttgatctagaaattgccctccttttacccctaccatgagccctacaaacaactaacctgccactaatagttatgtcatccctcttattaatcatcatcctagccctaagtctggcctatgagtgactacaaaaaggattagactgaaccgaattggtatatagtttaaacaaaacgaatgatttcgactcattaaattatgataatcatatttaccaaatgcccctcatttacataaatattatactagcatttaccatctcacttctaggaatactagtatatcgctcacacctcatatcctccctactatgcctagaaggaataatactatcgctgttcattatagctactctcataaccctcaacacccactccctcttagccaatattgtgcctattgccatactagtctttgccgcctgcgaagcagcggtgggcctagccctactagtctcaatctccaacacatatggcctagactacgtacataacctaaacctactccaatgctaaaactaatcgtcccaacaattatattactaccactgacatgactttccaaaaaacacataatttgaatcaacacaaccacccacagcctaattattagcatcatccctctactattttttaaccaaatcaacaacaacctatttagctgttccccaaccttttcctccgaccccctaacaacccccctcctaatactaactacctgactcctacccctcacaatcatggcaagccaacgccacttatccagtgaaccactatcacgaaaaaaactctacctctctatactaatctccctacaaatctccttaattataacattcacagccacagaactaatcatattttatatcttcttcgaaaccacacttatccccaccttggctatcatcacccgatgaggcaaccagccagaacgcctgaacgcaggcacatacttcctattctacaccctagtaggctcccttcccctactcatcgcactaatttacactcacaacaccctaggctcactaaacattctactactcactctcactgcccaagaactatcaaactcctgagccaacaacttaatatgactagcttacacaatagcttttatagtaaagatacctctttacggactccacttatgactccctaaagcccatgtcgaagcccccatcgctgggtcaatagtacttgccgcagtactcttaaaactaggcggctatggtataatacgcctcacactcattctcaaccccctgacaaaacacatagcctaccccttccttgtactatccctatgaggcataattataacaagctccatctgcctacgacaaacagacctaaaatcgctcattgcatactcttcaatcagccacatagccctcgtagtaacagccattctcatccaaaccccctgaagcttcaccggcgcagtcattctcataatcgcccacgggcttacatcctcattactattctgcctagcaaactcaaactacgaacgcactcacagtcgcatcataatcctctctcaaggacttcaaactctactcccactaatagctttttgatgacttctagcaagcctcgctaacctcgccttaccccccactattaacctactgggagaactctctgtgctagtaaccacgttctcctgatcaaatatcactctcctacttacaggactcaacatactagtcacagccctatactccctctacatatttaccacaacacaatggggctcactcacccaccacattaacaacataaaaccctcattcacacgagaaaacaccctcatgttcatacacctatcccccattctcctcctatccctcaaccccgacatcattaccgggttttcctcttgtaaatatagtttaaccaaaacatcagattgtgaatctgacaacagaggcttacgaccccttatttaccgagaaagctcacaagaactgctaactcatgcccccatgtctaacaacatggctttctcaacttttaaaggataacagctatccattggtcttaggccccaaaaattttggtgcaactccaaataaaagtaataaccatgcacactactataaccaccctaaccctgacttccctaattccccccatccttaccaccctcgttaaccctaacaaaaaaaactcatacccccattatgtaaaatccattgtcgcatccacctttattatcagtctcttccccacaacaatattcatgtgcctagaccaagaagttattatctcgaactgacactgagccacaacccaaacaacccagctctccctaagcttcaaactagactacttctccataatattcatccctgtagcattgttcgttacatggtccatcatagaattctcactgtgatatataaactcagacccaaacattaatcagttcttcaaatatctactcatcttcctaattaccatactaatcttagttaccgctaacaacctattccaactgttcatcggctgagagggcgtaggaattatatccttcttgctcatcagttgatgatacgcccgagcagatgccaacacagcagccattcaagcaatcctatacaaccgtatcggcgatatcggtttcatcctcgccttagcatgatttatcctacactccaactcatgagacccacaacaaatagcccttctaaacgctaatccaagcctcaccccactactaggcctcctcctagcagcagcaggcaaatcagcccaattaggtctccacccctgactcccctcagccatagaaggccccaccccagtctcagccctactccactcaagcactatagttgtagcaggaatcttcttactcatccgcttccaccccctagcagaaaatagcccactaatccaaactctaacactatgcttaggcgctatcaccactctgttcgcagcagtctgcgcccttacacaaaatgacatcaaaaaaatcgtagccttctccacttcaagtcaactaggactcataatagttacaatcggcatcaaccaaccacacctagcattcctgcacatctgtacccacgccttcttcaaagccatactatttatgtgctccgggtccatcatccacaaccttaacaatgaacaagatattcgaaaaataggaggactactcaaaaccatacctctcacttcaacctccctcaccattggcagcctagcattagcaggaatacctttcctcacaggtttctactccaaagaccacatcatcgaaaccgcaaacatatcatacacaaacgcctgagccctatctattactctcatcgctacctccctgacaagcgcctatagcactcgaataattcttctcaccctaacaggtcaacctcgcttccccacccttactaacattaacgaaaataaccccaccctactaaaccccattaaacgcctggcagccggaagcctattcgcaggatttctcattactaacaacatttcccccgcatcccccttccaaacaacaatccccctctacctaaaactcacagccctcgctgtcactttcctaggacttctaacagccctagacctcaactacctaaccaacaaacttaaaataaaatccccactatgcacattttatttctccaacatactcggattctaccctagcatcacacaccgcacaatcccctatctaggccttcttacgagccaaaacctgcccctactcctcctagacctaacctgactagaaaagctattacctaaaacaatttcacagcaccaaatctccacctccatcatcacctcaacccaaaaaggcataattaaactttacttcctctctttcttcttcccactcatcctaaccctactcctaatcacataacctattcccccgagcaatctcaattacaatatatacaccaacaaacaatgttcaaccagtaactactactaatcaacgcccataatcatacaaagcccccgcaccaataggatcctcccgaatcaaccctgacccctctccttcataaattattcagcttcctacactattaaagtttaccacaaccaccaccccatcatactctttcacccacagcaccaatcctacctccatcgctaaccccactaaaacactcaccaagacctcaacccctgacccccatgcctcaggatactcctcaatagccatcgctgtagtatatccaaagacaaccatcattccccctaaataaattaaaaaaactattaaacccatataacctcccccaaaattcagaataataacacacccgaccacaccgctaacaatcaatactaaacccccataaataggagaaggcttagaagaaaaccccacaaaccccattactaaacccacactcaacagaaacaaagcatacatcattattctcgcacggactacaaccacgaccaatgatatgaaaaaccatcgttgtatttcaactacaagaacaccaatgaccccaatacgcaaaactaaccccctaataaaattaattaaccactcattcatcgacctccccaccccatccaacatctccgcatgatgaaacttcggctcactccttggcgcctgcctgatcctccaaatcaccacaggactattcctagccatgcactactcaccagacgcctcaaccgccttttcatcaatcgcccacatcactcgagacgtaaattatggctgaatcatccgctaccttcacgccaatggcgcctcaatattctttatctgcctcttcctacacatcgggcgaggcctatattacggatcatttctctactcagaaacctgaaacatcggcattatcctcctgcttgcaactatagcaacagccttcataggctatgtcctcccgtgaggccaaatatcattctgaggggccacagtaattacaaacttactatccgccatcccatacattgggacagacctagttcaatgaatctgaggaggctactcagtagacagtcccaccctcacacgattctttacctttcacttcatcttgcccttcattattgcagccctagcagcactccacctcctattcttgcacgaaacgggatcaaacaaccccctaggaatcacctcccattccgataaaatcaccttccacccttactacacaatcaaagacgccctcggcttacttctcttccttctctccttaatgacattaacactattctcaccagacctcctaggcgacccagacaattataccctagccaaccccttaaacacccctccccacatcaagcccgaatgatatttcctattcgcctacacaattctccgatccgtccctaacaaactaggaggcgtccttgccctattactatccatcctcatcctagcaataatccccatcctccatatatccaaacaacaaagcataatatttcgcccactaagccaatcactttattgactcctagccgcagacctcctcattctaacctgaatcggaggacaaccagtaagctacccttttaccatcattggacaagtagcatccgtactatacttcacaacaatcctaatcctaataccaactatctccctaattgaaaacaaaatactcaaatgggcctgtccttgtagtataaactaatacaccagtcttgtaaaccggagatgaaaacctttttccaaggacaaatcagagaaaaagtctttaactccaccattagcacccaaagctaagattctaatttaaactattctctgttctttcatggggaagcagatttgggtaccacccaagtattgactcacccatcaacaaccgctatgtatttcgtacattactgccagccaccatgaatattgtacggtaccataaatacttgaccacctgtagtacataaaaacccaatccacatcaaaaccccctccccatgcttacaagcaagtacagcaatcaaccctcaactatcacacatcaactgcaactccaaagccaccccccacccactaggataccaacaaacctacccacccttaacagtacatagcacataaagccatttaccgtacatagcacattacagtcaaatcccttctcgtccccatggatgacccccctcagataggggtcccttgaccaccatcctccgtgaaatcaatatcccgcacaagagtgctactctcctcgctccgggcccataacacttgggggtagctaaagtgaactgtatccgacatctggttcctacttcagggccataaagcctaaatagcccacacgttccccttaaataagacatcacgatg

SEQ ID NO: 49 - DNA, 16570 bp, Homo sapiens mitochondrial
  3108: "n" refers to a nucleotide at position 3107 of the Cambridge Reference Sequence (CRS, Anderson et al. 1981 Nature 290:457-465), later determined to be absent from the human mtDNA sequence according to the revised CRS (rCRS, Andrews et al. 1999 Nature Genetics 23:147); "n" therefore represents a single nucleotide deletion at a position corresponding to nucleotide 3107 of SEQ ID NO:1 as provided herein.
gatcacaggtctatcaccctattaaccactcacgggagctctccatgcatttggtattttcgtctggggggtgtgcacgcgatagcattgcgagacgctggagccggagcaccctatgtcgcagtatctgtctttgattcctgcctcatcctattatttatcgcacctacgttcaatattacaggcgaacatacttactaaagtgtgttaattaattaatgcttgtaggacataataataacaattgaatgtctgcacagccgctttccacacagacatcataacaaaaaatttccaccaaaccccccctcccccgccttctggccacagcacttaaacacatctctgccaaaccccaaaaacaaagaaccctaacaccagcctaaccagatttcaaattttatcttttggcggtatgcacttttaacagtcaccccccaactaacacattattttcccctcccactcccatactactaatctcatcaatacaacccccgcccatcctacccagcacacacacaccgctgctaaccccataccccgaaccaaccaaaccccaaagacaccccccacagtttatgtagcttacctcctcaaagcaatacactgaaaatgtttagacgggctcacatcaccccataaacaaataggtttggtcctagcctttctattagctcttagtaagattacacatgcaagcatccccgttccagtgagttcaccctctaaatcaccacgatcaaaagggacaagcatcaagcacgcagcaatgcagctcaaaacgcttagcctagccacacccccacgggaaacagcagtgattaacctttagcaataaacgaaagtttaactaagctatactaaccccagggttggtcaatttcgtgccagccaccgcggtcacacgattaacccaagtcaatagaagccggcgtaaagagtgttttagatcaccccctccccaataaagctaaaactcacctgagttgtaaaaaactccagttgacacaaaatagactacgaaagtggctttaacatatctgaacacacaatagctaagacccaaactgggattagataccccactatgcttagccctaaacctcaacagttaaatcaacaaaactgctcgccagaacactacgagccacagcttaaaactcaaaggacctggcggtgcttcatatccctctagaggagcctgttctgtaatcgataaaccccgatcaacctcaccacctcttgctcagcctatataccgccatcttcagcaaaccctgatgaaggctacaaagtaagcgcaagtacccacgtaaagacgttaggtcaaggtgtagcccatgaggtggcaagaaatgggctacattttctaccccagaaaactacgatagcccttatgaaacttaagggtcgaaggtggatttagcagtaaactgagagtagagtgcttagttgaacagggccctgaagcgcgtacacaccgcccgtcaccctcctcaagtatacttcaaaggacatttaactaaaacccctacgcatttatatagaggagacaagtcgtaacatggtaagtgtactggaaagtgcacttggacgaaccagagtgtagcttaacacaaagcacccaacttacacttaggagatttcaacttaacttgaccgctctgagctaaacctagccccaaacccactccaccttactaccagacaaccttagccaaaccatttacccaaataaagtataggcgatagaaattgaaacctggcgcaatagatatagtaccgcaagggaaagatgaaaaattataaccaagcataatatagcaaggactaacccctataccttctgcataatgaattaactagaaataactttgcaaggagagccaaagctaagacccccgaaaccagacgagctacctaagaacagctaaaagagcacacccgtctatgtagcaaaatagtgggaagatttataggtagaggcgacaaacctaccgagcctggtgatagctggttgtccaagatagaatcttagttcaactttaaatttgcccacagaaccctctaaatccccttgtaaatttaactgttagtccaaagaggaacagctctttggacactaggaaaaaaccttgtagagagagtaaaaaatttaacacccatagtaggcctaaaagcagccaccaattaagaaagcgttcaagctcaacacccactacctaaaaaatcccaaacatataactgaactcctcacacccaattggaccaatctatcaccctatagaagaactaatgttagtataagtaacatgaaaacattctcctccgcataagcctgcgtcagattaaaacactgaactgacaattaacagcccaatatctacaatcaaccaacaagtcattattaccctcactgtcaacccaacacaggcatgctcataaggaaaggttaaaaaaagtaaaaggaactcggcaaatcttaccccgcctgtttaccaaaaacatcacctctagcatcaccagtattagaggcaccgcctgcccagtgacacatgtttaacggccgcggtaccctaaccgtgcaaaggtagcataatcacttgttccttaaatagggacctgtatgaatggctccacgagggttcagctgtctcttacttttaaccagtgaaattgacctgcccgtgaagaggcgggcatgacacagcaagacgagaagaccctatggagctttaatttattaatgcaaacagtacctaacaaacccacaggtcctaaactaccaaacctgcattaaaaatttcggttggggcgacctcggagcagaacccaacctccgagcagtacatgctaagacttcaccagtcaaagcgaactactatactcaattgatccaataacttgaccaacggaacaagttaccctagggataacagcgcaatcctattctagagtccatatcaacaatagggtttacgacctcgatgttggatcaggacatcccgatggtgcagccgctattaaaggttcgtttgttcaacgattaaagtcctacgtgatctgagttcagaccggagtaatccaggtcggtttctatctacnttcaaattcctccctgtacgaaaggacaagagaaataaggcctacttcacaaagcgccttcccccgtaaatgatatcatctcaacttagcattatacccacacccacccaagaacagggtttgttaagatggcagagcccggtaatcgcataaaacttaaaactttacagtcagaggttcaattcctcttcttaacaacatacccatggccaacctcctactcctcattgtacccattctaatcgcaatggcattcctaatgcttaccgaacgaaaaattctaggctatatacaactacgcaaaggccccaacgttgtaggcccctacgggctactacaacccttcgctgacgccataaaactcttcaccaaagagcccctaaaacccgccacatctaccatcaccctctacatcaccgccccgaccttagctctcaccatcgctcttctactatgaacccccctccccatacccaaccccctggtcaacctcaacctaggcctcctatttattctagccacctctagcctagccgtttactcaatcctctgatcagggtgagcatcaaactcaaactacgccctgatcggcgcactgcgagcagtagcccaaacaatctcatatgaagtcaccctagccatcattctactatcaacattactaataagtggctcctttaacctctccacccttatcacaacacaagaacacctctgattactcctgccatcatgacccttggccataatatgatttatctccacactagcagagaccaaccgaacccccttcgaccttgccgaaggggagtccgaactagtctcaggcttcaacatcgaatacgccgcaggccccttcgccctattcttcatagccgaatacacaaacattattataataaacaccctcaccactacaatcttcctaggaacaacatatgacgcactctcccctgaactctacacaacatattttgtcaccaagaccctacttctaacctccctgttcttatgaattcgaacagcatacccccgattccgctacgaccaactcatacacctcctatgaaaaaacttcctaccactcaccctagcattacttatatgatatgtctccatacccattacaatctccagcattccccctcaaacctaagaaatatgtctgataaaagagttactttgatagagtaaataataggagcttaaacccccttatttctaggactatgagaatcgaacccatccctgagaatccaaaattctccgtgccacctatcacaccccatcctaaagtaaggtcagctaaataagctatcgggcccataccccgaaaatgttggttatacccttcccgtactaattaatcccctggcccaacccgtcatctactctaccatctttgcaggcacactcatcacagcgctaagctcgcactgatttttcacctgagtaggcctagaaataaacatgctagcttttattccagttctaaccaaaaaaataaaccctcgttccacagaagctgccatcaagtatttcctcacgcaagcaaccgcatccataatccttctaatagctatcctcttcaacaatatactctccggacaatgaaccataaccaatactaccaatcaatactcatcattaataatcataatggctatagcaataaaactaggaatagccccctttcacttctgagtcccagaggttacccaaggcacccctctgacatccggcctgcttcttctcacatgacaaaaactagcccccatctcaatcatataccaaatctctccctcactaaacgtaagccttctcctcactctctcaatcttatccatcatagcaggcagttgaggtggattaaaccaaacccagctacgcaaaatcttagcatactcctcaattacccacataggatgaataatagcagttctaccgtacaaccctaacataaccattcttaatttaactatttatattatcctaactactaccgcattcctactactcaacttaaactccagcaccacgaccctactactatctcgcacctgaaacaagctaacatgactaacacccttaattccatccaccctcctctccctaggaggcctgcccccgctaaccggctttttgcccaaatgggccattatcgaagaattcacaaaaaacaatagcctcatcatccccaccatcatagccaccatcaccctccttaacctctacttctacctacgcctaatctactccacctcaatcacactactccccatatctaacaacgtaaaaataaaatgacagtttgaacatacaaaacccaccccattcctccccacactcatcgcccttaccacgctactcctacctatctccccttttatactaataatcttatagaaatttaggttaaatacagaccaagagccttcaaagccctcagtaagttgcaatacttaatttctgtaacagctaaggactgcaaaaccccactctgcatcaactgaacgcaaatcagccactttaattaagctaagcccttactagaccaatgggacttaaacccacaaacacttagttaacagctaagcaccctaatcaactggcttcaatctacttctcccgccgccgggaaaaaaggcgggagaagccccggcaggtttgaagctgcttcttcgaatttgcaattcaatatgaaaatcacctcggagctggtaaaaagaggcctaacccctgtctttagatttacagtccaatgcttcactcagccattttacctcacccccactgatgttcgccgaccgttgactattctctacaaaccacaaagacattggaacactatacctattattcggcgcatgagctggagtcctaggcacagctctaagcctccttattcgagccgagctgggccagccaggcaaccttctaggtaacgaccacatctacaacgttatcgtcacagcccatgcatttgtaataatcttcttcatagtaatacccatcataatcggaggctttggcaactgactagttcccctaataatcggtgcccccgatatggcgtttccccgcataaacaacataagcttctgactcttacctccctctctcctactcctgctcgcatctgctatagtggaggccggagcaggaacaggttgaacagtctaccctcccttagcagggaactactcccaccctggagcctccgtagacctaaccatcttctccttacacctagcaggtgtctcctctatcttaggggccatcaatttcatcacaacaattatcaatataaaaccccctgccataacccaataccaaacgcccctcttcgtctgatccgtcctaatcacagcagtcctacttctcctatctctcccagtcctagctgctggcatcactatactactaacagaccgcaacctcaacaccaccttcttcgaccccgccggaggaggagaccccattctataccaacacctattctgatttttcggtcaccctgaagtttatattcttatcctaccaggcttcggaataatctcccatattgtaacttactactccggaaaaaaagaaccatttggatacataggtatggtctgagctatgatatcaattggcttcctagggtttatcgtgtgagcacaccatatatttacagtaggaatagacgtagacacacgagcatatttcacctccgctaccataatcatcgctatccccaccggcgtcaaagtatttagctgactcgccacactccacggaagcaatatgaaatgatctgctgcagtgctctgagccctaggattcatctttcttttcaccgtaggtggcctgactggcattgtattagcaaactcatcactagacatcgtactacacgacacgtactacgttgtagctcacttccactatgtcctatcaataggagctgtatttgccatcataggaggcttcattcactgatttcccctattctcaggctacaccctagaccaaacctacgccaaaatccatttcactatcatattcatcggcgtaaatctaactttcttcccacaacactttctcggcctatccggaatgccccgacgttactcggactaccccgatgcatacaccacatgaaacatcctatcatctgtaggctcattcatttctctaacagcagtaatattaataattttcatgatttgagaagccttcgcttcgaagcgaaaagtcctaatagtagaagaaccctccataaacctggagtgactatatggatgccccccaccctaccacacattcgaagaacccgtatacataaaatctagacaaaaaaggaaggaatcgaaccccccaaagctggtttcaagccaaccccatggcctccatgactttttcaaaaaggtattagaaaaaccatttcataactttgtcaaagttaaattataggctaaatcctatatatcttaatggcacatgcagcgcaagtaggtctacaagacgctacttcccctatcatagaagagcttatcacctttcatgatcacgccctcataatcattttccttatctgcttcctagtcctgtatgcccttttcctaacactcacaacaaaactaactaatactaacatctcagacgctcaggaaatagaaaccgtctgaactatcctgcccgccatcatcctagtcctcatcgccctcccatccctacgcatcctttacataacagacgaggtcaacgatccctcccttaccatcaaatcaattggccaccaatggtactgaacctacgagtacaccgactacggcggactaatcttcaactcctacatacttcccccattattcctagaaccaggcgacctgcgactccttgacgttgacaatcgagtagtactcccgattgaagcccccattcgtataataattacatcacaagacgtcttgcactcatgagctgtccccacattaggcttaaaaacagatgcaattcccggacgtctaaaccaaaccactttcaccgctacacgaccgggggtatactacggtcaatgctctgaaatctgtggagcaaaccacagtttcatgcccatcgtcctagaattaattcccctaaaaatctttgaaatagggcccgtatttaccctatagcaccccctctaccccctctagagcccactgtaaagctaacttagcattaaccttttaagttaaagattaagagaaccaacacctctttacagtgaaatgccccaactaaatactaccgtatggcccaccataattacccccatactccttacactattcctcatcacccaactaaaaatattaaacacaaactaccacctacctccctcaccaaagcccataaaaataaaaaattataacaaaccctgagaaccaaaatgaacgaaaatctgttcgcttcattcattgcccccacaatcctaggcctacccgccgcagtactgatcattctatttccccctctattgatccccacctccaaatatctcatcaacaaccgactaatcaccacccaacaatgactaatcaaactaacctcaaaacaaatgataaccatacacaacactaaaggacgaacctgatctcttatactagtatccttaatcatttttattgccacaactaacctcctcggactcctgcctcactcatttacaccaaccacccaactatctataaacctagccatggccatccccttatgagcgggcgcagtgattataggctttcgctctaagattaaaaatgccctagcccacttcttaccacaaggcacacctacaccccttatccccatactagttattatcgaaaccatcagcctactcattcaaccaatagccctggccgtacgcctaaccgctaacattactgcaggccacctactcatgcacctaattggaagcgccaccctagcaatatcaaccattaaccttccctctacacttatcatcttcacaattctaattctactgactatcctagaaatcgctgtcgccttaatccaagcctacgttttcacacttctagtaagcctctacctgcacgacaacacataatgacccaccaatcacatgcctatcatatagtaaaacccagcccatgacccctaacaggggccctctcagccctcctaatgacctccggcctagccatgtgatttcacttccactccataacgctcctcatactaggcctactaaccaacacactaaccatataccaatgatggcgcgatgtaacacgagaaagcacataccaaggccaccacacaccacctgtccaaaaaggccttcgatacgggataatcctatttattacctcagaaatttttttcttcgcaggatttttctgagccttttaccactccagcctagcccctaccccccaattaggagggcactggcccccaacaggcatcaccccgctaaatcccctagaagtcccactcctaaacacatccgtattactcgcatcaggagtatcaatcacctgagctcaccatagtctaatagaaagcaaccgaaaccaaataattcaagcactgcttattacaattttactgggtctctattttaccctcctacaagcctcagagtacttcgagtctcccttcaccatttccgacggcatctacggctcaacattttttgtagccacaggcttccacggacttcacgtcattattggctcaactttcctcactatctgcttcatccgccaactaatatttcactttacatccaaacatcactttggcttcgaagccgccgcctgatactggcattttgtagatgtggtttgactatttctgtatgtctccatctattgatgagggtcttactcttttagtataaatagtaccgttaacttccaattaactagttttgacaacattcaaaaaagagtaataaacttcgccttaattttaataatcaacaccctcctagccttactactaataattattacattttgactaccacaactcaacggctacatagaaaaatccaccccttacgagtgcggcttcgaccctatatcccccgcccgcgtccctttctccataaaattcttcttagtagctattaccttcttattatttgatctagaaattgccctccttttacccctaccatgagccctacaaacaactaacctgccactaatagttatgtcatccctcttattaatcatcatcctagccctaagtctggcctatgagtgactacaaaaaggattagactgaaccgaattggtatatagtttaaacaaaacgaatgatttcgactcattaaattatgataatcatatttaccaaatgcccctcatttacataaatattatactagcatttaccatctcacttctaggaatactagtatatcgctcacacctcatatcctccctactatgcctagaaggaataatactatcgctgttcattatagctactctcataaccctcaacacccactccctcttagccaatattgtgcctattgccatactagtctttgccgcctgcgaagcagcggtgggcctagccctactagtctcaatctccaacacatatggcctagactacgtacataacctaaacctactccaatgctaaaactaatcgtcccaacaattatattactaccactgacatgactttccaaaaaacacataatttgaatcaacacaaccacccacagcctaattattagcatcatccctctactattttttaaccaaatcaacaacaacctatttagctgttccccaaccttttcctccgaccccctaacaacccccctcctaatactaactacctgactcctacccctcacaatcatggcaagccaacgccacttatccagtgaaccactatcacgaaaaaaactctacctctctatactaatctccctacaaatctccttaattataacattcacagccacagaactaatcatattttatatcttcttcgaaaccacacttatccccaccttggctatcatcacccgatgaggcaaccagccagaacgcctgaacgcaggcacatacttcctattctacaccctagtaggctcccttcccctactcatcgcactaatttacactcacaacaccctaggctcactaaacattctactactcactctcactgcccaagaactatcaaactcctgagccaacaacttaatatgactagcttacacaatagcttttatagtaaagatacctctttacggactccacttatgactccctaaagcccatgtcgaagcccccatcgctgggtcaatagtacttgccgcagtactcttgaaactaggcggctatggtataatacgcctcacactcattctcaaccccctgacaaaacacatagcctaccccttccttgtactatccctatgaggcataattataacaagctccatctgcctacgacaaacagacctaaaatcgctcattgcatactcttcaatcagccacatagccctcgtagtaacagccattctcatccaaaccccctgaagcttcaccggcgcagtcattctcataatcgcccacggacttacatcctcattactattctgcctagcaaactcaaactacgaacgcactcacagtcgcatcataatcctctctcaaggacttcaaactctactcccactaatagctttttgatgacttctagcaagcctcgctaacctcgccttaccccccactattaacctactgggagaactctctgtgctagtaaccacgttctcctgatcaaatatcactctcctacttacaggactcaacatactagtcacagccctatactccctctacatatttaccacaacacaatggggctcactcacccaccacattaacaacataaaaccctcattcacacgagaaaacaccctcatgttcatacacctatcccccattctcctcctatccctcaaccccgacatcattaccgggttttcctcttgtaaatatagtttaaccaaaacatcagattgtgaatctgacaacagaggcttacgaccccttatttaccgagaaagctcacaagaactgctaactcatgcccccatgtctaacaacatggctttctcaacttttaaaggataacagccatccattggtcttaggccccaagaattttggtgcaactccaaataaaagtaataaccatgcacactactataaccaccctaaccctaacttccctaattccccccatccttaccaccctcgttaaccctaacaaaaaaaactcatacccccattatgtaaaatccattgtcgcatccacctttattatcagtctcttccccacaacaatattcatgtgcctagaccaagaagttattatctcgaactgacactgagccacaacccaaacaacccagctctccctaagcttcaaactagactacttctccataatattcatccctgtagcattgttcgttacatggtccatcatagaattctcactgtgatatataaactcagacccaaacattaatcagttcttcaaatatctactcatcttcctaattaccatactaatcttagttaccgctaacaacctattccaactgttcatcggctgagagggcgtaggaattatatccttcttgctcatcagttgatgatacgcccgagcagatgccaacacagcagccattcaagcaatcctatacaaccgtatcggcgatatcggtttcatcctcgccttagcatgatttatcctacactccaactcatgagacccacaacaaatagcccttctaaacgctaatccaagcctcaccccactactaggcctcctcctagcagcagcaggcaaatcagcccaattaggtctccacccctgactcccctcagccatagaaggccccaccccagtctcagccctactccactcaagcactatagttgtagcaggaatcttcttactcatccgcttccaccccctagcagaaaatagcccactaatccaaactctaacactatgcttaggcgctatcaccactctgttcgcagcagtctgcgcccttacacaaaatgacatcaaaaaaatcgtagccttctccacttcaagtcaactaggactcataatagttacaatcggcatcaaccaaccacacctagcattcctgcacatctgtacccacgccttcttcaaagccatactatttatgtgctccgggtccatcatccacaaccttaacaatgaacaagatattcgaaaaataggaggactactcaaaaccatacctctcacttcaacctccctcaccattggcagcctagcattagcaggaatacctttcctcacaggtttctactccaaagaccacatcatcgaaaccgcaaacatatcatacacaaacgcctgagccctatctattactctcatcgctacctccctgacaagcgcctatagcactcgaataatccttctcaccctaacaggtcaacctcgcttccccacccttactaacattaacgaaaataaccccaccctactaaaccccattaaacgcctggcagccggaagcctattcgcaggatttctcattactaacaacatttcccccgcatcccccttccaaacaacaatccccctctacctaaaactcacagccctcgctgtcactttcctaggacttctaacagccctagacctcaactacctaaccaacaaacttaaaataaaatccccactatgcacattttatttctccaacatactcggattctaccctagcatcacacaccgcacaatcccctatctaggccttcttacgagccaaaacctgcccctactcctcctagacctaacctgactagaaaagctattacctaaaacaatttcacagcaccaaatctccacctccatcatcacctcaacccaaaaaggcataattaaactttacttcctctctttcttcttcccactcatcctaaccctactcctaatcacataacctattcccccgagcaatctcaattacaatatatacaccaacaaacaatgttcaaccagtaactactactaatcaacgcccataatcatacaaagcccccgcaccaataggatcctcccgaatcaaccctgacccctctccttcataaattattcagcttcctacactattaaagtttaccacaaccaccaccccatcatactctttcacccacagcaccaatcctacctccatcgctaaccccactaaaacactcaccaagacctcaacccctgacccccatgcctcaggatactcctcaatagccatcgctgtagtatatccaaagacaaccatcattccccctaaataaattaaaaaaactattaaacccatataacctcccccaaaattcagaataataacacacccgaccacaccgctaacaatcaatactaaacccccataaataggagaaggcttagaagaaaaccccacaaaccccattactaaacccacactcaacagaaacaaagcatacatcattattctcgcacggactacaaccacgaccaatgatatgaaaaaccatcgttgtatttcaactacaagaacaccaatgaccccaatacgcaaaattaaccccctaataaaattaattaaccgctcattcatcgacctccccaccccatccaacatctccgcatgatgaaacttcggctcactccttggcgcctgcctgatcctccaaatcaccacaggactattcctagccatgcactactcaccagacgcctcaaccgccttttcatcaatcgcccacatcactcgagacgtaaattatggctgaatcatccgctaccttcacgccaatggcgcctcaatattctttatctgcctcttcctacacatcgggcgaggcctatattacggatcatttctctactcagaaacctgaaacatcggcattatcctcctgcttgcaactatagcaacagccttcataggctatgtcctcccgtgaggccaaatatcattctgaggggccacagtaattacaaacttactatccgccatcccatacattggggcagacctagttcaatgaatctgaggaggctactcagtagacagtcccaccctcacacgattctttacctttcacttcatcttgcccttcattattgcagccctagcagcactccacctcctattcttgcacgaaacgggatcaaacaaccccctaggaatcacctcccattccgataaaatcaccttccacccttactacacaatcaaagacgccctcggcttacttctcttccttctctccttaatgacattaacactattctcaccagacctcctaggcgacccagacaattataccctagccaaccccttaaacacccctccccacatcaagcccgaatgatatttcctattcgcctacacaattctccgatccgtccctaacaaactaggaggcgtccttgccctattactatccatcctcatcctagcaataatccccatcctccatatatccaaacaacaaagcataatatttcgcccactaagccaatcactttattgactcctagccgcagacctcctcattctaacctgaatcggaggacaaccagtaagctacccttttaccatcattggacaagtagcatccgtactatacttcacaacaatcctaatcctaataccaactatctccctaattgaaaacaaaatactcaaatgggcctgtccttgtagtataaactaatacaccagtcttgtaaaccggagatgaaaacctttttccaaggacaaatcagagaaaaagtctttaactccaccattagcacccaaagctaagattctaatttaaactattctctgttctttcatggggaagcagatttgggtaccacccaagtattgactcacccatcaacaaccgctatgtatttcgtacattactgccagccaccatgaatattgtacggtaccataaatacttgaccacctgtagtacataaaaacccaatccacatcaaaaccccctcctcatgcttacaagcaagtacagcaatcaaccctcaactatcacacatcaactgcaactccaaagtcacccctcacccattaggataccaacaaacctactcacccttaacagtacatagtacataaagccatttaccgtacatagcacattacagtcaaatcccttctcgtccccatggatgacccccctcagataggggtcccttggccaccatcctccgtgaaatcaatatcccgcacaagagtgctactctcctcgctccgggcccataacacttgggggtagctaaagtgaactgtatccgacatctggttcctacttcagggtcataaagcctaaatagcccacacgttccccttaaataagacatcacgatg

SEQ ID NO: 50 - DNA, 16572 bp, Homo sapiens mitochondrial
  3110: "n" refers to a nucleotide at position 3107 of the Cambridge Reference Sequence (CRS, Anderson et al. 1981 Nature 290:457-465), later determined to be absent from the human mtDNA sequence according to the revised CRS (rCRS, Andrews et al. 1999 Nature Genetics 23:147); "n" therefore represents a single nucleotide deletion at a position corresponding to nucleotide 3107 of SEQ ID NO:1 as provided herein.
gatcacaggtctatcaccctattaaccactcacgggagctctccatgcatttggtattttcgtctggggggtgtgcacgcgatagcattgcgagacgctggagccggagcaccctatgtcgcagtatctgtctttgattcctgcctcatcctattatttatcgcacctacgttcaatattacaggcgaacatacttactaaagtgtgttaattaattaatgcttgtaggacataataataacaattgaatgtctgcacagccgctttccacacagacatcataacaaaaaatttccaccaaaccccccctcccccgccttctggccacagcacttaaacacatctctgccaaaccccaaaaacaaagaaccctaacaccagcctaaccagatttcaaattttatcttttggcggtatgcacttttaacagtcaccccccaactaacacattattttcccctcccactcccatactactaatctcatcaatacaaccctcgcccatcctacccagcacacacacaccacgctgctaaccccataccccgaaccaaccaaaccccaaagacaccccccacagtttatgtagcttacctcctcaaagcaatacactgaaaatgtttagacgggctcacatcaccccataaacaaataggtttggtcctagcctttctattagctcttagtaagattacacatgcaagcatccccgttccagtgagttcaccctctaaatcaccacgatcaaaagggacaagcatcaagcacgcagcaatgcagctcaaaacgcttagcctagccacacccccacgggaaacagcagtgattaacctttagcaataaacgaaagtttaactaagctatactaaccccagggttggtcaatttcgtgccagccaccgcggtcacacgattaacccaagtcaatagaagccggcgtaaagagtgttttagatcaccccctccccaataaagctaaaactcacctgagttgtaaaaaactccagttgacacaaaatagactacgaaagtggctttaacatatctgaacacacaatagctaagacccaaactgggattagataccccactatgcttagccctaaacctcaacagttaaatcaacaaaactgctcgccagaacactacgagccacagcttaaaactcaaaggacctggcggtgcttcatacccctctagaggagcctgttctgtaatcgataaaccccgatcaacctcaccacctcttgctcagcctatataccgccatcttcagcaaaccctgatgaaggctacaaagtaagcgcaagtacccacgtaaagacgttaggtcaaggtgtagcccatgaggtggcaagaaatgggctacattttctaccccagaaaactacgatagcccttatgaaacttaagggtcgaaggtggatttagcagtaaactgagagtagagtgcttagttgaacagggccctgaagcgcgtacacaccgcccgtcaccctcctcaagtatacttcaaaggacatttaactaaaacccctacgcatttatatagaggagacaagtcgtaacatggtaagtgtactggaaagtgcacttggacgaaccagagtgtagcttaacacaaagcacccaacttacacttaggagatttcaacttaacttgaccgctctgagctaaacctagccccaaacccactccaccttactaccagacaaccttagccaaaccatttacccaaataaagtataggcgatagaaattgaaacctggcgcaatagatatagtaccgcaagggaaagatgaaaaattatagccaagcataatatagcaaggactaacccctataccttctgcataatgaattaactagaaataactttgcaaggagagccaaagctaagacccccgaaaccagacgagctacctaagaacagctaaaagagcacacccgtctatgtagcaaaatagtgggaagatttataggtagaggcgacaaacctaccgagcctggtgatagctggttgtccaagatagaatcttagttcaactttaaatttgcccacagaaccctctaaatccccttgtaaatttaactgttagtccaaagaggaacagctctttggacactaggaaaaaaccttgtagagagagtaaaaaatttaacacccatagtaggcctaaaagcagccaccaattaagaaagcgttcaagctcaacacccactacctaaaaaatcccaaacatataactgaactcctcacacccaattggaccaatctatcaccctatagaagaactaatgttagtataagtaacatgaaaacattctcctccgcataagcctgcgtcagattaaaacactgaactgacaattaacagcccaatatctacaatcaaccaacaagtcattattaccctcactgtcaacccaacacaggcatgctcataaggaaaggttaaaaaaagtaaaaggaactcggcaaatcttaccccgcctgtttaccaaaaacatcacctctagcatcaccagtattagaggcaccgcctgcccagtgacacatgtttaacggccgcggtaccctaaccgtgcaaaggtagcataatcacttgttccttaaatagggacctgtatgaatggctccacgagggttcagctgtctcttacttttaaccagtgaaattgacctgcccgtgaagaggcgggcatgacacagcaagacgagaagaccctatggagctttaatttattaatgcaaacagtacctaacaaacccacaggtcctaaactaccaaacctgcattaaaaatttcggttggggcgacctcggagcagaacccaacctccgagcagtacatgctaagacttcaccagtcaaagcgaactactatactcaattgatccaataacttgaccaacggaacaagttaccctagggataacagcgcaatcctattctagagtccatatcaacaatagggtttacgacctcgatgttggatcaggacatcccgatggtgcagccgctattaaaggttcgtttgttcaacgattaaagtcctacgtgatctgagttcagaccggagtaatccaggtcggtttctatctacnttcaaattcctccctgtacgaaaggacaagagaaataaggcctacttcacaaagcgccttcccccgtaaatgatatcatctcaacttagtattatacccacacccacccaagaacagggtttgttaagatggcagagcccggtaatcgcataaaacttaaaactttacagtcagaggttcaattcctcttcttaacaacatacccatggccaacctcctactcctcattgtacccattctaatcgcaatggcattcctaatgcttaccgaacgaaaaattctaggctatatacaactacgcaaaggccccaacgttgtaggcccctacgggctactacaacccttcgctgacgccataaaactcttcaccaaggagcccctaaaacccgccacatctaccatcaccctctacatcaccgccccgaccttagctctcaccatcgctcttctactatgaacccccctccccatacccaaccccctggtcaacctcaacctaggcctcctatttattctagccacctctagcctagccgtttactcaatcctctgatcagggtgagcatcaaactcaaactacgccctgatcggcgcactgcgagcagtagcccaaacaatctcatatgaagtcaccctagccatcattctactatcaacattactaataagtggctcctttaacctctccacccttatcacaacacaagaacacctctgattactcctgccatcatgacccttggccataatatgatttatctccacactagcagagaccaaccgaacccccttcgaccttgccgaaggggagtccgaactagtctcaggcttcaacatcgaatacgccgcaggccccttcgccctattcttcatagccgaatacacaaacattattataataaacaccctcaccactacaatcttcctaggaacaacatatgacgcactctcccctgaactctacacaacatattttgtcaccaagaccctacttctaacctccctgttcttatgaattcgaacagcatacccccgattccgctacgaccaactcatacacctcctatgaaaaaacttcctaccactcaccctagcattacttatatgatatgtctccatacccattacaatctccagcattccccctcaaacctaagaaatatgtctgataaaagagttactttgatggagtaaataataggagcttaaacccccttatttctaggactatgagaatcgaacccatccctgagaatccaaaattctccgtgccacctatcacaccccatcctaaagtaaggtcagctaaataagctatcgggcccataccccgaaaatgttggttatacccttcccgtactaattaatcccctggcccaacccgtcatctactctaccatctttgcaggcacactcatcacagcgctaagctcgcactgattttttacctgagtaggcctagaaataaacatgctagcttttattccagttctaaccaaaaaaataaaccctcgttccacagaagctgccatcaagtatttcctcacgcaagcaaccgcatccataatccttctaatagctatcctcttcaacaatatactctccggacaatgaaccataaccaatactaccaatcaatactcatcattaataatcataatggctatagcaataaaactaggaatagccccctttcacttctgagtcccagaggttacccaaggcacccctctgacatccggcctgcttcttctcacatgacaaaaactagcccccatctcaatcatataccaaatctctccctcactaaacgtaagccttctcctcactctctcaatcttatccatcatagcaggcagttgaggtggattaaaccaaacccagctacgcaaaatcttagcatactcctcaattacccacataggatgaataatagcagttctaccgtacaaccctaacataaccattcttaatttaactatttatattatcctaactactaccgcattcctactactcaacttaaactccagcaccacgaccctactactatctcgcacctgaaacaagctaacatgactaacacccttaattccatccaccctcctctccctaggaggcctgcccccgctaaccggctttttgcccaaatgggccattatcgaagaattcacaaaaaacaatagcctcatcatccccaccatcatagccaccatcaccctccttaacctctacttctacctacgcctaatctactccacctcaatcacactactccccatatctaacaacgtaaaaataaaatgacagtttgaacatacaaaacccaccccattcctccccacactcatcgcccttaccacgctactcctacctatctccccttttatactaataatcttatagaaatttaggttaaatacagaccaagagccttcaaagccctcagtaagttgcaatacttaatttctgtaacagctaaggactgcaaaaccccactctgcatcaactgaacgcaaatcagccactttaattaagctaagcccttactagaccaatgggacttaaacccacaaacacttagttaacagctaagcaccctagtcaactggcttcaatctacttctcccgccgccgggaaaaaaggcgggagaagccccggcaggtttgaagctgcttcttcgaatttgcaattcaatatgaaaatcacctcggagctggtaaaaagaggcctaacccctgtctttagatttacagtccaatgcttcactcagccattttacctcacccccactgatgttcgccgaccgttgactattctctacaaaccacaaagacattggaacactatacctattattcggcgcatgagctggagtcctaggcacagctctaagcctccttattcgagccgagctgggccagccaggcaaccttctaggtaacgaccacatctacaacgttatcgtcacagcccatgcatttgtaataatcttcttcatagtaatacccatcataatcggaggctttggcaactgactagttcccctaataatcggtgcccccgatatggcgtttccccgcataaacaacataagcttctgactcttacctccctctctcctactcctgctcgcatctgctatagtggaagccggagcaggaacaggttgaacagtctaccctcccttagcagggaactactcccaccctggagcctccgtagacctaaccatcttctccttacacctagcaggtgtctcctctatcttaggggccatcaatttcatcacaacaattatcaatataaaaccccctgccataacccaataccaaacgcccctcttcgtctgatccgtcctaatcacagcagtcctacttctcctatctctcccagtcctagctgctggcatcactatactactaacagaccgcaacctcaacaccaccttcttcgaccccgccggaggaggagaccccattctataccaacacctattctgatttttcggtcaccctgaagtttatattcttatcctaccaggcttcggaataatctcccatattgtaacttactactccggaaaaaaagaaccatttggatacataggtatggtctgagctatgatatcaattggcttcctagggtttatcgtgtgagcacaccatatatttacagtaggaatagacgtagacacacgagcatatttcacctccgctaccataatcatcgctatccccaccggcgtcaaagtatttagctgactcgccacactccacggaagcaatatgaaatgatctgctgcagtgctctgagccctaggattcatctttcttttcaccgtaggtggcctgactggcattgtattagcaaactcatcactagacatcgtactacacgacacgtactacgttgtagctcacttccactatgtcctatcaataggagctgtatttgccatcataggaggcttcattcactgatttcccctattctcaggctacaccctagaccaaacctacgccaaaatccatttcactatcatattcatcggcgtaaatctaactttcttcccacaacactttctcggcctatccggaatgccccgacgttactcggactaccccgatgcatacaccacatgaaacatcctatcatctgtaggctcattcatttctctaacagcagtaatattaataattttcatgatttgagaagccttcgcttcgaagcgaaaagtcctaatagtagaagaaccctccataaacctggagtgactatatggatgccccccaccctaccacacattcgaagaacccgtatacataaaatctagacaaaaaaggaaggaatcgaaccccccaaagctggtttcaagccaaccccatggcctccatgactttttcaaaaaggtattagaaaaaccatttcataactttgtcaaagttaaattataggctaaatcctatatatcttaatggcacatgcagcgcaagtaggtctacaagacgctacttcccctatcatagaagagcttatcacctttcatgatcacgccctcataatcattttccttatctgcttcctagtcctgtatgcccttttcctaacactcacaacaaaactaactaatactaacatctcagacgctcaggaaatagaaaccgtctgaactatcctgcccgccatcatcctagtcctcatcgccctcccatccctacgcatcctttacataacagacgaggtcaacgatccctcccttaccatcaaatcaattggccaccaatggtactgaacctacgagtacaccgactacggcggactaatcttcaactcctacatacttcccccattattcctagaaccaggcgacctgcgactccttgacgttgacaatcgagtagtactcccgattgaagcccccattcgtataataattacatcacaagacgtcttgcactcatgagctgtccccacattaggcttaaaaacagatgcaattcccggacgtctaaaccaaaccactttcaccgctacacgaccgggggtatactacggtcaatgctctgaaatctgtggagcaaaccacagtttcatgcccatcgtcctagaattaattcccctaaaaatctttgaaatagggcccgtatttaccctatagcaccccctctaccccctctagagcccactgtaaagctaacttagcattaaccttttaagttaaagattaagagaaccaacacctctttacagtgaaatgccccaactaaatactaccgtatggcccaccataattacccccatactccttacactattcctcatcacccaactaaaaatattaaacacaaactaccacctacctccctcaccaaagcccataaaaataaaaaattataacaaaccctgagaaccaaaatgaacgaaaatctgttcgcttcattcattgcccccacaatcctaggcctacccgccgcagtactgatcattctatttccccctctattgatccccacctccaaatatctcatcaacaaccgactaatcaccacccaacaatgactaatcaaactaacctcaaaacaaatgataaccatacacaacactaaaggacgaacctgatctcttatactagtatccttaatcatttttattgccacaactaacctcctcggactcctgcctcactcatttacaccaaccacccaactatctataaacctagccatggccatccccttatgagcgggcgcagtgattataggctttcgctctaagattaaaaatgccctagcccacttcttaccacaaggcacacctacaccccttatccccatactagttattatcgaaaccatcagcctactcattcaaccaatagccctggccgtacgcctaaccgctaacattactgcaggccacctactcatgcacctaattggaagcaccaccctagcaatatcaaccattaaccttccctctacacttatcatcttcacaattctaattctactgactatcctagaaatcgctgtcgccttaatccaagcctacgttttcacacttctagtaagcctctacctgcacgacaacacataatgacccaccaatcacatgcctatcatatagtaaaacccagcccatgacccctaacaggggccctctcagccctcctaatgacctccggcctagccatgtgatttcacttccactccataacgctcctcatactaggcctactaaccaacacactaaccatataccaatgatggcgcgatgtaacacgagaaagcacataccaaggccaccacacaccacctgtccaaaaaggccttcgatacgggataatcctatttattacctcagaagtttttttcttcgcaggatttttctgagccttttaccactccagcctagcccctaccccccaattaggagggcactggcccccaacaggcatcaccccgctaaatcccctagaagtcccactcctaaacacatccgtattactcgcatcaggagtatcaatcacctgagctcaccatagtctaatagaaaacaaccgaaaccaaataattcaagcactgctcattacaattttactgggtctctattttaccctcctacaagcctcagagtacttcgagtctcccttcaccatttccgacggcatctacggctcaacattttttgtagccacaggcttccacggacttcacgtcattattggctcaactttcctcactatctgcttcatccgccaactaatatttcactttacatccaaacatcactttggcttcgaagccgccgcctgatactggcattttgtagatgtggtttgactatttctgtatgtctccatctattgatgagggtcttactcttttagtataaatagtaccgttaacttccaattaactagttttgacaacattcaaaaaagagtaataaacttcgccttaattttaataatcaacaccctcctagccttactactaataattattacattttgactaccacaactcaacggctacatagaaaaatccaccccttacgagtgcggcttcgaccctatatcccccgcccgcgtccctttctccataaaattcttcttagtagctattaccttcttattatttgatctagaaattgccctccttttacccctaccatgagccctacaaacaactaacctgccactaatagttatgtcatccctcttattaatcatcatcctagccctaagtctggcctatgagtgactacaaaaaggattagactgagccgaattggtatatagtttaaacaaaacgaatgatttcgactcattaaattatgataatcatatttaccaaatgcccctcatttacataaatattatactagcatttaccatctcacttctaggaatactagtatatcgctcacacctcatgtcctccctactatgcctagaaggaataatactatcgctgttcattatagctactctcataaccctcaacacccactccctcttagccaatattgtgcctattgccatactagtctttgccgcctgcgaagcagcggtgggcctagccctactagtctcaatctccaacacatatggcctagactacgtacataacctaaacctactccaatgctaaaactaatcgtcccaacaattatattactaccactgacatgactttccaaaaaacacataatttgaatcaacacaaccacccacagcctaattattagcatcatccctctactattttttaaccaaatcaacaacaacctatttagctgttccccaaccttttcctccgaccccctaacaacccccctcctaatactaactacctgactcctacccctcacaatcatggcaagccaacgccacttatccagtgaaccactatcacgaaaaaaactctacctctctatactaatctccctacaaatctccttaattataacattcacagccacagaactaatcatattttatatcttcttcgaaaccacacttatccccaccttggctatcatcacccgatgaggcaaccagccagaacgcctgaacgcaggcacatacttcctattctacaccctagtaggctcccttcccctactcatcgcactaatttacactcacaacaccctaggctcactaaacattctactactcaccctcactgcccaagaactatcaaactcctgagccaacaacttaatatgactagcttacacaatagcttttatagtaaagatacctctttacggactccacttatgactccctaaagcccatgtcgaagcccccatcgctgggtcaatagtacttgccgcagtactcttgaaactaggcggctatggcataatacgcctcacactcattctcaaccccctgacaaaacacatagcctaccccttccttgtactatccctatgaggcataattataacaagctccatctgcctacgacaaacagacctaaaatcgctcattgcatactcttcaatcagccacatagccctcgtagtaacagccattctcatccaaaccccctgaagcttcaccggcgcagtcattctcataatcgcccacggacttacatcctcattactattctgcctagcaaactcaaactacgaacgcactcacagtcgcatcataatcctctctcaaggacttcaaactctactcccactaatagctttttgatgacttttagcaagcctcgctaacctcgccttaccccccactattaacctactgggagaactctctgtgctagtaaccacgttctcctgatcaaatatcactctcctacttacaggactcaacatactagtcacagccctatactccctctacatatttaccacaacacaatggggctcactcacccaccacattaacaacataaaaccctcattcacacgagaaaacaccctcatgttcatacacctatcccccattctcctcctatccctcaaccccgacatcattaccgggttttcctcttgtaaatatagtttaaccaaaacatcagattgtgaatctgacaacagaggcttacgaccccttatttaccgagaaagctcacaagaactgctaactcatgcccccatgtctaacaacatggctttctcaacttttaaaggataacagctatccattggtcttaggccccaagaattttggtgcaactccaaataaaagtaataaccatgcacactactataaccaccctaaccctaacttccctaattccccccatccttaccaccctcgttaaccctaacaaaaaaaactcatacccccattatgtaaaatccattgtcgcatccacctttattatcagtctcttccccacaacaatattcatgtgcctagaccaagaagttattatctcgaactgacactgagccacaacccaaacaacccagctctccctaagcttcaaactagactacttctccataatattcatccctgtagcattgttcgttacatggtccatcatagaattctcactgtgatatataaactcagacccaaacattaatcagttcttcaaatatctactcatcttcctaattaccatactaatcttagttaccgctaacaacctattccaactgttcatcggctgagagggcgtaggaattatatccttcttgctcatcagttgatgatacgcccgagcagatgccaacacagcagccattcaagcaatcctatacaaccgtatcggcgatatcggtttcatcctcgccttagcatgatttatcctacactccaactcatgagacccacaacaaatagcccttctaaacgctaatccaagcctcaccccactactaggcctcctcctagcagcagcaggcaaatcagcccaattaggtctccacccctgactcccctcagccatagaaggccccaccccagtctcagccctactccactcaagcactatagttgtagcaggaatcttcttactcatccgcttccaccccctagcagaaaatagcccactaatccaaactctaacactatgcttaggcgctatcaccactctgttcgcagcagtctgcgcccttacacaaaatgacatcaaaaaaatcgtagccttctccacttcaagtcaactaggactcataatagttacaatcggcatcaaccaaccacacctagcattcctgcacatctgtacccacgccttcttcaaagccatactatttatgtgctccgggtccatcatccacaaccttaacaatgaacaagatattcgaaaaataggaggactactcaaaaccatgcctctcacttcaacctccctcaccattggcagcctagcattagcaggaatacctttcctcacaggtttctactccaaagaccacatcatcgaaaccgcaaacatatcatacacaaacgcctgagccctatctattactctcatcgctacctccctgacaagcgcctatagcactcgaataattcttctcaccctaacaggtcaacctcgcttccccacccttactaacattaacgaaaataaccccaccctactaaaccccattaaacgcctggcagccggaagcctattcgcaggatttctcatcactaacaacatttcccccgcatcccccttccaaacaacaatccccctctacctaaaactcacagccctcgctgtcactttcctaggacttctaacagccctagacctcaactacctaaccaacaaacttaaaataaaatccccaccatgcacattttatttctccaacatactcggattctaccctagcatcacacaccgcacaatcccctatctaggccttcttacgagccaaaacctgcccctactcctcctagacctaacctgactagaaaagctattacctaaaacaatttcacagcaccaaatctccacctccatcatcacctcaacccaaaaaggcataattaaactttacttcctctctttcttcttcccactcatcctaaccctactcctaatcacataacctattcccccgagcaatttcaattacaatatatacaccaacaaacaatgttcaaccagtaactactactaatcaacgcccataatcatacaaagcccccgcaccaataggatcctcccgaatcaaccctgacccctctccttcataaattattcagcttcctacactattaaagtttaccacaaccaccaccccatcatactctttcacccacagcaccaatcctacctccatcgctaaccccactaaaacactcaccaagacctcaacccctgacccccatgcctcaggatactcctcaatagccatcgctgtagtatatccaaagacaaccatcattccccctaaataaattaaaaaaactattaaacccatataacctcccccaaaattcagaataataacacacccgaccacaccgctaacaatcaatactaaacccccataaataggagaaggcttagaagaaaaccccacaaaccccattactaaacccacactcaacagaaacaaagcatacatcattattctcgcacggactacaaccacgaccaatgatatgaaaaaccatcgttgtatttcaactacaagaacaccaatgaccccaatacgcaaaattaaccccctaataaaattaattaaccactcactcatcgacctccccaccccatccaacatctccgcatgatgaaacttcggctcactccttggcgcctgcctgatcctccaaatcaccacaggactattcctagccatgcactactcaccagacgcctcaaccgccttttcatcaatcgcccacatcactcgagacgtaaattatggctgaatcatccgctaccttcacgccaatggcgcctcaatattctttatctgcctcttcctacacatcgggcgaggcctatattacggatcatttctctactcagaaacctgaaacatcggcattatcctcctgcttgcaactatagcaacagccttcataggctatgtcctcccgtgaggccaaatatcattctgaggggccacagtaattacaaacttactatccgccatcccatacattgggacagacctagttcaatgaatctgaggaggctactcagtagacagtcccaccctcacacgattctttacctttcacttcatcttgcccttcattattgcagccctagcaacactccacctcctattcttgcacgaaacgggatcaaacaaccccctaggaatcacctcccattccgataaaatcaccttccacccttactacacaatcaaagacgccctcggcttacttctcttccttctctccttaatgacattaacactattctcaccagacctcctaggcgacccagacaattataccctagccaaccccttaaacacccctccccacatcaagcccgaatgatatttcctattcgcctacacaattctccgatccgtccctaacaaactaggaggcgtccttgccctattactatccatcctcatcctagcaataatccccatcctccatatatccaaacaacaaagcataatatttcgcccactaagccaatcactttattgactcctagccgcagacctcctcattctaacctgaatcggaggacaaccagtaagctacccttttaccatcattggacaagtagcatccgtactatacttcacaacaatcctaatcctaataccaactatctccctaattgaaaacaaaatactcaaatggacctgtccttgtagtataaactaatacaccagtcttgtaaaccggagatgaaaacctttttccaaggacaaatcagagaaaaagtctttaactccaccattagcacccaaagctaagattctaatttaaactattctctgttctttcatggggaagcagatttgggtaccacccaagtattgactcacccatcaacaaccgctatgtatttcgtacattactgccagccaccatgaatattgtacggtaccataaatacttgaccacctgtagtacataaaaacccaatccacatcaaaaccccctccccatgcttacaagcaagtacagcaatcaacccccaactatcacacatcaactgcaactccaaagccacccctcacccactaggataccaacaaacctacccacccttaacagtacatagcacataaagccatttaccgtacatagcacattacagtcaaatcccttctcgtccccatggatgacccccctcagataggggtcccttgaccaccatcctccgtgaaatcaatatcccgcacaagagtgctactctcctcgctccgggcccataacacttgggggtagctaaagtgaactgtatccgacatctggttcctacttcagggccataaagcctaaatagcccacacgttccccttaaataagacatcacgatg

SEQ ID NO: 51 - DNA, 16569 bp, Homo sapiens mitochondrial
  3107: "n" refers to a nucleotide at position 3107 of the Cambridge Reference Sequence (CRS, Anderson et al. 1981 Nature 290:457-465), later determined to be absent from the human mtDNA sequence according to the revised CRS (rCRS, Andrews et al. 1999 Nature Genetics 23:147); "n" therefore represents a single nucleotide deletion at a position corresponding to nucleotide 3107 of SEQ ID NO:1 as provided herein.
gatcacaggtctatcaccctattaaccactcacgggagctctccatgcatttggtattttcgtctggggggtatgcacgcgatagcattgcgagacgctggagccggagcaccctatgtcgcagtatctgtctttgattcctgcctcatcccattatttatcgcacctacgttcaatattacaggcgaacatacttactaaagtgtgttaattaattaatgcttgtaggacataataataacaattgaatgtctgcacagccactttccacacagacatcataacaaaaaatttccaccaaaccccccctcccccgcttctggccacagcacttaaacacatctctgccaaaccccaaaaacaaagaaccctaacaccagcctaaccagatttcaaattttatcttttggcggtatgcacttttaacagtcaccccccaactaacacattattttcccctcccactcccatactactaatctcatcaatacaacccccgcccatcctacccagcacacacacaccgctgctaaccccataccccgaaccaaccaaaccccaaagacaccccccacagtttatgtagcttacctcctcaaagcaatacactgaaaatgtttagacgggctcacatcaccccataaacaaataggtttggtcctagcctttctattagctcttagtaagattacacatgcaagcatccccgttccagtgagttcaccctctaaatcaccacgatcaaaaggaacaagcatcaagcacgcagcaatgcagctcaaaacgcttagcctagccacacccccacgggaaacagcagtgattaacctttagcaataaacgaaagtttaactaagctatactaaccccagggttggtcaatttcgtgccagccaccgcggtcacacgattaacccaagtcaatagaagccggcgtaaagagtgttttagatcaccccctccccaataaagctaaaactcacctgagttgtaaaaaactccagttgacacaaaatagactacgaaagtggctttaacatatctgaacacacaatagctaagacccaaactgggattagataccccactatgcttagccctaaacctcaacagttaaatcaacaaaactgctcgccagaacactacgagccacagcttaaaactcaaaggacctggcggtgcttcatatccctctagaggagcctgttctgtaatcgataaaccccgatcaacctcaccacctcttgctcagcctatataccgccatcttcagcaaaccctgatgaaggctacaaagtaagcgcaagtacccacgtaaagacgttaggtcaaggtgtagcccatgaggtggcaagaaatgggctacattttctaccccagaaaactacgatagcccttatgaaacttaagggtcgaaggtggatttagcagtaaactgagagtagagtgcttagttgaacagggccctgaagcgcgtacacaccgcccgtcaccctcctcaagtatacttcaaaggacatttaactaaaacccctacgcatttatatagaggagacaagtcgtaacatggtaagtgtactggaaagtgcacttggacgaaccagagtgtagcttaacacaaagcacccaacttacacttaggagatttcaacttaacttgaccgctctgagctaaacctagccccaaacccactccaccttactaccagacaaccttagccaaaccatttacccaaataaagtataggcgatagaaattgaaacctggcgcaatagatatagtaccgcaagggaaagatgaaaaattataaccaagcataatatagcaaggactaacccctataccttctgcataatgaattaactagaaataactttgcaaggagagccaaagctaagacccccgaaaccagacgagctacctaagaacagctaaaagagcacacccgtctatgtagcaaaatagtgggaagatttataggtagaggcgacaaacctaccgagcctggtgatagctggttgtccaagatagaatcttagttcaactttaaatttgcccacagaaccctctaaatccccttgtaaatttaactgttagtccaaagaggaacagctctttggacactaggaaaaaaccttgtagagagagtaaaaaatttaacacccatagtaggcctaaaagcagccaccaattaagaaagcgttcaagctcaacacccactacctaaaaaatcccaaacatataactgaactcctcacacccaattggaccaatctatcaccctatagaagaactaatgttagtataagtaacatgaaaacattctcctccgcataagcctgcgtcagattaaaacactgaactgacaattaacagcccaatatctacaatcaaccaacaagtcattattaccctcactgtcaacccaacacaggcatgctcataaggaaaggttaaaaaaagtaaaaggaactcggcaaatcttaccccgcctgtttaccaaaaacatcacctctagcatcaccagtattagaggcaccgcctgcccagtgacacatgtttaacggccgcggtaccctaaccgtgcaaaggtagcataatcacttgttccttaaatagggacctgtatgaatggctccacgagggttcagctgtctcttacttttaaccagtgaaattgacctgcccgtgaagaggcgggcatgacacagcaagacgagaagaccctatggagctttaatttattaatgcaaacagtacctaacaaacccacaggtcctaaactaccaaacctgcattaaaaatttcggttggggcgacctcggagcagaacccaacctccgagcagtacatgctaagacttcaccagtcaaagcgaactactatactcaattgatccaataacttgaccaacggaacaagttaccctagggataacagcgcaatcctattctagagtccatatcaacaatagggtttacgacctcgatgttggatcaggacatcccgatggtgcagccgctattaaaggttcgtttgttcaacgattaaagtcctacgtgatctgagttcagaccggagtaatccaggtcggtttctatctacnttcaaattcctccctgtacgaaaggacaagagaaataaggcctacttcacaaagcgccttcccccgtaaatgatatcatctcaacttagtattatacccacacccacccaagaacagggtttgttaagatggcagagcccggtaatcgcataaaacttaaaactttacagtcagaggttcaattcctcttcttaacaacatacccatggccaacctcctactcctcattgtacccattctaatcgcaatggcattcctaatgcttaccgaacgaaaaattctaggctatatacaactacgcaaaggccccaacgttgtaggcccctacgggctactacaacccttcgctgacgccataaaactcttcaccaaagagcccctaaaacccgccacatctaccatcaccctctacatcaccgccccgaccttagctctcaccgtcgctcttctactatgaacccccctccccatacccaaccccctggtcaacctcaacctaggcctcctatttattctagccacctctagcctagccgtttactcaatcctctgatcagggtgagcatcaaactcaaactacgccctgatcggcgcactgcgagcagtagcccaaacaatctcatatgaagtcaccctagccatcattctactatcaacattactaataagtggctcctttaacctctccacccttatcacaacacaagaacacctctgattactcctgccatcatgacccttggccataatatgatttatctccacactagcagagaccaaccgaacccccttcgaccttgccgaaggggagtccgaactagtctcaggcttcaacatcgaatacgccgcaggccccttcgccctattcttcatagccgaatacacaaacattattataataaacaccctcaccactacaatcttcctaggaacaacatatgacgcactctcccctgaactctacacaacatattttgtcaccaagaccctacttctaacctccctgttcttatgaattcgaacagcatacccccgattccgctacgaccaactcatacacctcctatgaaaaaacttcctaccactcaccctagcattacttatatgatatgtctccatacccattacaatctccagcattccccctcaaacctaagaaatatgtctgataaaagagttactttgatagagtaaataataggagcttaaacccccttatttctaggactatgagaatcgaacccatccctgagaatccaaaattctccgtgccacctatcacaccccatcctaaagtaaggtcagctaaataagctatcgggcccataccccgaaaatgttggttatacccttcccgtactaattaatcccctggcccaacccgtcatctactctaccatctttgcaggcacactcatcacagcgctaagctcgcactgattttttacctgagtaggcctagaaataaacatgctagcttttattccagttctaaccaaaaaaataaaccctcgttccacagaagctgccatcaagtatttcctcacgcaagcaaccgcatccataatccttctaatagctatcctcttcaacaatatactctccggacaatgaaccataaccaatactaccaatcaatactcatcattaataatcataatggctatagcaataaaactaggaatagccccctttcacttctgagtcccagaggttacccaaggcacccctctgacatccggcctgcttcttctcacatgacaaaaactagcccccatctcaatcatataccaaatctctccctcactaaacgtaagccttctcctcactctctcaatcttatccatcatagcaggcagttgaggtggattaaaccaaacccagctacgcaaaatcttagcatactcctcaattacccacataggatgaataatagcagttctaccgtacaaccctaacataaccattcttaatttaactatttatattatcctaactactaccgcattcctactactcaacttaaactccagcaccacgaccctactactatctcgcacctgaaacaagctaacatgactaacacccttaattccatccaccctcctctccctaggaggcctgcccccgctaaccggctttttgcccaaatgggccattatcgaagaattcacaaaaaacaatagcctcatcatccccaccatcatagccaccatcaccctccttaacctctacttctacctacgcctaatctactccacctcaatcacactactccccatatctaacaacgtaaaaataaaatgacagtttgaacatacaaaacccaccccattcctccccacactcatcgcccttaccacgctactcctacctatctccccttttatactaataatcttatagaaatttaggttaaatacagaccaagagccttcaaagccctcagtaagttgcaatacttaatttctgtaacagctaaggactgcaaaaccccactctgcatcaactgaacgcaaatcagccactttaattaagctaagcccttactagaccaatgggacttaaacccacaaacacttagttaacagctaagcaccctaatcaactggcttcaatctacttctcccgccgccgggaaaaaaggcgggagaagccccggcaggtttgaagctgcttcttcgaatttgcaattcaatatgaaaatcacctcggagctggtaaaaagaggcctaacccctgtctttagatttacagtccaatgcttcactcagccattttacctcacccccactgatgttcgccgaccgttgactattctctacaaaccacaaagacattggaacactatacctattattcggcgcatgagctggagtcctaggcacagctctaagcctccttattcgagccgaactgggccagccaggcaaccttctaggtaacgaccacatctacaacgttatcgtcacagcccatgcatttgtaataatcttcttcatagtaatacccatcataatcggaggctttggcaactgactagttcccctaataatcggtgcccccgatatggcgtttccccgcataaacaacataagcttctgactcttacctccctctctcctactcctgctcgcatctgctatagtggaggccggagcaggaacaggttgaacagtctaccctcccttagcagggaactactcccaccctggagcctccgtagacctaaccatcttctccttacacctagcaggtgtctcctctatcttaggggccatcaatttcatcacaacaattatcaatataaaaccccctgccataacccaataccaaacgcccctcttcgtctgatccgtcctaatcacagcagtcctacttctcctatctctcccagtcctagctgctggcatcactatactactaacagaccgcaacctcaacaccaccttcttcgaccccgccggaggaggagaccccattctataccaacacctattctgatttttcggtcaccctgaagtttatattcttatcctaccaggcttcggaataatctcccatattgtaacttactactccggaaaaaaagaaccatttggatacataggtatggtctgagctatgatatcaattggcttcctagggtttatcgtgtgagcacaccatatatttacagtaggaatagacgtagacacacgagcatatttcacctccgctaccataatcatcgctatccccaccggcgtcaaagtatttagctgactcgccacactccacggaagcaatatgaaatgatctgctgcagtgctctgagccctaggattcatctttcttttcaccgtaggtggcctgactggcattgtattagcaaactcatcactagacatcgtactacacgacacgtactacgttgtagctcacttccactatgtcctatcaataggagctgtatttgccatcataggaggcttcattcactgatttcccctattctcaggctacaccctagaccaaacctacgccaaaatccatttcactatcatattcatcggcgtaaatctaactttcttcccacaacactttctcggcctatccggaatgccccgacgttactcggactaccccgatgcatacaccacatgaaacatcctatcatctgtaggctcattcatttctctaacagcagtaatattaataattttcatgatttgagaagccttcgcttcgaagcgaaaagtcctaatagtagaagaaccctccataaacctggagtgactatatggatgccccccaccctaccacacattcgaagaacccgtatacataaaatctagacaaaaaaggaaggaatcgaaccccccaaagctggtttcaagccaaccccatggcctccatgactttttcaaaaaggtattagaaaaaccatttcataactttgtcaaagttaaattataggctaaatcctatatatcttaatggcacatgcagcgcaagtaggtctacaagacgctacttcccctatcatagaagagcttatcacctttcatgatcacgccctcataatcattttccttatctgcttcctagtcctgtatgcccttttcctaacactcacaacaaaactaactaatactaacatctcagacgctcaggaaatagaaaccgtctgaactatcctgcccgccatcatcctagtcctcatcgccctcccatccctacgcatcctttacataacagacgaggtcaacgatccctcccttaccatcaaatcaattggccaccaatggtactgaacctacgagtacaccgactacggcggactaatcttcaactcctacatacttcccccattattcctagaaccaggcgacctgcgactccttgacgttgacaatcgagtagttctcccgattgaagcccccattcgtataataattacatcacaagacgtcttgcactcatgagctgtccccacattaggcttaaaaacagatgcaattcccggacgtctaaaccaaaccactttcaccgctacacgaccgggggtatactacggtcaatgctctgaaatctgtggagcaaaccacagtttcatgcccatcgtcctagaattaattcccctaaaaatctttgaaatagggcccgtatttaccctatagcaccccctctaccccctctagagcccactgtaaagctaacttagcattaaccttttaagttaaagattaagagaaccaacacctctttacagtgaaatgccccaactaaatactaccgtatggcccaccataattacccccatactccttacactattcctcatcacccaactaaaaatattaaacacaaactaccacctacctccctcaccaaagcccataaaaataaaaaattataacaaaccctgagaaccaaaatgaacgaaaatctgttcgcttcattcattgcccccacaatcctaggcctacccgccgcagtactgatcattctatttccccctctattgatccccacctccaaatatctcatcaacaaccgactaatcaccacccaacaatgactaatcaaactaacctcaaaacaaatgataaccatacacaacactaaaggacgaacctgatctcttatactagtatccttaatcatttttattgccacaactaacctcctcggactcctgcctcactcatttacaccaaccacccaactatctataaacctagccatggccatccccttatgagcgggcgcagtgattataggctttcgctctaagattaaaaatgccctagcccacttcttaccacaaggcacacctacaccccttatccccatactagttattatcgaaaccatcagcctactcattcaaccaatagccctggccgtacgcctaaccgctaacattactgcaggccacctactcatgcacctaattggaagcgccaccctagcaatatcaaccattaaccttccctctacacttatcatcttcacaattctaattctactgactatcctagaaatcgctgtcgccttaatccaagcctacgttttcacacttctagtaagcctctacctgcacgacaacacataatgacccaccaatcacatgcctatcatatagtaaaacccagcccatgacccctaacaggggccctctcagccctcctaatgacctccggcctagccatgtgatttcacttccactccataacgctcctcatactaggcctactaaccaacacactaaccatataccaatgatggcgcgatgtaacacgagaaagcacataccaaggccaccacacaccacctgtccaaaaaggccttcgatacgggataatcctatttattacctcagaagtttttttcttcgcaggatttttctgagccttttaccactccagcctagcccctaccccccaattaggagggcactggcccccaacaggcatcaccccgctaaatcccctagaagtcccactcctaaacacatccgtattactcgcatcaggagtatcaatcacctgagctcaccatagtctaatagaaaacaaccgaaaccaaataattcaagcactgcttattacaattttactgggtctctattttaccctcctacaagcctcagagtacttcgagtctcccttcaccatttccgacggcatctacggctcaacattttttgtagccacaggcttccacggacttcacgtcattattggctcaactttcctcactatctgcttcatccgccaactaatatttcactttacatccaaacatcactttggcttcgaagccgccgcctgatactggcattttgtagatgtggtttgactatttctgtatgtctccatctattgatgagggtcttactcttttagtataaatagtaccgttaacttccaattaactagttttgacaacattcaaaaaagagtaataaacttcgccttaattttaataatcaacaccctcctagccttactactaataattattacattttgactaccacaactcaacggctacatagaaaaatccaccccttacgagtgcggcttcgaccctatatcccccgcccgcgtccctttctccataaaattcttcttagtagctattaccttcttattatttgatctagaaattgccctccttttacccctaccatgagccctacaaacaactaacctgccactaatagttatgtcatccctcttattaatcatcatcctagccctaagtctggcctatgagtgactacaaaaaggattagactgaaccgaattggtatatagtttaaacaaaacgaatgatttcgactcattaaattatgataatcatatttaccaaatgcccctcatttacataaatattatactagcatttaccatctcacttctaggaatactagtatatcgctcacacctcatatcctccctactatgcctagaaggaataatactatcgctgttcattatagctactctcataaccctcaacacccactccctcttagccaatattgtgcctattgccatactagtctttgccgcctgcgaagcagcggtgggcctagccctactagtctcaatctccaacacatatggcctagactacgtacataacctaaacctactccaatgctaaaactaatcgtcccaacaattatattactaccactgacatgactttccaaaaaacacataatttgaatcaacacaaccacccacagcctaattattagcatcatccctctactattttttaaccaaatcaacaacaacctatttagctgttccccaaccttttcctccgaccccctaacaacccccctcctaatactaactacctgactcctacccctcacaatcatggcaagccaacgccacttatccagtgaaccactatcacgaaaaaaactctacctctctatactaatctccctacaaatctccttaattataacattcacagccacagaactaatcatattttatatcttcttcgaaaccacacttatccccaccttggctatcatcacccgatgaggcaaccagccagaacgcctgaacgcaggcacatacttcctattctacaccctagtaggctcccttcccctactcatcgcactaatttacactcacaacaccctaggctcactaaacattctactactcactctcactgcccaagaactatcaaactcctgagccaacaacttaatatgactagcttacacaatagcttttatagtaaagatacctctttacggactccacttatgactccctaaagcccatgtcgaagcccccatcgctgggtcaatagtacttgccgcagtactcttaaaactaggcggctatggtataatacgcctcacactcattctcaaccccctgacaaaacacatagcctaccccttccttgtactatccctatgaggcataattataacaagctccatctgcctacgacaaacagacctaaaatcgctcattgcatactcttcaatcagccacatagccctcgtagtaacagccattctcatccaaaccccctgaagcttcaccggcgcagtcattctcataatcgcccacgggcttacatcctcattactattctgcctagcaaactcaaactacgaacgcactcacagtcgcatcataatcctctctcaaggacttcaaactctactcccactaatagctttttgatgacttctagcaagcctcgctaacctcgccttaccccccactattaacctactgggagaactctctgtgctagtaaccacgttctcctgatcaaatatcactctcctacttacaggactcaacatactagtcacagccctatactccctctacatatttaccacaacacaatggggctcactcacccaccacattaacaacataaaaccctcattcacacgagaaaacaccctcatgttcatacacctatcccccattctcctcctatccctcaaccccgacatcattaccgggttttcctcttgtaaatatagtttaaccaaaacatcagattgtgaatctgacaacagaggcttacgaccccttatttaccgagaaagctcacaagaactgctaactcatgcccccatgtctaacaacatggctttctcaacttttaaaggataacagctatccattggtcttaggccccaaaaattttggtgcaactccaaataaaagtaataaccatgcacactactataaccaccctaaccctgacttccctaattccccccatccttaccaccctcgttaaccctaacaaaaaaaactcatacccccattatgtaaaatccattgtcgcatccacctttattatcagtctcttccccacaacaatattcatgtgcctagaccaagaagttattatctcgaactgacactgagccacaacccaaacaacccagctctccctaagcttcaaactagactacttctccataatattcatccctgtagcattgttcgttacatggtccatcatagaattctcactgtgatatataaactcagacccaaacattaatcagttcttcaaatacctactcatcttcctaattaccatactaatcttagttaccgctaacaacctattccaactgttcatcggctgagagggcgtaggaattatatccttcttgctcatcagttgatgatacgcccgagcagatgccaacacagcagccattcaagcaatcctatacaaccgtatcggcgatatcggtttcatcctcgccttagcatgatttatcctacactccaactcatgagacccacaacaaatagcccttctaaacgctaatccaagcctcaccccactactaggcctcctcctagcagcagcaggcaaatcagcccaattaggtctccacccctgactcccctcagccatagaaggccccaccccagtctcagccctactccactcaagcactatagttgtagcaggaatcttcttactcatccgcttccaccccctagcagaaaatagcccactaatccaaactctaacactatgcttaggcgctatcaccactctgttcgcagcagtctgcgcccttacacaaaatgacatcaaaaaaatcgtagccttctccacttcaagtcaactaggactcataatagttacaatcggcatcaaccaaccacacctagcattcctgcacatctgtacccacgccttcttcaaagccatactatttatgtgctccgggtccatcatccacaaccttaacaatgaacaagatattcgaaaaataggaggactactcaaaaccatacctctcacttcaacctccctcaccattggcagcctagcattagcaggaatacctttcctcacaggtttctactccaaagaccacatcatcgaaaccgcaaacatatcatacacaaacgcctgagccctatctattactctcatcgctacctccctgacaagcgcctatagcactcgaataattcttctcaccctaacaggtcaacctcgcttccccacccttactaacattaacgaaaataaccccaccctactaaaccccattaaacgcctggcagccggaagcctattcgcaggatttctcattactaacaacatttcccccgcatcccccttccaaacaacaatccccctctacctaaaactcacagccctcgctgtcactttcctaggacttctaacagccctagacctcaactacctaaccaacaaacttaaaataaaatccccactatgcacattttatttctccaacatactcggattctaccctagcatcacacaccgcacaatcccctatctaggccttcttacgagccaaaacctgcccctactcctcctagacctaacctgactagaaaagctattacctaaaacaatttcacagcaccaaatctccacctccatcatcacctcaacccaaaaaggcataattaaactttacttcctctctttcttcttcccactcatcctaaccctactcctaatcacataacctattcccccgagcaatctcaattacaatatatacaccaacaaacaatgttcaaccagtaactactactaatcaacgcccataatcatacaaagcccccgcaccaataggatcctcccgaatcaaccctgacccctctccttcataaattattcagcttcctacactattaaagtttaccacaaccaccaccccatcatactctttcacccacagcaccaatcctacctccatcgctaaccccactaaaacactcaccaagacctcaacccctgacccccatgcctcaggatactcctcaatagccatcgctgtagtatatccaaagacaaccatcattccccctaaataaattaaaaaaactattaaacccatataacctcccccaaaattcagaataataacacacccgaccacaccgctaacaatcaatactaaacccccataaataggagaaggcttagaagaaaaccccacaaaccccattactaaacccacactcaacagaaacaaagcatacatcattattctcgcacggactacaaccacgaccaatgatatgaaaaaccatcgttgtatttcaactacaagaacaccaatgaccccaatacgcaaaactaaccccctaataaaattaattaaccactcattcatcgacctccccaccccatccaacatctccgcatgatgaaacttcggctcactccttggcgcctgcctgatcctccaaatcaccacaggactattcctagccatgcactactcaccagacgcctcaaccgccttttcatcaatcgcccacatcactcgagacgtaaattatggctgaatcatccgctaccttcacgccaatggcgcctcaatattctttatctgcctcttcctacacatcgggcgaggcctatattacggatcatttctctactcagaaacctgaaacatcggcattatcctcctgcttgcaactatagcaacagccttcataggctatgtcctcccgtgaggccaaatatcattctgaggggccacagtaattacaaacttactatccgccatcccatacattggggcagacctagttcaatgaatctgaggaggctactcagtagacagtcccaccctcacacgattctttacctttcacttcatcttgcccttcattattgcagccctagcagcactccacctcctattcttgcacgaaacgggatcaaacaaccccctaggaatcacctcccattccgataaaatcaccttccacccttactacacaatcaaagacgccctcggcttacttctcttccttctctccttaatgacattaacactattctcaccagacctcctaggcgacccagacaattataccctagccaaccccttaaacacccctccccacatcaagcccgaatgatatttcctattcgcctacacaattctccgatccgtccctaacaaactaggaggcgtccttgccctattactatccatcctcatcctagcaataatccccatcctccatatatccaaacaacaaagcataatatttcgcccactaagccaatcactttattgactcctagccgcagacctcctcattctaacctgaatcggaggacaaccagtaagctacccttttaccatcattggacaagtagcatccgtactatacttcacaacaatcctaatcctaataccaactatctccctaattgaaaacaaaatactcaaatgggcctgtccttgtagtataaactaatacaccagtcttgtaaaccggagatgaaaacctttttccaaggacaaatcagagaaaaagtctttaactccaccattagcacccaaagctaagattctaatttaaactattctctgttctttcatggggaagcagatttgggtaccacccaagtattgattcacccatcaacaaccgctatgtatttcgtacattactgccagccaccatgaatattgtacggtaccataaatacttgaccacctgtagtacataaaaacccaatccacatcaaacccccccccccatgcttacaagcaagtacagcaatcaaccctcaactatcacacatcaactgcaactccaaagccacccctcacccactaggataccaacaaacctacccacccttaacagtacatagtacataaagccatttaccgtacatagcacattacagtcaaatcccttctcgtccccatggatgacccccctcagataggggtcccttgaccaccatcctccgtgaaatcaatatcccgcacaagagtgctactctcctcgctccgggcccataacacttgggggtagctaaagtgaactgtatccgacatctggttcctacttcagggccataaagcctaaatagcccacacgttccccttaaataagacatcacgatg

SEQ ID NO: 52 - DNA, 16569 bp, Homo sapiens mitochondrial
  3107: "n" refers to a nucleotide at position 3107 of the Cambridge Reference Sequence (CRS, Anderson et al. 1981 Nature 290:457-465), later determined to be absent from the human mtDNA sequence according to the revised CRS (rCRS, Andrews et al. 1999 Nature Genetics 23:147); "n" therefore represents a single nucleotide deletion at a position corresponding to nucleotide 3107 of SEQ ID NO:1 as provided herein.
gatcacaggtctatcaccctattaaccactcacgggagctctccatgcatttggtattttcgtctggggggtgtgcacgcgatagcattgcgagacgctggagccggagcaccctatgtcgcagtatctgtctttgattcctgccccatcccattatttatcgcacctacgttcaatattacaggcgaacatacttactaaagtgtgttaattaattaatgcttgtaggacataataataacaattgaatgtctgcacagccactttccacacagacatcataacaaaaaatttccaccaaaccccccctcccccgcttctggccacagcacttaaacacatctctgccaaaccccaaaaacaaagaaccctaacaccagcctaaccagatttcaaattttatcttttggcggtatgcacttttaacagtcaccccccaactaacacattattttcccctcccactcccatactactaatctcatcaatacaacccccgcccatcctacccagcacacacacaccgctgctaaccccataccccgaaccaaccaaaccccaaagacaccccccacagtttatgtagcttacctcctcaaagcaatacactgaaaatgtttagacgggctcacatcaccccataaacaaataggtttggtcctagcctttctattagctcttagtaagattacacatgcaagcatccccgttccagtgagttcaccctctaaatcaccacgatcaaaagggacaagcatcaagcacgcagcaatgcagctcaaaacgcttagcctagccacacccccacgggaaacagcagtgattaacctttagcaataaacgaaagtttaactaagctatactaaccccagggttggtcaatttcgtgccagccaccgcggtcacacgattaacccaagtcaatagaagccggcgtaaagagtgttttagatcaccccctccccaataaagctaaaactcacctgagttgtaaaaaactccagttgacacaaaatagactacgaaagtggctttaacatatctgaacacacaatagctaagacccaaactgggattagataccccactatgcttagccctaaacctcaacagttaaatcaacaaaactgctcgccagaacactacgagccacagcttaaaactcaaaggacctggcggtgcttcatatccctctagaggagcctgttctgtaatcgataaaccccgatcaacctcaccacctcttgctcagcctatataccgccatcttcagcaaaccctgatgaaggctacaaagtaagcgcaagtacccacgtaaagacgttaggtcaaggtgtagcccatgaggtggcaagaaatgggctacattttctaccccagaaaactacgatagcccttatgaaacttaagggtcgaaggtggatttagcagtaaactgagagtagagtgcttagttgaacagggccctgaagcgcgtacacaccgcccgtcaccctcctcaagtatacttcaaaggacatttaactaaaacccctacgcatttatatagaggagacaagtcgtaacatggtaagtgtactggaaagtgcacttggacgaaccagagtgtagcttaacacaaagcacccaacttacacttaggagatttcaacttaacttgaccgctctgagctaaacctagccccaaacccactccaccttactaccagacaaccttagccaaaccatttacccaaataaagtataggcgatagaaattgaaacctggcgcaatagatatagtaccgcaagggaaagatgaaaaattatagccaagcataatatagcaaggactaacccctataccttctgcataatgaattaactagaaataactttgcaaggagagccaaagctaagacccccgaaaccagacgagctacctaagaacagctaaaagagcacacccgtctatgtagcaaaatagtgggaagatttataggtagaggcgacaaacctaccgagcctggtgatagctggttgtccaagatagaatcttagttcaactttaaatttgcccacagaaccctctaaatccccttgtaaatttaactgttagtccaaagaggaacagctctttggacactaggaaaaaaccttgtagagagagtaaaaaatttaacacccatagtaggcctaaaagcagccaccaattaagaaagcgttcaagctcaacacccactacctaaaaaatcccaaacatataactgaactcctcacacccaattggaccaatctatcaccctatagaagaactaatgttagtataagtaacatgaaaacattctcctccgcataagcctgcgtcagattaaaacactgaactgacaattaacagcccaatatctacaatcaaccaacaagtcattattaccctcactgtcaacccaacacaggcatgctcataaggaaaggttaaaaaaagtaaaaggaactcggcaaatcttaccccgcctgtttaccaaaaacatcacctctagcatcaccagtattagaggcaccgcctgcccagtgacacatgtttaacggccgcggtaccctaaccgtgcaaaggtagcataatcacttgttccttaaatagggacctgtatgaatggctccacgagggttcagctgtctcttacttttaaccagtgaaattgacctgcccgtgaagaggcgggcatgacacagcaagacgagaagaccctatggagctttaatttattaatgcaaacagtacctaacaaacccacaggtcctaaactaccaaacctgcattaaaaatttcggttggggcgacctcggagcagaacccaacctccgagcagtacatgctaagacttcaccagtcaaagcgaactactatactcaattgatccaataacttgaccaacggaacaagttaccctagggataacagcgcaatcctattctagagtccatatcaacaatagggtttacgacctcgatgttggatcaggacatcccgatggtgcagccgctattaaaggttcgtttgttcaacgattaaagtcctacgtgatctgagttcagaccggagtaatccaggtcggtttctatctacnttcaaattcctccctgtacgaaaggacaagagaaataaggcctacttcacaaagcgccttcccccgtaaatgatatcatctcaacttagtattatacccacacccacccaagaacagggtttgttaagatggcagagcccggtaatcgcataaaacttaaaactttacagtcagaggttcaattcctcttcttaacaacatacccatggccaacctcctactcctcattgtacccattctaatcgcaatggcattcctaatgcttaccgaacgaaaaattctaggctatatacaactacgcaaaggccccaacgttgtaggcccctacgggctactacaacccttcgctgacgccataaaactcttcaccaaggagcccctaaaacccgccacatctaccatcaccctctacatcaccgccccgaccttagctctcaccatcgctcttctactatgaacccccctccccatacccaaccccctggtcaacctcaacctaggcctcctatttattctagccacctctagcctagccgtttactcaatcctctgatcagggtgagcatcaaactcaaactacgccctgatcggcgcactgcgagcagtagcccaaacaatctcatatgaagtcaccctagccatcattctactatcaacattactaataagtggctcctttaacctctccacccttatcacaacacaagaacacctctgattactcctgccatcatgacccttggccataatatgatttatctccacactagcagagaccaaccgaacccccttcgaccttgccgaaggggagtccgaactagtctcaggcttcaacatcgaatacgccgcaggccccttcgccctattcttcatagccgaatacacaaacattattataataaacaccctcaccactacaatcttcctaggaacaacatatgacgcactctcccctgaactctacacaacatattttgtcaccaagaccctacttctaacctccctgttcttatgaattcgaacagcatacccccgattccgctacgaccaactcatacacctcctatgaaaaaacttcctaccactcaccctagcattacttatatgatatgtctccatacccattacaatctccagcattccccctcaaacctaagaaatatgtctgataaaagagttactttgatagagtaaataataggagcttaaacccccttatttctaggactatgagaatcgaacccatccctgagaatccaaaattctccgtgccacctatcacaccccatcctaaagtaaggtcagctaaataagctatcgggcccataccccgaaaatgttggttatacccttcccgtactaattaatcccctggcccaacccgtcatctactctaccatctttgcaggcacactcatcacagcgctaagctcgcactgattttttacctgagcaggcctagaaataaacatgctagcttttattccagttctaaccaaaaaaataaaccctcgttccacagaagctgccatcaagtatttcctcacgcaagcaaccgcatccataatccttctaatagctatcctcttcaacaatatactctccggacaatgaaccataaccaatactaccaatcaatactcatcattaataatcataatggctatagcaataaaactaggaatagccccctttcacttctgagtcccagaggttacccaaggcacccctctgacatccggcctgcttcttctcacatgacaaaaactagcccccatctcaatcatataccaaatctctccctcactaaacgtaagccttctcctcactctctcaatcttatccatcatagcaggcagttgaggtggattaaaccaaacccagctacgcaaaatcttagcatactcctcaattacccacataggatgaataatagcagttctaccgtacaaccctaacataaccattcttaatttaactatttatattatcctaactactaccgcattcctactactcaacttaaactccagcaccacgaccctactactatctcgcacctgaaacaagctaacatgactaacacccttaattccatccaccctcctctccctaggaggcctgcccccgctaaccggctttttgcccaaatgggccattatcgaagaattcacaaaaaacaatagcctcatcatccccaccatcatagccaccatcaccctccttaacctctacttctacctacgcctaatctactccacctcaatcacactactccccatatctaacaacgtaaaaataaaatgacagtttgaacatacaaaacccaccccattcctccccacactcatcgcccttaccacgctactcctacctatctccccttttatactaataatcttatagaaatttaggttaaatacagaccaagagccttcaaagccctcagtaagttgcaatacttaatttctgtaacagctaaggactgcaaaaccccactctgcatcaactgaacgcaaatcagccactttaattaagctaagcccttactagaccaatgggacttaaacccacaaacacttagttaacagctaagcaccctaatcaactggcttcaatctacttctcccgccgccgggaaaaaaggcgggagaagccccggcaggtttgaagctgcttcttcgaatttgcaattcaatatgaaaatcacctcggagctggtaaaaagaggcctaacccctgtctttagatttacagtccaatgcttcactcagccattttacctcacccccactgatgttcgccgaccgttgactattctctacaaaccacaaagacattggaacactatacctattattcggcgcatgagctggagtcctaggcacagctctaagcctccttattcgagccgagctgggccagccaggcaaccttctaggtaacgaccacatctacaacgttatcgtcacagcccatgcatttgtaataatcttcttcatagtaatacccatcataatcggaggctttggcaactgactagttcccctaataatcggtgcccccgatatggcgtttccccgcataaacaacataagcttctgactcttacctccctctctcctactcctgctcgcatctgctatagtggaggccggagcaggaacaggttgaacagtctaccctcccttagcagggaactactcccaccctggagcctccgtagacctaaccatcttctccttacacctagcaggtgtctcctctatcttaggggccatcaatttcatcacaacaattatcaatataaaaccccctgccataacccaataccaaacgcccctcttcgtctgatccgtcctaatcacagcagtcctacttctcctatctctcccagtcctagctgctggcatcactatactactaacagaccgcaacctcaacaccaccttcttcgaccccgccggaggaggagaccccattctataccaacacctattctgatttttcggtcaccctgaagtttatattcttatcctaccaggcttcggaataatctcccatattgtaacttactactccggaaaaaaagaaccatttggatacataggtatggtctgagctatgatatcaattggcttcctagggtttatcgtgtgagcacaccatatatttacagtaggaatagacgtagacacacgagcatatttcacctccgctaccataatcatcgctatccccaccggcgtcaaagtatttagctgactcgccacactccacggaagcaatatgaaatgatctgctgcagtgctctgagccctaggattcatctttcttttcaccgtaggtggcctgactggcattgtattagcaaactcatcactagacatcgtactacacgacacgtactacgttgtagctcacttccactatgtcctatcaataggagctgtatttgccatcataggaggcttcattcactgatttcccctattctcaggctacaccctagaccaaacctacgccaaaatccatttcactatcatattcatcggcgtaaatctaactttcttcccacaacactttctcggcctatccggaatgccccgacgttactcggactaccccgatgcatacaccacatgaaacatcctatcatctgtaggctcattcatttctctaacagcagtaatattaataattttcatgatttgagaagccttcgcttcgaagcgaaaagtcctaatagtagaagaaccctccataaacctggagtgactatatggatgccccccaccctaccacacattcgaagaacccgtatacataaaatctagacaaaaaaggaaggaatcgaaccccccaaagctggtttcaagccaaccccatggcctccatgactttttcaaaaaggtattagaaaaaccatttcataactttgtcaaagttaaattataggctaaatcctatatatcttaatggcacatgcagcgcaagtaggtctacaagacgctacttcccctatcatagaagagcttatcacctttcatgatcacgccctcataatcattttccttatctgcttcctagtcctgtatgcccttttcctaacactcacaacaaaactaactaatactaacatctcagacgctcaggaaatagaaaccgtctgaactatcctgcccgccatcatcctagtcctcatcgccctcccatccctacgcatcctttacataacagacgaggtcaacgatccctcccttaccatcaaatcaattggccaccaatggtactgaacctacgagtacaccgactacggcggactaatcttcaactcctacatacttcccccattattcctagaaccaggcgacctgcgactccttgacgttgacaatcgagtagtactcccgattgaagcccccattcgtataataattacatcacaagacgtcttgcactcatgagctgtccccacattaggcttaaaaacagatgcaattcccggacgtctaaaccaaaccactttcaccgctacacgaccgggggtatactacggtcaatgctctgaaatctgtggagcaaaccacagtttcatgcccatcgtcctagaattaattcccctaaaaatctttgaaatagggcccgtatttaccctatagcaccccctctaccccctctagagcccactgtaaagctaacttagcattaaccttttaagttaaagattaagagaaccaacacctctttacagtgaaatgccccaactaaatactaccgtatggcccaccataattacccccatactccttacactattcctcatcacccaactaaaaatattaaacacaaactaccacctacctccctcaccaaagcccataaaaataaaaaattataacaaaccctgagaaccaaaatgaacgaaaatctgttcgcttcattcattgcccccacaatcctaggcctacccgccgcagtactgatcattctatttccccctctattgatccccacctccaaatatctcatcaacaaccgactaatcaccacccaacaatgactaatcaaactaacctcaaaacaaatgataaccatacacaacactaaaggacgaacctgatctcttatactagtatccttaatcatttttattgccacaactaacctcctcggactcctgcctcactcatttacaccaaccacccaactatctataaacctagccatggccatccccttatgagcgggcgcagtgattataggctttcgctctaagattaaaaatgccctagcccacttcttaccacaaggcacacctacaccccttatccccatactagttattatcgaaaccatcagcctactcattcaaccaatagccctggccgtacgcctaaccgctaacattactgcaggccacctactcatgcacctaattggaagcaccaccctagcaatatcaaccattaaccttccctctacacttatcatcttcacaattctaattctactgactatcctagaaatcgctgtcgccttaatccaagcctacgttttcacacttctagtaagcctctacctgcacgacaacacataatgacccaccaatcacatgcctatcatatagtaaaacccagcccatgacccctaacaggggccctctcagccctcctaatgacctccggcctagccatgtgatttcacttccactccataacgctcctcatactaggcctactaaccaacacactaaccatataccaatgatggcgcgatgtaacacgagaaagcacataccaaggccaccacacaccacctgtccaaaaaggccttcgatacgggataatcctatttattacctcagaagtttttttcttcgcaggatttttctgagccttttaccactccagcctagcccctaccccccaattaggagggcactggcccccaacaggcatcaccccgctaaatcccctagaagtcccactcctaaacacatccgtattactcgcatcaggagtatcaatcacctgagctcaccatagtctaatagaaaacaaccgaaaccaaataattcaagcactgctcattacaattttactgggcctctattttaccctcctacaagcctcagagtacttcgagtctcccttcaccatttccgacggcatctacggctcaacattttttgtagccacaggcttccacggacttcacgtcattattggctcaactttcctcactatctgcttcatccgccaactaatatttcactttacatccaaacatcactttggcttcgaagccgccgcctgatactggcattttgtagatgtggtttgactatttctgtatgtctccatctattgatgagggtcttactcttttagtataaatagtaccgttaacttccaattaactagttttgacaacattcaaaaaagagtaataaacttcgccttaattttaataatcaacaccctcctagccttactactaataattattacattttgactaccacaactcaacggctacatagaaaaatccaccccttacgagtgcggcttcgaccctatatcccccgcccgcgtccctttctccataaaattcttcttagtagctattaccttcttattatttgatctagaaattgccctccttttacccctaccatgagccctacaaacaactaacctgccactaatagttatgtcatccctcttattaatcatcatcctagccctaagtctggcctatgagtgactacaaaaaggattagactgaaccgaattggtatatagtttaaacaaaacgaatgatttcgactcattaaattatgataatcatatttaccaaatgcccctcatttacataaatattatactagcatttaccatctcacttctaggaatactagtatatcgctcacacctcatgtcctccctactatgcctagaaggaataatactatcgctgttcattatagctactctcataaccctcaacacccactccctcttagccaatattgtgcctattgccatactagtctttgccgcctgcgaagcagcggtgggcctagccctactagtctcaatctccaacacatatggcctagactacgtacataacctaaacctactccaatgctaaaactaatcgtcccaacaattatattactaccactgacatgactttccaaaaaacacataatttgaatcaacacaaccacccacagcctaattattagcatcatccctctactattttttaaccaaatcaacaacaacctatttagctgttccccaaccttttcctccgaccccctaacaacccccctcctaatactaactacctgactcctacccctcacaatcatggcaagccaacgccacttatccagtgaaccactatcacgaaaaaaactctacctctctatactaatctccctacaaatctccttaattataacattcacagccacagaactaatcatattttatatcttcttcgaaaccacacttatccccaccttggctatcatcacccgatgaggcaaccagccagaacgcctgaacgcaggcacatacttcctattctacaccctagtaggctcccttcccctactcatcgcactaatttacactcacaacaccctaggctcactaaacattctactactcaccctcactgcccaagaactatcaaactcctgagccaacaacttaatatgactagcttacacaatagcttttatagtaaagatacctctttacggactccacttatgactccctaaagcccatgtcgaagcccccatcgctgggtcaatagtacttgccgcagtactcttgaaactaggcggctatggtataatacgcctcacactcattctcaaccccctgacaaaacacatagcctaccccttccttgtactatccctatgaggcataattataacaagctccatctgcctacgacaaacagacctaaaatcgctcattgcatactcttcaatcagccacatagccctcgtagtaacagccattctcatccaaaccccctgaagcttcaccggcgcagtcattctcataatcgcccacggacttacatcctcattactattctgcctagcaaactcaaactacgaacgcactcacagtcgcatcataatcctctctcaaggacttcaaactctactcccactaatagctttttgatgacttctagcaagcctcgctaacctcgccttaccccccactattaacctactgggagaactctctgtgctagtaaccacgttctcctgatcaaatatcactctcctacttacaggactcaacatactagtcacagccctatactccctctacatatttaccacaacacaatggggctcactcacccaccacattaacaacataaaaccctcattcacacgagaaaacaccctcatgttcatacacctatcccccattctcctcctatccctcaaccccgacatcattaccgggttttcctcttgtaaatatagtttaaccaaaacatcagattgtgaatctgacaacagaggcttacgaccccttatttaccgagaaagctcacaagaactgctaactcatgcccccatgtctaacaacatggctttctcaacttttaaaggataacagctatccattggtcttaggccccaagaattttggtgcaactccaaataaaagtaataaccatgcacactactataaccaccctaaccctaacttccctaattccccccatccttaccaccctcgttaaccctaacaaaaaaaactcatacccccattatgtaaaatccattgtcgcatccacctttattatcagtctcttccccacaacaatattcatgtgcctagaccaagaagttattatctcgaactgacactgagccacaacccaaacaacccagctctccctaagcttcaaactagactacttctccataatattcatccctgtagcattgttcgttacatggtccatcatagaattctcactgtgatatataaactcagacccaaacattaatcagttcttcaaatatctactcatcttcctaattaccatactaatcttagttaccgctaacaacctattccaactgttcatcggctgagagggcgtaggaattatatccttcttgctcatcagttgatgatacgcccgagcagatgccaacacagcagccattcaagcaatcctatacaaccgtatcggcgatatcggtttcatcctcgccttagcatgatttatcctacactccaactcatgagacccacaacaaatagcccttctaaacgctaatccaagcctcaccccactactaggcctcctcctagcagcagcaggcaaatcagcccaattaggtctccacccctgactcccctcagccatagaaggccccaccccagtctcagccctactccactcaagcactatagttgtagcaggaatcttcttactcatccgcttccaccccctagcagaaaatagcccactaatccaaactctaacactatgcttaggcgctatcaccactctgttcgcagcagtctgcgcccttacacaaaatgacatcaaaaaaatcgtagccttctccacttcaagtcaactaggactcataatagttacaatcggcatcaaccaaccacacctagcattcctgcacatctgtacccacgccttcttcaaagccatactatttatgtgctccgggtccatcatccacaaccttaacaatgaacaagatattcgaaaaataggaggactactcaaaaccatacctctcacttcaacctccctcaccattggcagcctagcattagcaggaatacctttcctcacaggtttctactccaaagaccacatcatcgaaaccgcaaacatatcatacacaaacgcctgagccctatctattactctcatcgctacctccctgacaagcgcctatagcactcgaataattcttctcaccctaacaggtcaacctcgcttccccacccttactaacattaacgaaaataaccccaccctactaaaccccattaaacgcctggcagccggaagcctattcgcaggatttctcattactaacaacatttcccccgcatcccccttccaaacaacaatccccctctacctaaaactcacagccctcgctgtcactttcctaggacttctaacagccctagacctcaactacctaaccaacaaacttaaaataaaatccccactatgcacattttatttctccaacatactcggattctaccctagcatcacacaccgcacaatcccctatctaggccttcttacgagccaaaacctgcccctactcctcctagacctaacctgactagaaaagctattacctaaaacaatttcacagcaccaaatctccacctccatcatcacctcaacccaaaaaggcataattaaactttacttcctctctttcttcttcccactcatcctaaccctactcctaatcacataacctattcccccgagcaatttcaattacaatatatacaccaacaaacaatgttcaaccagtaactactactaatcaacgcccataatcatacaaagcccccgcaccaataggatcctcccgaatcaaccctgacccctctccttcataaattattcagcttcctacactattaaagtttaccacaaccaccaccccatcatactctttcacccacagcaccaatcctacctccatcgctaaccccactaaaacactcaccaagacctcaacccctgacccccatgcctcaggatactcctcaatagccatcgctgtagtatatccaaagacaaccatcattccccctaaataaattaaaaaaactattaaacccatataacctcccccaaaattcagaataataacacacccgaccacaccgctaacaatcaatactaaacccccataaataggagaaggcttagaagaaaaccccacaaaccccattactaaacccacactcaacagaaacaaagcatacatcattattctcgcacggactacaaccacgaccaatgatatgaaaaaccatcgttgtatttcaactacaagaacaccaatgaccccaatacgcaaaattaaccccctaataaaattaattaaccactcactcatcgacctccccaccccatccaacatctccgcatgatgaaacttcggctcactccttggcgcctgcctgatcctccaaatcaccacaggactattcctagccatgcactactcaccagacgcctcaaccgccttttcatcaatcgcccacatcactcgagacgtaaattatggctgaatcatccgctaccttcacgccaatggcgcctcaatattctttatctgcctcttcctacacatcgggcgaggcctatattacggatcatttctctactcagaaacctgaaacatcggcattatcctcctgcttgcaactatagcaacagccttcataggctatgtcctcccgtgaggccaaatatcattctgaggggccacagtaattacaaacttactatccgccatcccatacattgggacagacctagttcaatgaatctgaggaggctactcagtagacagtcccaccctcacacgattctttacctttcacttcatcttgcccttcattattgcagccctagcagcactccacctcctattcttgcacgaaacgggatcaaacaaccccctaggaatcacctcccattccgataaaatcaccttccacccttactacacaatcaaagacgccctcggcttacttctcttccttctctccttaatgacattaacactattctcaccagacctcctaggcgacccagacaattataccctagccaaccccttaaacacccctccccacatcaagcccgaatgatatttcctattcgcctacacaattctccgatccgtccctaacaaactaggaggcgtccttgccctattactatccatcctcatcctagcaataatccccatcctccatatatccaaacaacaaagcataatatttcgcccactaagccaatcactttattgactcctagccgcagacctcctcattctaacctgaatcggaggacaaccagtaagctacccttttaccatcattggacaagtagcatccgtactatacttcacaacaatcctaatcctaataccaactatctccctaattgaaaacaaaatactcaaatgggcctgtccttgtagtataaactaatacaccagtcttgtaaaccggagatgaaaacctttttccaaggacaaatcagagaaaaagtctttaactccaccattagcacccaaagctaagattctaatttaaactattctctgttctttcatggggaagcagatttgggtaccacccaagtattgactcacccatcaacaaccgctatgtatttcgtacattactgccagccaccatgaatattgtacggtaccataaatacttgaccacctgtagtacataaaaacccaatccacatcaaaaccccctccccatgcttacaagcaagtacagcaatcaacccccaactatcacacatcaactgcaactccaaagccacccctcacccactaggataccaacaaacctacccacccttaacagtacatagcacataaagccatttaccgtacatagcacattacagtcaaatcccttctcgtccccatggatgacccccctcagataggggtcccttgaccaccatcctccgtgaaatcaatatcccgcacaagagtgctactctcctcgctccgggcccataacacttgggggtagctaaagtgaactgtatccgacatctggttcctacttcagggccataaagcctaaatagcccacacgttccccttaaataagacatcacgatg

SEQ ID NO: 53 - DNA, 16572 bp, Homo sapiens mitochondrial
  3110: "n" refers to a nucleotide at position 3107 of the Cambridge Reference Sequence (CRS, Anderson et al. 1981 Nature 290:457-465), later determined to be absent from the human mtDNA sequence according to the revised CRS (rCRS, Andrews et al. 1999 Nature Genetics 23:147); "n" therefore represents a single nucleotide deletion at a position corresponding to nucleotide 3107 of SEQ ID NO:1 as provided herein.
gatcacaggtctatcaccctattaaccactcacgggagctctccatgcatttggtattttcgtctggggggtgtgcacgcgatagcattgcgagacgctggagccggagcaccctatgtcgcagtatctgtctttgattcctgcctcattctattatttatcgcacctacgttcaatattacaggcgaacatacttactaaagtgtgttaattaattaatgcttgtaggacataataataacaattgaatgtctgcacagccgctttccacacagacatcataacaaaaaatttccaccaaaccccccctcccccgccttctggccacagcacttaaacacatctctgccaaaccccaaaaacaaagaaccctaacaccagcctaaccagatttcaaattttatcttttggcggtatgcacttttaacagtcaccccccaactaacacattattttcccctcccactcccatactactaatctcatcaatacaacccccgcccatcctacccagcacacacacaccacgctgctaaccccataccccgaaccaaccaaaccccaaagacaccccccacagtttatgtagcttacctcctcaaagcaatacactgaaaatgtttagacgggctcacatcaccccataaacaaataggtttggtcctagcctttctattagctcttagtaagattacacatgcaagcatccccgttccagtgagttccccctctaaatcaccacgatcaaaagggacaagcatcaagcacgcagcaatgcagctcaaaacgcttagcctagccacacccccacgggaaacagcagtgattaacctttagcaataaacgaaagtttaactaagctatactaaccccagggttggtcaatttcgtgccagccaccgcggtcacacgattaacccaagtcaatagaagccggcgtaaagagtgttttagatcaccccctccccaataaagctaaaactcacctgagttgtaaaaaactccagttgacacaaaatagactacgaaagtggctttaacatatctgaacacacaatagctaagacccaaactgggattagataccccactatgcttagccctaaacctcaacagttaaatcaacaaaactgctcgccagaacactacgagccacagcttaaaactcaaaggacctggcggtgcttcatatccctctagaggagcctgttctgtaatcgataaaccccgatcaacctcaccacctcttgctcagcctatataccgccatcttcagcaaaccctgatgaaggctacaaagtaagcgcaagtacccacgtaaagacgttaggtcaaggtgtagcccatgaggtggcaagaaatgggctacattttctaccccagaaaactacgatagcccttatgaaacttaagggtcgaaggtggatttagcagtaaactgagagtagagtgcttagttgaacagggccctgaagcgcgtacacaccgcccgtcaccctcctcaagtatacttcaaaggacatttaactaaaacccctacgcatttatatagaggagacaagtcgtaacatggtaagtgtactggaaagtgcacttggacgaaccagagtgtagcttaacacaaagcacccaacttacacttaggagatttcaacttaacttgaccgctctgagctaaacctagccccaaacccactccaccttactaccagacaaccttagccaaaccatttacccaaataaagtataggcgatagaaattgaaacctggcgcaatagatatagtaccgcaagggaaagatgaaaaattatagccaagcataatatagcaaggactaacccctataccttctgcataatgaattaactagaaataactttgcaaggagagccaaagctaagacccccgaaaccagacgagctacctaagaacagctaaaagagcacacccgtctatgtagcaaaatagtgggaagatttataggtagaggcgacaaacctaccgagcctggtgatagctggttgtccaagatagaatcttagttcaactttaaatttgcccacagaaccctctaaatccccttgtaaatttaactgttagtccaaagaggaacagctctttggacactaggaaaaaaccttgtagagagagtaaaaaatttaacacccatagtaggcctaaaagcagccaccaattaagaaagcgttcaagctcaacacccactacctaaaaaatcccaaacatataactgaactcctcacacccaattggaccaatctatcaccctatagaagagctaatgttagtataagtaacatgaaaacattctcctccgcataagcctgcgtcagattaaaacactgaactgacaattaacagcccaatatctacaatcaaccaacaagtcattattaccctcactgtcaacccaacacaggcatgctcataaggaaaggttaaaaaaagtaaaaggaactcggcaaatcttaccccgcctgtttaccaaaaacatcacctctagcatcaccagtattagaggcaccgcctgcccagtgacacatgtttaacggccgcggtaccctaaccgtgcaaaggtagcataatcacttgttccttaaatagggacctgtatgaatggctccacgagggttcagctgtctcttacttttaaccagtgaaattgacctgcccgtgaagaggcgggcatgacacagcaagacgagaagaccctatggagctttaatttattaatgcaaacagtacctaacaaacccacaggtcctaaactaccaaacctgcattaaaaatttcggttggggcgacctcggagcagaacccaacctccgagcagtacatgctaagacttcaccagtcaaagcgaactactatactcaattgatccaataacttgaccaacggaacaagttaccctagggataacagcgcaatcctattctagagtccatatcaacaatagggtttacgacctcgatgttggatcaggacatcccaatggtgcagccgctattaaaggttcgtttgttcaacgattaaagtcctacgtgatctgagttcagaccggagtaatccaggtcggtttctatctacnttcaaattcctccctgtacgaaaggacaagagaaataaggcctacttcacaaagcgccttcccccgtaaatgatatcatctcaacttagtattatacccacacccacccaagaacagggtttgttaagatggcagagcccggtaatcgcataaaacttaaaactttacagtcagaggttcaattcctcttcttaacaacatacccatggccaacctcctactcctcattgtacccattctaatcgcaatggcattcctaatgcttaccgaacgaaaaattctaggctatatacaactacgcaaaggccccaacgttgtaggcccctacgggctactacaacccttcgctgacgccataaaactcttcaccaaagagcccctaaaacccgccacatctaccatcaccctctacatcaccgccccgaccttagctctcaccatcgctcttctactatgaacccccctccccatacccaaccccctggtcaacctcaacctaggcctcctatttattctagccacctctagcctagccgtttactcaatcctctgatcagggtgagcatcaaactcaaactacgccctgatcggcgcactgcgagcagtagcccaaacaatctcatatgaagtcaccctagccatcattctactatcaacattactaataagtggctcctttaacctctccacccttatcacaacacaagaacacctctgattactcctgccatcatgacccttggccataatatgatttatctccacactagcagagaccaaccgaacccccttcgaccttgccgaaggggagtccgaactagtctcaggcttcaacatcgaatacgccgcaggccccttcgccctattcttcatagccgaatacacaaacattattataataaacaccctcaccactacaatcttcctaggaacaacatatgacgcactctcccctgaactctacacaacatattttgtcaccaagaccctacttctaacctccctgttcttatgaattcgaacagcatacccccgattccgctacgaccaactcatacacctcctatgaaaaaacttcctaccactcaccctagcattacttatatgatatgtctccatacccattacaatctccagcattccccctcaaacctaagaaatatgtctgataaaagagttactttgatagagtaaataataggagcttaaacccccttatttctaggactatgagaatcgaacccatccctgagaatccaaaattctccgtgccacctatcacaccccatcctaaagtaaggtcagctaaataagctatcgggcccataccccgaaaatgttggttatacccttcccgtactaattaatcccctggcccaacccgtcatctactctaccatctttgcaggcacactcatcacagcgctaagctcgcactgattttttacctgagtaggcctagaaataaacatgctagcttttattccagttctaaccaaaaaaataaaccctcgttccacagaagctgccatcaagtatttcctcacgcaagcaaccgcatccataatccttctaatagctatcctcttcaacaacatactctccggacaatgaaccataaccaatactaccaatcaatactcatcattaataatcataatggctatagcaataaaactaggaatagccccctttcacttctgagtcccagaggttacccaaggcacccctctgacatccggcctgcttcttctcacatgacaaaaactagcccccatctcaatcatataccaaatctctccctcactaaacgtaagccttctcctcactctctcaatcttatccatcatagcaggcagttgaggtggattaaaccaaacccagctacgcaaaatcttagcatactcctcaattacccacataggatgaataatagcagttctaccgtacaaccctaacataaccattcttaatttaactatttatattatcctaactactaccgcattcctactactcaacttaaactccagcaccacgaccctactactatctcgcacctgaaacaagctaacatgactaacacccttaattccatccaccctcctctccctaggaggcctgcccccgctaaccggctttttgcccaaatgggccattatcgaagaattcacaaaaaacaatagcctcatcatccccaccatcatagccaccatcaccctccttaacctctacttctacctacgcctaatctactccacctcaatcacactactccccatatctaacaacgtaaaaataaaatgacagtttgaacatacaaaacccaccccattcctccccacactcatcgcccttaccacgctactcctacctatctccccttttatactaataatcttatagaaatttaggttaaatacagaccaagagccttcaaagccctcagtaagttgcaatacttaatttctgtaacagctaaggactgcaaaaccccactctgcatcaactgaacgcaaatcagccactttaattaagctaagcccttactagaccaatgggacttaaacccacaaacacttagttaacagctaagcaccctaatcaactggcttcaatctacttctcccgccgccgggaaaaaaggcgggagaagccccggcaggtttgaagctgcttcttcgaatttgcaattcaatatgaaaatcacctcggagctggtaaaaagaggcctaacccctgtctttagatttacagtccaatgcttcactcagccattttacctcacccccactgatgttcgccgaccgttgactattctctacaaaccacaaagacattggaacactatacctattattcggcgcatgagctggagtcctaggcacagctctaagcctccttattcgagccgagctgggccagccaggcaaccttctaggtaacgaccacatctacaacgttatcgtcacagcccatgcatttgtaataatcttcttcatagtaatacccatcataatcggaggctttggcaactgactagttcccctaataatcggtgcccccgatatggcgtttccccgcataaacaacataagcttctgactcttacctccctctctcctactcctgctcgcatctgctatagtggaggccggagcaggaacaggttgaacagtctaccctcccttagcagggaactactcccaccctggagcctccgtagacctaaccatcttctccttacacctagcaggtgtctcctctatcttaggggccatcaatttcatcacaacaattatcaatataaaaccccctgccataacccaataccaaacgcccctcttcgtctgatccgtcctaatcacagcagtcctacttctcctatctctcccagtcctagctgctggcatcactatactactaacagaccgcaacctcaacaccaccttcttcgaccccgccggaggaggagaccccattctataccaacacctattctgatttttcggtcaccctgaagtttatattcttatcctaccaggcttcggaataatctcccatattgtaacttactactccggaaaaaaagaaccatttggatacataggtatggtctgagctatgatatcaattggcttcctagggtttatcgtgtgagcacaccatatatttacagtaggaatagacgtagacacacgagcatatttcacctccgctaccataatcatcgctatccccaccggcgtcaaagtatttagctgactcgccacactccacggaagcaatatgaaatgatctgctgcagtgctctgagccctaggattcatctttcttttcaccgtaggtggcctgactggcattgtattagcaaactcatcactagacatcgtactacacgacacgtactacgttgtagctcacttccactatgtcctatcaataggagctgtatttgccatcataggaggcttcattcactgatttcccctattctcaggctacaccctagaccaaacctacgccaaaatccatttcactatcatattcatcggcgtaaatctaactttcttcccacaacactttctcggcctatccggaatgccccgacgttactcggactaccccgatgcatacaccacatgaaacatcctatcatctgtaggctcattcatttctctaacagcagtaatattaataattttcatgatttgagaagccttcgcttcgaagcgaaaagtcctaatagtagaagaaccctccataaacctggagtgactatatggatgccccccaccctaccacacattcgaagaacccgtatacataaaatctagacaaaaaaggaaggaatcgaaccccccaaagctggtttcaagccaaccccatggcctccatgactttttcaaaaaggtattagaaaaaccatttcataactttgtcaaagttaaattataggctaaatcctatatatcttaatggcacatgcagcgcaagtaggtctacaagacgctacttcccctatcatagaagagcttatcacctttcatgatcacgccctcataatcattttccttatctgcttcctagtcctgtatgcccttttcctaacactcacaacaaaactaactaatactaacatctcagacgctcaggaaatagaaaccgtctgaactatcctgcccgccatcatcctagtcctcatcgccctcccatccctacgcatcctttacataacagacgaggtcaacgatccctcccttaccatcaaatcaattggccaccaatggtactgaacctacgagtacaccgactacggcggactaatcttcaactcctacatacttcccccattattcctagaaccaggcgacctgcgactccttgacgttgacaatcgagtagtactcccgattgaagcccccattcgtataataattacatcacaagacgtcttgcactcatgagctgtccccacattaggcttaaaaacagatgcaattcccggacgtctaaaccaaaccactttcaccgctacacgaccgggggtatactacggtcaatgctctgaaatctgtggagcaaaccacagtttcatgcccatcgtcctagaattaattcccctaaaaatctttgaaatagggcccgtatttaccctatagcaccccctctaccccctctagagcccactgtaaagctaacttagcattaaccttttaagttaaagattaagagaaccaacacctctttacagtgaaatgccccaactaaatactaccgtatggcccaccataattacccccatactccttacactattcctcatcacccaactaaaaatattaaacacaaactaccacctacctccctcaccaaagcccataaaaataaaaaattataacaaaccctgagaaccaaaatgaacgaaaatctgttcgcttcattcattgcccccacaatcctaggcctacccgccgcagtactgatcattctatttccccctctattgatccccacctccaaatatctcatcaacaaccgactaatcaccacccaacaatgactaatcaaactaacctcaaaacaaatgataaccatacacaacactaaaggacgaacctgatctcttatactagtatccttaatcatttttattgccacaactaacctcctcggactcctgcctcactcatttacaccaaccacccaactatctataaacctagccatggccatccccttatgagcgggcgcagtgattataggctttcgctctaagattaaaaatgccctagcccacttcttaccacaaggcacacctacaccccttatccccatactagttattatcgaaaccatcagcctactcattcaaccaatagccctggccgtacgcctaaccgctaacattactgcaggccacctactcatgcacctaattggaagcgccaccctagcaatatcaaccattaaccttccctctacacttatcatcttcacaattctaattctactgactatcctagaaatcgctgtcgccttaatccaagcctacgttttcacacttctagtaagcctctacctgcacgacaacacataatgacccaccaatcacatgcctatcatatagtaaaacccagcccatgacccctaacaggagccctctcagccctcctaatgacctccggcctagccatgtgatttcacttccactccataacgctcctcatactaggcctactaaccaacacactaaccatataccaatgatggcgcgatgtaacacgagaaagcacataccaaggccaccacacaccacctgtccaaaaaggccttcgatacgggataatcctatttattacctcagaagtttttttcttcgcaggatttttctgagccttttaccactccagcctagcccctaccccccaattaggagggcactggcccccaacaggcatcaccccgctaaatcccctagaagtcccactcctaaacacatccgtattactcgcatcaggagtatcaatcacctgagctcaccatagtctaatagaaaacaaccgaaaccaaataattcaagcactgcttattacaattttactgggtctctattttaccctcctacaagcctcagagtacttcgagtctcccttcaccatttccgacggcatctacggctcaacattttttgtagccacaggcttccacggacttcacgtcattattggctcaactttcctcactatctgcttcatccgccaactaatatttcactttacatccaaacatcactttggcttcgaagccgccgcctgatactggcattttgtagatgtggtttgactatttctgtatgtctccatctattgatgagggtcttactcttttagtataaatagtaccgttaacttccaattaactagttttgacaacattcaaaaaagagtaataaacttcgccttaattttaataatcaacaccctcctagccttactactaataattattacattttgactaccacaactcaacggctacatagaaaaatccaccccttacgagtgcggcttcgaccctatatcccccgcccgcgtccctttctccataaaattcttcttagtagctattaccttcttattatttgatctagaaattgccctccttttacccctaccatgagccctacaaacaactaacctgccactaatagttatgtcatccctcttattaatcatcatcctagccctaagtctggcctatgagtgactacaaaaaggattagactgaaccgaattggtatatagtttaaacaaaacgaatgatttcgactcattaaattatgataatcatatttaccaaatgcccctcatttacataaatattatactagcatttgccatctcacttctaggaatactagtatatcgctcacacctcatatcctccctactatgcctagaaggaataatactatcgctgttcattatagctactctcataaccctcaacacccactccctcttagccaatattgtgcctattgccatactagtctttgccgcctgcgaagcagcggtgggcctagccctactagtctcaatctccaacacatatggcctagactacgtacataacctaaacctactccaatgctaaaactaatcgtcccaacaattatattactaccactgacatgactttccaaaaaacacataatttgaatcaacacaaccacccacagcctaattattagcatcatccctctactattttttaaccaaatcaacaacaacctatttagctgttccccaaccttttcctccgaccccctaacaacccccctcctaatactaactacctgactcctacccctcacaatcatggcaagccaacgccacttatccagtgaaccactatcacgaaaaaaactctacctctctatactaatctccctacaaatctccttaattataacattcacagccacagaactaatcatattttatatcttcttcgaaaccacacttatccccaccttggctatcatcacccgatgaggcaaccagccagaacgcctgaacgcaggcacatacttcctattctacaccctagtaggctcccttcccctactcatcgcactaatttacactcacaacaccctaggctcactaaacattctactactcactctcactgcccaagaactatcaaactcctgagccaacaacttaatatgactagcttacacaatagcttttatagtaaagatacctctttacggactccacttatgactccctaaagcccatgtcgaagcccccatcgctgggtcaatagtacttgccgcagtactcttgaaactaggcggctatggtataatacgcctcacactcattctcaaccccctgacaaaacacatagcctaccccttccttgtactatccctatgaggcataattataacaagctccatctgcctacgacaaacagacctaaaatcgctcattgcatactcttcaatcagccacatagccctcgtagtaacagccattctcatccaaaccccctgaagcttcaccggcgcagtcattctcataatcgcccacggacttacatcctcattactattctgcctagcaaactcaaactacgaacgcactcacagtcgcatcataatcctctctcaaggacttcaaactctactcccactaatagctttttgatgacttctagcaagcctcgctaacctcgccttaccccccactattaacctactgggagaactctctgtgctagtaaccacgttctcctgatcaaatatcactctcctacttacaggactcaacatactagtcacagccctatactccctctacatatttaccacaacacaatggggctcactcacccaccacattaacaacataaaaccctcattcacacgagaaaacaccctcatgttcatacacctatcccccattctcctcctatccctcaaccccgacatcattaccgggttttcctcttgtaaatatagtttaaccaaaacatcagattgtgaatctgacaacagaggcttacgaccccttatttaccgagaaagctcacaagaactgctaactcatgcccccatgtctaacaacatggctttctcaacttttaaaggataacagctatccattggtcttaggccccaagaattttggtgcaactccaaataaaagtaataaccatgcacactactataaccaccctaaccctaacttccctaattccccccatccttaccaccctcgttaaccctaacaaaaaaaactcatacccccattatgtaaaatccattgtcgcatccacctttattatcagtctcttccccacaacaatattcatgtgcctagaccaagaagttattatctcgaactgacactgagccacaacccaaacaacccagctctccctaagcttcaaactagactacttctccataatattcatccctgtagcattgttcgttacatggtccatcatagaattctcactgtgatatataaactcagacccaaacattaatcagttcttcaaatatctactcatcttcctaattaccatactaatcttagttaccgctaacaacctattccaactgttcatcggctgagagggcgtaggaattatatccttcttgctcatcagttgatgatacgcccgagcagatgccaacacagcagccattcaagcaatcctatacaaccgtatcggcgatatcggtttcatcctcgccttagcatgatttatcctacactccaactcatgagacccacaacaaatagcccttctaaacgctaatccaagcctcaccccactactaggcctcctcctagcagcagcaggcaaatcagcccaattaggtctccacccctgactcccctcagccatagaaggccccaccccagtctcagccctactccactcaagcactatagttgtagcaggaatcttcttactcatccgcttccaccccctagcagaaaatagcccactaatccaaactctaacactatgcttaggcgctatcaccactctgttcgcagcagtctgcgcccttacacaaaatgacatcaaaaaaatcgtagccttctccacttcaagtcaactaggactcataatagttacaatcggcatcaaccaaccacacctagcattcctgcacatctgtacccacgccttcttcaaagccatactatttatgtgctccgggtccatcatccacaaccttaacaatgaacaagatattcgaaaaataggaggactactcaaaaccatacctctcacttcaacctccctcaccattggcagcctagcattagcaggaatacctttcctcacaggtttctactccaaagaccacatcatcgaaaccgcaaacatatcatacacaaacgcctgagccctatctattactctcatcgctacctccctgacaagcgcctatagcactcgaataattcttctcaccctaacaggtcaacctcgcttccccacccttactaacattaacgaaaataaccccaccctactaaaccccattaaacgcctggcagccggaagcctattcgcaggatttctcattactaacaacatttcccccgcatcccccttccaaacaacaatccccctctacctaaaactcacagccctcgctgtcactttcctaggacttctaacagccctagacctcaactacctaaccaacaaacttaaaataaaatccccactatgcacattttatttctccaacatactcggattctaccctagcatcatacaccgcacaatcccctatctaggccttcttacgagccaaaacctgcccctactcctcctagacctaacctgactagaaaagctattacctaaaacaatttcacagcaccaaatctccacctccatcatcacctcaacccaaaaaggcataattaaactttacttcctctctttcttcttcccactcatcctaaccctactcctgatcacataacctattcccccgagcaatctcaattacaatatatacaccaacaaacaatgttcaaccagtaactactactaatcaacgcccataatcatacaaagcccccgcaccaataggatcctcccgaatcaaccctgacccctctccttcataaattattcagcttcctacactattaaagtttaccacaaccaccaccccatcatactctttcacccacagcaccaatcctacctccatcgctaaccccactaaaacactcaccaagacctcaacccctgacccccatgcctcaggatactcctcaatagccatcgctgtagtatatccaaagacaaccatcattccccctaaataaattaaaaaaactattaaacccatataacctcccccaaaattcagaataataacacacccgaccacaccgctaacaatcaatactaaacccccataaataggagaaggcttagaagaaaaccccacaaaccccattactaaacccacactcaacagaaacaaagcatacatcattattctcgcacggactacaaccacgaccaatgatatgaaaaaccatcgttgtatttcaactacaagaacaccaatgaccccaatacgcaaaattaaccccctaataaaattaattaaccactcattcatcgacctccccaccccatccaacatctccgcatgatgaaacttcggctcactccttggcgcctgcctgatcctccaaatcaccacaggactattcctagccatgcactactcaccagacgcctcaaccgccttttcatcaatcgcccacatcactcgagacgtaaattatggctgaatcatccgctaccttcacgccaatggcgcctcaatattctttatctgcctcttcctacacatcgggcgaggcctatattacggatcatttctctactcagaaacctgaaacatcggcattatcctcctgcttgcaactatagcaacagccttcataggctatgtcctcccgtgaggccaaatatcattctgaggggccacagtaattacaaacttactatccgccatcccatacattgggacagacctagttcaatgaatctgaggaggctactcagtagacagtcccaccctcacacgattctttacctttcacttcatcttgcccttcattattgcagccctagcagcactccacctcctattcttgcacgaaacgggatcaaacaaccccctaggaatcacctcccattccgataaaatcaccttccacccttactacacaatcaaagacgccctcggcttacttctcttcctcctctccttaatgacattaacactattctcaccagacctcctaggcgacccagacaattataccctagccaaccccttaaacacccctccccacatcaagcccgaatgatatttcctattcgcctacacaattctccgatccgtccctaacaaactaggaggcgtccttgccctattactatccatcctcatcctagcaataatccccatcctccatatatccaaacaacaaagcataatatttcgcccactaagccaatcactttattgactcctagccgcagacctcctcattctaacctgaatcggaggacaaccagtaagctacccttttaccatcattggacaagtagcatccgtactatacttcacaacaatcctaatcctaataccaactatctccctaattgaaaacaaaatactcaaatgggcctgtccttgtagtataaactaatacaccagtcttgtaaaccggagatgaaaacctttttccaaggacaaatcagagaaaaagtctttaactccaccattagcacccaaagctaagattctaatttaaactattctctgttctttcatggggaagcagatttgggtaccacccaagtattgactcacccatcaacaaccgctatgtatttcgtacattactgccagccaccatgaatattgtacggtaccataaatacttgaccacctgtagtacataaaaacccaatccacatcaaaaccccctccccatgcttacaagcaagtacagcaatcaaccctcaactatcacacatcaactgcaactccaaagccacccctcacccactaggataccaacaaacctacccacccttaacagtacatagtacataaagccatttaccgtacatagcacattgcagtcaaatcccttctcgtccccatggatgacccccctcagataggagtcccttgaccaccatcctccgtgaaatcaatatcccgcacaagagtgctactctcctcgctccgggcccataacacttgggggtagctaaagtgaactgtatccgacatctggttcctacttcagggccataaagcctaaatagcccacacgttccccttaaataagacatcacgatg

SEQ ID NO: 54 - DNA, 16572 bp, Homo sapiens mitochondrial
  3110: "n" refers to a nucleotide at position 3107 of the Cambridge Reference Sequence (CRS, Anderson et al. 1981 Nature 290:457-465), later determined to be absent from the human mtDNA sequence according to the revised CRS (rCRS, Andrews et al. 1999 Nature Genetics 23:147); "n" therefore represents a single nucleotide deletion at a position corresponding to nucleotide 3107 of SEQ ID NO:1 as provided herein.
gatcacaggtctatcaccctattaaccactcacgggagctctccatgcatttggtattttcgtctggggggtatgcacgcgatagcattgcgagacgctggagccggagcaccctatgtcgcagtatctgtctttgattcctgcctcatcctattatttatcgcacctacgttcaatattacaggcgaacatacttactaaagtgtgttaattaattaatgcttgtaggacataataataacaattgaatgtctgcacagccgctttccacacagacatcataacaaaaaatttccaccaaaccccccctccccccccgcttctggccacagcacttaaacacatctctgccaaaccccaaaaacaaagaaccctaacaccagcctaaccagatttcaaattttatcttttggcggtatgcacttttaacagtcaccccccaactaacacattattttcccctcccactcccatactactaatctcatcaatacaacccccgcccatcctacccagcacacacacaccgctgctaaccccataccccgaaccaaccaaaccccaaagacaccccccacagtttatgtagcttacctcctcaaagcaatacactgaaaatgtttagacgggctcacatcaccccataaacaaataggtttggtcctagcctttctattagctcttagtaagattacacatgcaagcatccccgttccagtgagttcaccctctaaatcaccacgatcaaaagggacaagcatcaagcacgcagcaatgcagctcaaaacgcttagcctagccacacccccacgggaaacagcagtgattaacctttagcaataaacgaaagtttaactaagctatactaaccccagggttggtcaatttcgtgccagccaccgcggtcacacgattaacccaagtcaatagaagccggcgtaaagagtgttttagatcaccccctccccaataaagctaaaactcacctgagttgtaaaaaactccagttgacacaaaatagactacgaaagtggctttaacatatctgaacacacaatagctaagacccaaactgggattagataccccactatgcttagccctaaacctcaacagttaaatcaacaaaactgctcgccagaacactacgagccacagcttaaaactcaaaggacctggcggtgcttcatatccctctagaggagcctgttctgtaatcgataaaccccgatcaacctcaccacctcttgctcagcctatataccgccatcttcagcaaaccctgatgaaggctacaaagtaagcgcaagtacccacgtaaagacgttaggtcaaggtgtagcccatgaggtggcaagaaatgggctacattttctaccccagaaaactacgatagcccttatgaaacttaagggtcgaaggtggatttagcagtaaactaagagtagagtgcttagttgaacagggccctgaagcgcgtacacaccgcccgtcaccctcctcaagtatacttcaaaggacatttaactaaaacccctacgcatttatatagaggagacaagtcgtaacatggtaagtgtactggaaagtgcacttggacgaaccagagtgtagcttaacacaaagcacccaacttacacttaggagatttcaacttaacttgaccgctctgagctaaacctagccccaaacccactccaccttactaccagacaaccttagccaaaccatttacccaaataaagtataggcgatagaaattgaaacctggcgcaatagatatagtaccgcaagggaaagatgaaaaattataaccaagcataatatagcaaggactaacccctataccttctgcataatgaattaactagaaataactttgcaaggagagccaaagctaagacccccgaaaccagacgagctacctaagaacagctaaaagagcacacccgtctatgtagcaaaatagtgggaagatttataggtagaggcgacaaacctaccgagcctggtgatagctggttgtccaagatagaatcttagttcaactttaaatttgcccacagaaccctctaaatccccttgtaaatttaactgttagtccaaagaggaacagctctttggacactaggaaaaaaccttgtagagagagtaaaaaatttaacacccatagtaggcctaaaagcagccaccaattaagaaagcgttcaagctcaacacccactacctaaaaaatcccaaacatataactgaactcctcacacccaattggaccaatctatcaccctatagaagaactaatgttagtataagtaacatgaaaacattctcctccgcataagcctgcgtcagattaaaacactgaactgacaattaacagcccaatatctacaatcaaccaacaagtcattattaccctcactgtcaacccaacacaggcatgctcataaggaaaggttaaaaaaagtaaaaggaactcggcaaatcttaccccgcctgtttaccaaaaacatcacctctagcatcaccagtattagaggcaccgcctgcccagtgacacatgtttaacggccgcggtaccctgaccgtgcaaaggtagcataatcacttgttccttaaatagggacctgtatgaatggctccacgagggttcagctgtctcttacttttaaccagtgaaattgacctgcccgtgaagaggcgggcataacacagcaagacgagaagaccctatggagctttaatttattaatgcaaacagtacctaacaaacccacaggtcctaaactaccaaacctgcattaaaaatttcggttggggcgacctcggagcagaacccaacctccgagcagtacatgctaagacttcaccagtcaaagcgaactactatactcaattgatccaataacttgaccaacggaacaagttaccctagggataacagcgcaatcctattctagagtccatatcaacaatagggtttacgacctcgatgttggatcaggacatcccgatggtgcagccgctattaaaggttcgtttgttcaacgattaaagtcctacgtgatctgagttcagaccggagtaatccaggtcggtttctatctacnttcaaattcctccctgtacgaaaggacaagagaaataaggcctacttcacaaagcgccttcccccgtaaatgatatcatctcaacttagtattatacccacacccacccaagaacagggtttgttaagatggcagagcccggtaatcgcataaaacttaaaactttacagtcagaggttcaattcctcttcttaacaacatacccatggccaacctcctactcctcattgtacccattctaatcgcaatggcattcctaatgcttaccgaacgaaaaattctaggctatatacaactacgcaaaggccccaacgttgtaggcccctacgggctactacaacccttcgctgacgccataaaactcttcaccaaagagcccctaaaacccgccacatctaccatcaccctctacatcaccgccccgaccttagctctcaccatcgctcttctactatgaacccccctccccatacccaaccccctggtcaacctcaacctaggcctcctatttattctagccacctctagcctagccgtttactcaatcctctgatcagggtgagcatcaaactcaaactacgccctgatcggcgcactgcgagcagtagcccaaacaatctcatatgaagtcaccctagccatcattctactatcaacattactaataagtggctcctttaacctctccacccttatcacaacacaagaacacctctgattactcctgccatcatgacccttggccataatatgatttatctccacactagcagagaccaaccgaacccccttcgaccttgccgaaggggagtccgaactagtctcaggcttcaacatcgaatacgccgcaggccccttcgccctattcttcatagccgaatacacaaacattattataataaacaccctcaccactacaatcttcctaggaacaacatatgacgcactctcccctgaactctacacaacatattttgtcaccaagaccctacttctaacctccctgttcttatgaattcgaacagcatacccccgattccgctacgaccaactcatacacctcctatgaaaaaacttcctaccactcaccctagcattacttatatgatatgtctccatacccattacaatctccagcattccccctcaaacctaagaaatatgtctgataaaagagttactttgatagagtaaataataggagcttaaacccccttatttctaggactatgagaatcgaacccatccctgagaatccaaaattctccgtgccacctatcacaccccatcctaaagtaaggtcagctaaataagctatcgggcccataccccgaaaatgttggttatacccttcccgtactaattaatcccctggcccaacccgtcatctactctaccatctttgcaggcacactcatcacagcgctaagctcgcactgattttttacctgagtaggcctagaaataaacatgctagcttttattccagttctaaccaaaaaaataaaccctcgttccacagaagctgccatcaagtatttcctcacgcaagcaaccgcatccataatccttctaatagctatcctcttcaacaatatactctccggacaatgaaccataaccaatactaccaatcaatactcatcattaataatcataatggctatagcaataaaactaggaatagccccctttcacttctgagtcccagaggttacccaaggcacccctctgacatccggcctgcttcttctcacatgacaaaaactagcccccatctcaatcatataccaaatctctccctcactaaacgtaaaccttctcctcactctctcaatcttatccatcatagcaggcagttgaggtggattaaaccaaacccagctacgcaaaatcttagcatactcctcaattacccacataggatgaataatagcagttctaccgtacaaccctaacataaccattcttaatttaactatttatattatcctaactactaccgcattcctactactcaacttaaactccagcaccacgaccctactactatctcgcacctgaaacaagctaacatgactaacacccttaattccatccaccctcctctccctaggaggcctgcccccgctaaccggctttttgcccaaatgggccattatcgaagaattcacaaaaaacaatagcctcatcatccccaccatcatagccaccatcaccctccttaacctctacttctacctacgcctaatctactccacctcaatcacactactccccatatctaacaacgtaaaaataaaatgacagtttgaacatacaaaacccaccccattcctccccacactcatcgcccttaccacgctactcctacctatctccccttttatactaataatcttatagaaatttaggttaaatacagaccaagagccttcaaagccctcagtaagttgcaatacttaatttctgtaacagctaaggactgcaaaaccccactctgcatcaactgaacgcaaatcagccactttaattaagctaagcccttactagaccaatgggacttaaacccacaaacacttagttaacagctaagcaccctaatcaactggcttcaatctacttctcccgccgccgggaaaaaaggcgggagaagccccggcaggtttgaagctgcttcttcgaatttgcaattcaatatgaaaatcacctcggagctggtaaaaagaggcctaacccctgtctttagatttacagtccaatgcttcactcagccattttacctcacccccactgatgttcgccgaccgttgactattctctacaaaccacaaagacattggaacactatacctattattcggcgcatgagctggagtcctaggcacagctctaagcctccttattcgagccgagctgggccagccaggcaaccttctaggtaacgaccacatctacaacgttatcgtcacagcccatgcatttgtaataatcttcttcatagtaatacccatcataatcggaggctttggcaactgactagttcccctaataatcggtgcccccgatatggcgtttccccgcataaacaacataagcttctgactcttacctccctctctcctactcctgctcgcatctgctatagtggaggccggagcaggaacaggttgaacagtctaccctcccttagcagggaactactcccaccctggagcctccgtagacctaaccatcttctccttacacctagcaggtgtctcctctatcttaggggccatcaatttcatcacaacaattatcaatataaaaccccctgccataacccaataccaaacgcccctcttcgtctgatccgtcctaatcacagcagtcctacttctcctatctctcccagtcctagctgctggcatcactatactactaacagaccgcaacctcaacaccaccttcttcgaccccgccggaggaggagaccccattctataccaacacctattctgatttttcggtcaccctgaagtttatattcttatcctaccaggcttcggaataatctcccatattgtaacttactactccggaaaaaaagaaccatttggatacataggtatggtctgagctatgatatcaattggcttcctagggtttatcgtgtgagcacaccacatatttacagtaggaatagacgtagacacacgagcatatttcacctccgctaccataatcatcgctatccccaccggcgtcaaagtatttagctgactcgccacactccacggaagcaatatgaaatgatctgctgcagtgctctgagccctaggattcatctttcttttcaccgtaggtggcctgactggcattgtattagcaaactcatcactagacatcgtactacacgacacgtactacgttgtagcccacttccactatgtcctatcaataggagctgtatttgccatcataggaggcttcattcactgatttcccctattctcaggctacaccctagaccaaacctacgccaaaatccatttcactatcatattcatcggcgtaaatctaactttcttcccacaacactttctcggcctatccggaatgccccgacgttactcggactaccccgatgcatacaccacatgaaacatcctatcatctgtaggctcattcatttctctaacagcagtaatattaataattttcatgatttgagaagccttcgcttcgaagcgaaaagtcctaatagtagaagaaccctccataaacctggagtgactatatggatgccccccaccctaccacacattcgaagaacccgtatacataaaatctagacaaaaaaggaaggaatcgaaccccccaaagctggtttcaagccaaccccatggcctccatgactttttcaaaaaggtattagaaaaaccatttcataactttgtcaaagttaaattataggctaaatcctatatatcttaatggcacatgcagcgcaagtaggtctacaagacgctacttcccctatcatagaagagcttatcacctttcatgatcacgccctcataatcattttccttatctgcttcctagtcctgtatgcccttttcctaacactcacaacaaaactaactaatactaacatctcagacgctcaggaaatagaaaccgtctgaactatcctgcccgccatcatcctagtcctcatcgccctcccatccctacgcatcctttacataacagacgaggtcaacgatccctcccttaccatcaaatcaattggccaccaatggtactgaacctacgagtacaccgactacggcggactaatcttcaactcctacatacttcccccattattcctagaaccaggcgacctgcgactccttgacgttgacaatcgagtagtactcccgattgaagcccccattcgtataataattacatcacaagacgtcttgcactcatgagctgtccccacattaggcttaaaaacagatgcaattcccggacgtctaaaccaaaccactttcaccgctacacgaccgggggtatactacggtcaatgctctgaaatctgtggagcaaaccacagtttcatgcccatcgtcctagaattaattcccctaaaaatctttgaaatagggcccgtatttaccctatagcaccccctctaccccctctagagcccactgtaaagctaacttagcattaaccttttaagttaaagattaagagaaccaacacctctttacagtgaaatgccccaactaaatactaccgtatggcccaccataattacccccatactccttacactattcctcatcacccaactaaaaatattaaacacaaactaccacctacctccctcaccaaagcccataaaaataaaaaattataacaaaccctgagaaccaaaatgaacgaaaatctgttcgcttcattcattgcccccacaatcctaggcctacccgccgcagtactgatcattctatttccccctctattgatccccacctccaaatatctcatcaacaaccgactaatcaccacccaacaatgactaatcaaactaacctcaaaacaaatgataaccatacacaacactaaaggacgaacctgatctcttatactagtatccttaatcatttttattgccacaactaacctcctcggactcctgcctcactcatttacaccaaccacccaactatctataaacctagccatggccatccccttatgagcgggcgcagtgattataggctttcgctctaagattaaaaatgccctagcccacttcttaccacaaggcacacctacaccccttatccccatactagttattatcgaaaccatcagcctactcattcaaccaatagccctggccgtacgcctaaccgctaacattactgcaggccacctactcatgcacctaattggaagcgccaccctagcaatatcaaccattaaccttccctctacacttatcatcttcacaattctaattctactgactatcctagaaatcgctgtcgccttaatccaagcctacgttttcacacttctagtaagcctctacctgcacgacaacacataatgacccaccaatcacatgcctatcatatagtaaaacccagcccatgacccctaacaggggccctctcagccctcctaatgacctccggcctagccatgtgatttcacttccactccataacgctcctcatactaggcctactaaccaacacactaaccatataccaatgatggcgcgatgtaacacgagaaagcacataccaaggccaccacacaccacctgtccaaaaaggccttcgatacgggataatcctatttattacctcagaagtttttttcttcgcaggatttttctgagccttttaccactccagcctagcccctaccccccaattaggagggcactggcccccaacaggcatcaccccgctaaatcccctagaagtcccactcctaaacacatccgtattactcgcatcaggagtatcaatcacctgagctcaccatagtctaatagaaaacaaccgaaaccaaataattcaagcactgcttattacaattttactgggtctctattttaccctcctacaagcctcagagtacttcgagtctcccttcaccatttccgacggcatctacggctcaacattttttgtagccacaggcttccacggacttcacgtcattattggctcaactttcctcgctatctgcttcatccgccaactaatatttcactttacatccaaacatcactttggcttcgaagccgccgcctgatactggcattttgtagatgtggtttgactatttctgtatgtctccatctattgatgagggtcttactcttttagtataaatagtaccgttaacttccaattaactagttttgacaacattcaaaaaagagtaataaacttcgccttaattttaataatcaacaccctcctagccttactactaataattattacattttgactaccacaactcaacggctacatagaaaaatccaccccttacgagtgcggcttcgaccctatatcccccgcccgcgtccctttctccataaaattcttcttagtagctattaccttcttattatttgatctagaaattgccctccttttacccctaccatgagccctacaaacaactaacctgccactaatagttatgtcatccctcttattaatcatcatcctagccctaagtctggcctatgagtgactacaaaaaggattagactgaaccgaattggtatatagtttaaacaaaacgaatgatttcgactcattaaattatgataatcatatttaccaaatgcccctcatttacataaatattatactagcatttaccatctcacttctaggaatactagtatatcgctcacacctcatatcctccctactatgcctagaaggaataatactatcgctgttcattatagctactctcataaccctcaacacccactccctcttagccaatattgtgcctattgccatactagtctttgccgcctgcgaagcagcggtgggcctagccctactagtctcaatctccaacacatatggcctagactacgtacataacctaaacctactccaatgctaaaactaatcgtcccaacaattatattactaccactgacatgactttccaaaaaacacataatttgaatcaacacaaccacccacagcctaattattagcatcatccctctactattttttaaccaaatcaacaacaacctatttagctgttccccaaccttttcctccgaccccctaacaacccccctcctaatactaactacctgactcctacccctcacaatcatggcaagccaacgccacttatccagtgaaccactatcacgaaaaaaactctacctctctatactaatctccctacaaatctccttaattataacattcacagccacagaactaatcatattttatatcttcttcgaaaccacacttatccccaccttggctatcatcacccgatgaggcaaccagccagaacgcctgaacgcaggcacatacttcctattctacaccctagtaggctcccttcccctactcatcgcactaatttacactcacaacaccctaggctcactaaacattctactactcactctcactgcccaagaactatcaaactcctgagccaacaacttaatatgactagcttacacaatagcttttatagtaaagatacctctttacggactccacttatgactccctaaagcccatgtcgaagcccccatcgctgggtcaatagtacttgccgcagtactcttaaaactaggcggctatggtataatacgcctcacactcattctcaaccccctgacaaaacacatagcctaccccttccttgtactatccctatgaggcataattataacaagctccatctgcctacgacaaacagacctaaaatcgctcattgcatactcttcaatcagccacatagccctcgtagtaacagccattctcatccaaaccccctgaagcttcaccggcgcagtcattctcataatcgcccacgggcttacatcctcattactattctgcctagcaaactcaaactacgaacgcactcacagtcgcatcataatcctctctcaaggacttcaaactctactcccactaatagctttttgatgacttctagcaagcctcgctaacctcgccttaccccccactattaacctactgggagaactctctgtgctagtaaccacgttctcctgatcaaatatcactctcctacttacaggactcaacatactagtcacagccctatactccctctacatatttaccacaacacaatggggctcactcacccaccacattaacaacataaaaccctcattcacacgagaaaacaccctcatgttcatacacctatcccccattctcctcctatccctcaaccccgacatcattaccgggttttcctcttgtaaatatagtttaaccaaaacatcagattgtgaatctgacaacagaggcttacgaccccttatttaccgagaaagctcacaagaactgctaactcatgcccccatgtctaacaacatggctttctcaacttttaaaggataacagctatccattggtcttaggccccaaaaattttggtgcaactccaaataaaagtaataaccatgcacactactataaccaccctaaccctgacttccctaattccccccatccttaccaccctcgttaaccctaacaaaaaaaactcatacccccattatgtaaaatccattgtcgcatccacctttattatcagtctcttccccacaacaatattcatgtgcctagaccaagaagttattatctcgaactgacactgagccacaacccaaacaacccagctctccctaagcttcaaactagactacttctccataatattcatccctgtagcattgttcgttacatggtccatcatagaattctcactgtgatatataaactcagacccaaacattaatcagttcttcaaatatctactcatcttcctaattaccatactaatcttagttaccgctaacaacctattccaactgttcatcggctgagagggcgtaggaattatatccttcttgctcatcagttgatgatacgcccgagcagatgccaacacagcagccattcaagcaatcctatacaaccgtatcggcgatatcggtttcatcctcgccttagcatgatttatcctacactccaactcatgagacccacaacaaatagcccttctaaacgctaatccaagcctcaccccactactaggcctcctcctagcagcagcaggcaaatcagcccaattaggtctccacccctgactcccctcagccatagaaggccccaccccagtctcagccctactccactcaagcactatagttgtagcaggaatcttcttactcatccgcttccaccccctagcagaaaatagcccactaatccaaactctaacactatgcttaggcgctatcaccactctgttcgcagcagtctgcgcccttacacaaaatgacatcaaaaaaatcgtagccttctccacttcaagtcaactaggactcataatagttacaatcggcatcaaccaaccacacctagcattcctgcacatctgtacccacgccttcttcaaagccatactatttatgtgctccgggtccatcatccacaaccttaacaatgaacaagatattcgaaaaataggaggactactcaaaaccatacctctcacttcaacctccctcaccattggcagcctagcattagcaggaatacctttcctcacaggtttctactccaaagaccacatcatcgaaaccgcaaacatatcatacacaaacgcctgagccctatctattactctcatcgctacctccctgacaagcgcctatagcactcgaataattcttctcaccctaacaggtcaacctcgcttccccacccttactaacattaacgaaaataaccccaccctactaaaccccattaaacgcctggcagccggaagcctattcgcaggatttctcattactaacaacatttcccccgcatcccccttccaaacaacaatccccctctacctaaaactcacagccctcgctgtcactttcctaggacttctaacagccctagacctcaactacctaaccaacaaacttaaaataaaatccccactatgcacattttatttctccaacatactcggattctaccctagcatcacacaccgcacaatcccctatctaggccttcttacgagccaaaacctgcccctactcctcctagacctaacctgactagaaaagctattacctaaaacaatttcacagcaccaaatctccacctccatcatcacctcaacccaaaaaggcataattaaactttacttcctctctttcttcttcccactcatcctaaccctactcctaatcacataacctattcccccgagcaatctcaattacaatatatacaccaacaaacaatgttcaaccagtaactactactaatcaacgcccataatcatacaaagcccccgcaccaataggatcctcccgaatcaaccctgacccctctccttcataaattattcagcttcctacactattaaagtttaccacaaccaccaccccatcatactctttcacccacagcaccaatcctacctccatcgctaaccccactaaaacactcaccaagacctcaacccctgacccccatgcctcaggatactcctcaatagccatcgctgtagtatatccaaagacaaccatcattccccctaaataaattaaaaaaactattaaacccatataacctcccccaaaattcagaataataacacacccgaccacaccgctaacaatcaatactaaacccccataaataggagaaggcttagaagaaaaccccacaaaccccattactaaacccacactcaacagaaacaaagcatacatcattattctcgcacggactacaaccacgaccaatgatatgaaaaaccatcgttgtatttcaactacaagaacaccaatgaccccaatacgcaaaactaaccccctaataaaattaattaaccactcattcatcgacctccccaccccatccaacatctccgcatgatgaaacttcggctcactccttggcgcctgcctgatcctccaaatcaccacaggactattcctagccatgcactactcaccagacgcctcaaccgccttttcatcaatcgcccacatcactcgagacgtaaattatggctgaatcatccgctaccttcacgccaatggcgcctcaatattctttatctgcctcttcctacacatcgggcgaggcctatattacggatcatttctctactcagaaacctgaaacatcggcattatcctcctgcttgcaactatagcaacagccttcataggctatgtcctcccgtgaggccaaatatcattctgaggggccacagtaattacaaacttactatccgccatcccatacattgggacagacctagttcaatgaatctgaggaggctactcagtagacagtcccaccctcacacgattctttacctttcacttcatcttgcccttcattattgcagccctagcagcactccacctcctattcttgcacgaaacgggatcaaacaaccccctaggaatcacctcccattccgataaaatcaccttccacccttactacacaatcaaagacgccctcggcttacttctcttccttctctccttaatgacattaacactattctcaccagacctcctaggcgacccagacaattataccctagccaaccccttaaacacccctccccacatcaagcccgaatgatatttcctattcgcctacacaattctccgatccgtccctaacaaactaggaggcgtccttgccctattactatccatcctcatcctagcaataatccccatcctccatatatccaaacaacaaagcataatatttcgcccactaagccaatcactttattgactcctagccgcagacctcctcattctaacctgaatcggaggacaaccagtaagctacccttttaccatcattggacaagtagcatccgtactatacttcacaacaatcctaatcctaataccaactatctccctaattgaaaacaaaatactcaaatgggcctgtccttgtagtataaactaatacaccagtcttgtaaaccggagatgaaaacctttttccaaggacaaatcagagaaaaagtctttaactccaccattagcacccaaagctaagattctaatttaaactattctctgttctttcatggggaagcagatttgggtaccacccaagtattgactcacccatcaacaaccgctatgtatttcgtacattactgccagccaccatgaatattgtacagtaccataaatacttgaccacctgtagtacataaaaacccaatccacatcaaaaccccctccccatgcttacaagcaagtacagcaatcaaccctcaactatcacacatcaactgcaactccaaagccacccctcacccactaggataccaacaaacctacccacccttaacagtacatagtacataaagccatttaccgtacatagcacattacagtcaaatcccttctcgtccccatggatgacccccctcagataggggtcccttgaccaccatcctccgtgaaatcaatatcccgcacaagagtgctactctcctcgctccgggcccataacacttgggggtagctaaagtgaactgtatccgacatctggttcctacttcagggccataaagcctaaatagcccacacgttccccttaaataagacatcacgatg

SEQ ID NO: 55 - DNA, 16571 bp, Homo sapiens mitochondrial
  3109: "n" refers to a nucleotide at position 3107 of the Cambridge Reference Sequence (CRS, Anderson et al. 1981 Nature 290:457-465), later determined to be absent from the human mtDNA sequence according to the revised CRS (rCRS, Andrews et al. 1999 Nature Genetics 23:147); "n" therefore represents a single nucleotide deletion at a position corresponding to nucleotide 3107 of SEQ ID NO:1 as provided herein.
gatcacaggtctatcaccctattaaccactcacgggagctctccatgcatttggtattttcgtctggggggtatgcacgcgatagcattgcgggacgctggagccggagcaccctatgtcgcagtatctgtctttgattcctgcctcatcctattatttatcgcacctacgttcaatattacaggcgaacatacttactagagtgtgttaattaattaatgcttgtaggacataataataacaattgaatgtctgcacagccgctttccacacagacatcataacaaaaaatttccaccaaaccccccctcccccccgcttctggccacagcacttaaacacatctctgccaaaccccaaaaacaaagaaccctaacaccagcctaaccagatttcaaattttatcttttggcggtatgcacttttaacagtcaccccccaactaacacattattttcccctcccactcccatactactaatctcatcaatacaacccccgcccatcctacccagcacacacacaccgctgctaaccccataccccgaaccaaccaaaccccaaagacaccccccacagtttatgtagcttacctcctcaaagcaatacactgaaaatgtttagacgggctcacatcaccccataaacaaataggtttggtcctagcctttctattagctcttagtaagattacacatgcaagcatccccgttccagtgagttcaccctctaaatcaccacgatcaaaagggacaagcatcaagcacgcagcaatgcagctcaaaacgcttagcctagccacacccccacgggaaacagcagtgattaacctttagcaataaacgaaagtttaactaagctatactaaccccagggttggtcaatttcgtgccagccaccgcggtcacacgattaacccaagtcaatagaagccggcgtaaagagtgttttagatcaccccctccccaataaagctaaaactcacctgagttgtaaaaaactccagttgacacaaaatagactacgaaagtggctttaacatatctgaacacacaatagctaagacccaaactgggattagataccccactatgcttagccctaaacctcaacagttaaatcaacaaaactgctcgccagaacactacgagccacagcttaaaactcaaaggacctggcggtgcttcatatccctctagaggagcctgttctgtaatcgataaaccccgatcaacctcaccacctcttgctcagcctatataccgccatcttcagcaaaccctgatgaaggctacaaagtaagcgcaagtacccacgtaaagacgttaggtcaaggtgtagcccatgaggtggcaagaaatgggctacattttctaccccagaaaactacgatagcccttatgaaacttaagggtcgaaggtggatttagcagtaaactgagagtagagtgcttagttgaacagggccctgaagcgcgtacacaccgcccgtcaccctcctcaagtatacttcaaaggacatttaactaaaacccctacgcatttatatagaggagacaagtcgtaacatggtaagtgtactggaaagtgcacttggacgaaccagagtgtagcttaacacaaagcacccaacttacacttaggagatttcaacttaacttgaccgctctgagctaaacctagccccaaacccactccaccttactaccagacaaccttagccaaaccatttacccaaataaagtataggcgatagaaattgaaacctggcgcaatagatatagtaccgcaagggaaagatgaaaaattataaccaagcataatatagcaaggactaacccctataccttctgcataatgaattaactagaaataactttgcaaggagagccaaagctaagacccccgaaaccagacgagctacctaagaacagctaaaagagcacacccgtctatgtagcaaaatagtgggaagatttataggtagaggcgacaaacctaccgagcctggtgatagctggttgtccaagatagaatcttagttcaactttaaatttgcccacagaaccctctaaatccccttgtaaatttaactgttagtccaaagaggaacagctctttggacactaggaaaaaaccttgtagagagagtaaaaaatttaacacccatagtaggcctaaaagcagccaccaattaagaaagcgttcaagctcaacacccactacctaaaaaatcccaaacatataactgaactcctcacacccaattggaccaatctatcaccctatagaagaactaatgttagtataagtaacatgaaaacattctcctccgcataagcctgcgtcagattaaaacactgaactgacaattaacagcccaatatctacaatcaaccaacaagtcattattaccctcactgtcaacccaacacaggcatgctcataaggaaaggttaaaaaaagtaaaaggaactcggcaaatcttaccccgcctgtttaccaaaaacatcacctctagcatcaccagtattagaggcaccgcctgcccagtgacacatgtttaacggccgcggtaccctaaccgtgcaaaggtagcataatcacttgttccttaaatagggacctgtatgaatggctccacgagggttcagctgtctcttacttttaaccagtgaaattgacctgcccgtgaagaggcgggcataacacagcaagacgagaagaccctatggagctttaatttattaatgcaaacagtacctaacaaacccacaggtcctaaactaccaaacctgcattaaaaatttcggttggggcgacctcggagcagaacccaacctccgagcagtacatgctaagacttcaccagtcaaagcgaactactatactcaattgatccaataacttgaccaacggaacaagttaccctagggataacagcgcaatcctattctagagtccatatcaacaatagggtttacgacctcgatgttggatcaggacatcccgatggtgcagccgctattaaaggttcgtttgttcaacgattaaagtcctacgtgatctgagttcagaccggagtaatccaggtcggtttctatctacnttcaaattcctccctgtacgaaaggacaagagaaataaggcctacttcacaaagcgccttcccccgtaaatgatatcatctcaacttagtattatacccacacccacccaagaacagggtttgttaagatggcagagcccggtaatcgcataaaacttaaaactttacagtcagaggttcaattcctcttcttaacaacatacccatggccaacctcctactcctcattgtacccattctaatcgcaatggcattcctaatgcttaccgaacgaaaaattctaggctatatacaactacgcaaaggccccaacgttgtaggcccctacgggctactacaacccttcgctgacgccataaaactcttcaccaaagagcccctaaaacccgccacatctaccatcaccctctacatcaccgccccgaccttagctctcaccatcgctcttctactatgaacccccctccccatacccaaccccctggtcaacctcaacctaggcctcctatttattctagccacctctagcctagccgtttactcaatcctctgatcagggtgagcatcaaactcaaactacgccctgatcggcgcactgcgagcagtagcccaaacaatctcatatgaagtcaccctagccatcattctactatcaacattactaataagtggctcctttaacctctccacccttatcacaacacaagaacacctctgattactcctgccatcatgacccttggccataatatgatttatctccacactagcagagaccaaccgaacccccttcgaccttgccgaaggggagtccgaactagtctcaggcttcaacatcgaatacgccgcaggccccttcgccctattcttcatagccgaatacacaaacattattataataaacaccctcaccactacaatcttcctaggaacaacatatgacgcactctcccctgaactctacacaacatattttgtcaccaagaccctacttctaacctccctgttcttatgaattcgaacagcatacccccgattccgctacgaccaactcatacacctcctatgaaaaaacttcctaccactcaccctagcattacttatatgatatgtctccatacccattacaatctccagcattccccctcaaacctaagaaatatgtctgataaaagagttactttgatagagtaaataataggagcttaaacccccttatttctaggactatgagaatcgaacccatccctgagaatccaaaattctccgtgccacctatcacaccccatcctaaagtaaggtcagctaaataagctatcgggcccataccccgaaaatgttggttatacccttcccgtactaattaatcccctggcccaacccgtcatctactctaccatctttgcaggcacactcatcacagcgctaagctcgcactgattttttacctgagtaggcctagaaataaacatgctagcttttattccagttctaaccaaaaaaataaaccctcgttccacagaagctgccatcaagtatttcctcacgcaagcaaccgcatccataatccttctaatagctatcctcttcaacaatatactctccggacaatgaaccataaccaatactaccaatcaatactcatcattaataatcataatggctatagcaataaaactaggaatagccccctttcacttctgagtcccagaggttacccaaggcacccctctgacatccggcctgcttcttctcacatgacaaaaactagcccccatctcaatcatataccaaatctctccctcactaaacgtaagccttctcctcactctctcaatcttatccatcatagcaggcagttgaggtggattaaaccaaacccagctacgcaaaatcttagcatactcctcaattacccacataggatgaataatagcagttctaccgtacaaccctaacataaccattcttaatttaactatttatattatcctaactactaccgcattcctactactcaacttaaactccagcaccacgaccctactactatctcgcacctgaaacaagctaacatgactaacacccttaattccatccaccctcctctccctaggaggcctgcccccgctaaccggctttttgcccaaatgggccattatcgaagaattcacaaaaaacaatagcctcatcatccccaccatcatagccaccatcaccctccttaacctctacttctacctacgcctaatctactccacctcaatcacactactccccatatctaacaacgtaaaaataaaatgacagtttgaacatacaaaacccaccccattcctccccacactcatcgcccttaccacgctactcctacctatctccccttttatactaataatcttatagaaatttaggttaaatacagaccaagagccttcaaagccctcagtaagttgcaatacttaatttctgtaacagctaaggactgcaaaaccccactctgcatcaactgaacgcaaatcagccactttaattaagctaagcccttactagaccaatgggacttaaacccacaaacacttagttaacagctaagcaccctaatcaactggcttcaatctacttctcccgccgccgggaaaaaaggcgggagaagccccggcaggtttgaagctgcttcttcgaatttgcaattcaatatgaaaatcacctcggagctggtaaaaagaggcctaacccctgtctttagatttacagtccaatgcttcactcagccattttacctcacccccactgatgttcgccgaccgttgactattctctacaaaccacaaagacattggaacactatacctattattcggcgcatgagctggagtcctaggcacagctctaagcctccttattcgagccgagctgggccagccaggcaaccttctaggtaacgaccacatctacaacgttatcgtcacagcccatgcatttgtaataatcttcttcatagtaatacccatcataatcggaggctttggcaactgactagttcccctaataatcggtgcccccgatatggcgtttccccgcataaacaacataagcttctgactcttacctccctctctcctactcctgctcgcatctgctatagtggaggccggagcaggaacaggttgaacagtctaccctcccttagcagggaactactcccaccctggagcctccgtagacctaaccatcttctccttacacctagcaggtgtctcctctatcttaggggccatcaatttcatcacaacaattatcaatataaaaccccctgccataacccaataccaaacgcccctcttcgtctgatccgtcctaatcacagcagtcctacttctcctatctctcccagtcctagctgctggcatcactatactactaacagaccgcaacctcaacaccaccttcttcgaccccgccggaggaggagaccccattctataccaacacctattctgatttttcggtcaccctgaagtttatattcttatcctaccaggcttcggaataatctcccatattgtaacttactactccggaaaaaaagaaccatttggatacataggtatggtctgagctatgatatcaattggcttcctagggtttatcgtgtgagcacaccatatatttacagtaggaatagacgtagacacacgagcatatttcacctccgctaccataatcatcgctatccccaccggcgtcaaagtatttagctgactcgccacactccacggaagcaatatgaaatgatctgctgcagtgctctgagccctaggattcatctttcttttcaccgtaggtggcctgactggcattgtattagcaaactcatcactagacatcgtactacacgacacgtactacgttgtagcccacttccactatgtcctatcaataggagctgtatttgccatcataggaggcttcattcactgatttcccctattctcaggctacaccctagaccaaacctacgccaaaatccatttcactatcatattcatcggcgtaaatctaactttcttcccacaacactttctcggcctatccggaatgccccgacgttactcggactaccccgatgcatacaccacatgaaacatcctatcatctgtaggctcattcatttctctaacagcagtaatattaataattttcatgatttgagaagccttcgcttcgaagcgaaaagtcctaatagtagaagaaccctccataaacctggagtgactatatggatgccccccaccctaccacacattcgaagaacccgtatacataaaatctagacaaaaaaggaaggaatcgaaccccccaaagctggtttcaagccaaccccatggcctccatgactttttcaaaaaggtattagaaaaaccatttcataactttgtcaaagttaaattataggctaaatcctatatatcttaatggcacatgcagcgcaagtaggtctacaagacgctacttcccctatcatagaagagcttatcacctttcatgatcacgccctcataatcattttccttatctgcttcctagtcctgtatgcccttttcctaacactcacaacaaaactaactaatactaacatctcagacgctcaggaaatagaaaccgtctgaactatcctgcccgccatcatcctagtcctcatcgccctcccatccctacgcatcctttacataacagacgaggtcaacgatccctcccttaccatcaaatcaattggccaccaatggtactgaacctacgagtacaccgactacggcggactaatcttcaactcctacatacttcccccattattcctagaaccaggcgacctgcgactccttgacgttgacaatcgagtagtactcccgattgaagcccccattcgtataataattacatcacaagacgtcttgcactcatgagctgtccccacattaggcttaaaaacagatgcaattcccggacgtctaaaccaaaccactttcaccgctacacgaccgggggtatactacggtcaatgctctgaaatctgtggagcaaaccacagtttcatgcccatcgtcctagaattaattcccctaaaaatctttgaaatagggcccgtatttaccctatagcaccccctctaccccctctagagcccactgtaaagctaacttagcattaaccttttaagttaaagattaagagaaccaacacctctttacagtgaaatgccccaactaaatactaccgtatggcccaccataattacccccatactccttacactattcctcatcacccaactaaaaatattaaacacaaactaccacctacctccctcaccaaagcccataaaaataaaaaattataacaaaccctgagaaccaaaatgaacgaaaatctgttcgcttcattcattgcccccacaatcctaggcctacccgccgcagtactgatcattctatttccccctctattgatccccacctccaaatatctcatcaacaaccgactaatcaccacccaacaatgactaatcaaactaacctcaaaacaaatgataaccatacacaacactaaaggacgaacctgatctcttatactagtatccttaatcatttttattgccacaactaacctcctcggactcctgcctcactcatttacaccaaccacccaactatctataaacctagccatggccatccccttatgagcgggcgcagtgattataggctttcgctctaagattaaaaatgccctagcccacttcttaccacaaggcacacctacaccccttatccccatactagttattatcgaaaccatcagcctactcattcaaccaatagccctggccgtacgcctaaccgctaacattactacaggccacctactcatgcacctaattggaagcgccaccctagcaatatcaaccattaaccttccctctacacttatcatcttcacaattctaattctactgactatcctagaaatcgctgtcgccttaatccaagcctacgttttcacacttctagtaagcctctacctgcacgacaacacataatgacccaccaatcacatgcctatcatatagtaaaacccagcccatgacccctaacaggggccctctcagccctcctaatgacctccggcctagccatgtgatttcacttccactccataacgctcctcatactaggcctactaaccaacacactaaccatataccaatgatggcgcgatgtaacacgagaaagcacataccaaggccaccacacaccacctgtccaaaaaggccttcgatacgggataatcctatttattacctcagaagtttttttcttcgcaggatttttctgagccttttaccactccagcctagcccctaccccccaattaggagggcactggcccccaacaggcatcaccccgctaaatcccctagaagtcccactcctaaacacatccgtattactcgcatcaggagtatcaatcacctgagctcaccatagtctaatagaaaacaaccgaaaccaaataattcaagcactgcttattacaattttactgggtctctattttaccctcctacaagcctcagagtacttcgagtctcccttcaccatttccgacggcatctacggctcaacattttttgtagccacaggcttccacggacttcacgtcattattggctcaactttcctcactatctgcttcatccgccaactaatatttcactttacatccaaacatcactttggcttcgaagccgccgcctgatactggcattttgtagatgtggtttgactatttctgtatgtctccatctattgatgagggtcttactcttttagtataaatagtaccgttaacttccaattaactagttttgacaacattcaaaaaagagtaataaacttcgccttaattttaataatcaacaccctcctagccttactactaataattattacattttgactaccacaactcaacggctacatagaaaaatccaccccttacgagtgcggcttcgaccctatatcccccgcccgcgtccctttctccataaaattcttcttagtagctattaccttcttattatttgatctagaaattgccctccttttacccctaccatgagccctacaaacaactaacctgccactaatagttatgtcatccctcttattaatcatcatcctagccctaagtctggcctatgagtgactacaaaaaggattagactgaaccgaattggtatatagtttaaacaaaacgaatgatttcgactcattaaattatgataatcatatttaccaaatgcccctcatttacataaatattatactagcatttaccatctcacttctaggaatactagtatatcgctcacacctcatatcctccctactatgcctagaaggaataatactatcgctgttcattatagctactctcataaccctcaacacccactccctcttagccaatattgtgcctattgccatactagtctttgccgcctgcgaagcagcggtgggcctagccctactagtctcaatctccaacacatatggcctagactacgtacataacctaaacctactccaatgctaaaactaatcgtcccaacaattatattactaccactgacatgactttccaaaaaacacataatttgaatcaacacaaccacccacagcctaattattagcatcatccctctactattttttaaccaaatcaacaacaacctatttagctgttccccaaccttttcctccgaccccctaacaacccccctcctaatactaactacctgactcctacccctcacaatcatggcaagccaacgccacttatccagtgaaccactatcacgaaaaaaactctacctctctatactaatctccctacaaatctccttaattataacattcacagccacagaactaatcatattttatatcttcttcgaaaccacacttatccccaccttggctatcatcacccgatgaggcaaccagccagaacgcctgaacgcaggcacatacttcctattctacaccctagtaggctcccttcccctactcatcgcactaatttacactcacaacaccctaggctcactaaacattctactactcactctcactgcccaagaactatcaaactcctgagccaacaacttaatatgactagcttacacaatagcttttatagtaaagatacctctttacggactccacttatgactccctaaagcccatgtcgaagcccccatcgctgggtcaatagtacttgccgcagtactcttaaaactaggcggctatggtataatacgcctcacactcattctcaaccccctgacaaaacacatagcctaccccttccttgtactatccctatgaggcataattataacaagctccatctgcctacgacaaacagacctaaaatcgctcattgcatactcttcaatcagccacatagccctcgtagtaacagccattctcatccaaaccccctgaagcttcaccggcgcagtcattctcataatcgcccacgggcttacatcctcattactattctgcctagcaaactcaaactacgaacgcactcacagtcgcatcataatcctctctcaaggacttcaaactctactcccactaatagctttttgatgacttctagcaagcctcgctaacctcgccttaccccccactattaacctactgggagaactctctgtgctagtaaccacgttctcctgatcaaatatcactctcctacttacaggactcaacatactagtcacagccctatactccctctacatatttaccacaacacaatggggctcactcacccaccacattaacaacataaaaccctcattcacacgagaaaacaccctcatgttcatacacctattccccattctcctcctatccctcaaccccgacatcattaccgggttttcctcttgtaaatatagtttaaccaaaacatcagattgtgaatctgacaacagaggcttacgaccccttatttaccgagaaagctcacaagaactgctaactcatgcccccatgtctaacaacatggctttctcaacttttaaaggataacagctatccattggtcttaggccccaaaaattttggtgcaactccaaataaaagtaataaccatgcacactactataaccaccctaaccctgacttccctaattccccccatccttaccaccctcgttaaccctaacaaaaaaaactcatacccccattatgtaaaatccattgtcgcatccacctttattatcagtctcttccccacaacaatattcatgtgcctagaccaagaagttattatctcgaactgacactgagccacaacccaaacaacccagctctccctaagcttcaaactagactacttctccataatattcatccctgtagcattgttcgttacatggtccatcatagaattctcactgtgatatataaactcagacccaaacattaatcagttcttcaaatatctactcatcttcctaattaccatactaatcttagttaccgctaacaacctattccaactgttcatcggctgagagggcgtaggaattatatccttcttgctcatcagttgatgatacgcccgagcagatgccaacacagcagccattcaagcaatcctatacaaccgtatcggcgatatcggtttcatcctcgccttagcatgatttatcctacactccaactcatgagacccacaacaaatagcccttctaaacgctaatccaagcctcaccccactactaggcctcctcctagcagcagcaggcaaatcagcccaattaggtctccacccctgactcccctcagccatagaaggccccaccccagtctcagccctactccactcaagcactatagttgtagcaggaatcttcttactcatccgcttccaccccctagcagaaaatagcccactaatccaaactctaacactatgcttaggcgctatcaccactctgttcgcagcagtctgcgcccttacacaaaatgacatcaaaaaaatcgtagccttctccacttcaagtcaactaggactcataatagttacaatcggcatcaaccaaccacacctagcattcctgcacatctgtacccacgccttcttcaaagccatactatttatgtgctccgggtccatcatccacaaccttaacaatgaacaagatattcgaaaaataggaggactactcaaaaccatacctctcacttcaacctccctcaccattggcagcctagcattagcaggaatacctttcctcacaggtttctactccaaagaccacatcatcgaaaccgcaaacatatcatacacaaacgcctgagccctatctattactctcatcgctacctccctgacaagcgcctatagcactcgaataattcttctcaccctaacaggtcaacctcgcttccccacccttactaacattaacgaaaataaccccaccctactaaaccccattaaacgcctggcagccggaagcctattcgcaggatttctcattactaacaacatttcccccgcatcccccttccaaacaacaatccccctctacctaaaactcacagccctcgctgtcactttcctaggacttctaacagccctagacctcaactacctaaccaacaaacttaaaataaaatccccactatgcacattttatttctccaacatactcggattctaccctagcatcacacaccgcacaatcccctatctaggccttcttacgagccaaaacctgcccctactcctcctagacctaacctgactagaaaagctattacctaaaacaatttcacagcaccaaatctccacctccatcatcacctcaacccaaaaaggcataattaaactttacttcctctctttcttcttcccactcatcctaaccctactcctaatcacataacctattcccccgagcaatctcaattacaatatatacaccaacaaacaatgttcaaccagtaactactactaatcaacgcccataatcatacaaagcccccgcaccaataggatcctcccgaatcaaccctgacccctctccttcataaattattcagcttcctacactattaaagtttaccacaaccaccaccccatcatactctttcacccacagcaccaatcctacctccatcgctaaccccactaaaacactcaccaagacctcaacccctgacccccatgcctcaggatactcctcaatagccatcgctgtagtataaccaaagacaaccatcattccccctaaataaattaaaaaaactattaaacccatataacctcccccaaaattcagaataataacacacccgaccacaccgctaacaatcaatactaaacccccataaataggagaaggcttagaagaaaaccccacaaaccccattactaaacccacactcaacagaaacaaagcatacatcattattctcgcacggactacaaccacgaccaatgatatgaaaaaccatcgttgtatttcaactacaagaacaccaatgaccccaatacgcaaaactaaccccctaataaaattaattaaccactcattcatcgacctccccaccccatccaacatctccgcatgatgaaacttcggctcactccttggcgcctgcctgatcctccaaatcaccacaggactattcctagccatgcactactcaccagacgcctcaaccgccttttcatcaatcgcccacatcactcgagacgtaaattatggctgaatcatccgctaccttcacgccaatggcgcctcaatattctttatctgcctcttcctacacatcgggcgaggcctatattacggatcatttctctactcagaaacctgaaacatcggcattatcctcctgcttgcaactatagcaacagccttcataggctatgtcctcccgtgaggccaaatatcattctgaggggccacagtaattacaaacttactatccgccatcccatacattgggacagacctagttcaatgaatctgaggaggctactcagtagacagtcccaccctcacacgattctttacctttcacttcatcttgcccttcattattgcagccctagcagcactccacctcctattcttgcacgaaacgggatcaaacaaccccctaggaatcacctcccattccgataaaatcaccttccacccttactacacaatcaaagacgccctcggcttacttctcttccttctctccttaatgacattaacactattctcaccagacctcctaggcgacccagacaattataccctagccaaccccttaaacacccctccccacatcaagcccgaatgatatttcctattcgcctacacaattctccgatccgtccctaacaaactaggaggcgtccttgccctattactatccatcctcatcctagcaataatccccatcctccatatatccaaacaacaaagcataatatttcgcccactaagccaatcactttattgactcctagccgcagacctcctcattctaacctgaatcggaggacaaccagtaagctacccttttaccatcattggacaagtagcatccgtactatacttcacaacaatcctaatcctaataccaactatctccctaattgaaaacaaaatactcaaatgggcctgtccttgtagtataaactaatacaccagtcttgtaaaccggagatgaaaacctttttccaaggacaaatcagagaaaaagtctttaactccaccattagcacccaaagctaagattctaatttaaactattctctgttctttcatggggaagcagatttgggtaccacccaagtattgactcacccatcaacaaccgctatgtatttcgtacattactgccagccaccatgaatattgtacggtaccataaatacttgaccacctgtagtacataaaaacccaatccacatcaaaaccccctccccatgcttacaagcaagtacagcaatcaaccctcaactatcacacatcaactgcaactccaaagccacccctcacccactaggataccaacaaacctacccacccttaacagtacatagtacataaagccatttaccgtacatagcacattacagtcaaatcccttctcgtccccatggatgacccccctcagataggggtcccttgaccaccatcctccgtgaaatcaatatcccgcacaagagtgctactctcctcgctccgggcccataacacttgggggtagctaaagtgaactgtatccgacatctggttcctacttcagggccataaagcctaaatagcccacacgttccccttaaataagacatcacgatg

SEQ ID NO: 56 - DNA, 16571 bp, Homo sapiens mitochondrial
  3109: "n" refers to a nucleotide at position 3107 of the Cambridge Reference Sequence (CRS, Anderson et al. 1981 Nature 290:457-465), later determined to be absent from the human mtDNA sequence according to the revised CRS (rCRS, Andrews et al. 1999 Nature Genetics 23:147); "n" therefore represents a single nucleotide deletion at a position corresponding to nucleotide 3107 of SEQ ID NO:1 as provided herein.
gatcacaggtctatcaccctattaaccactcacgggagctctccatgcatttggtattttcgtctggggggtgtgcacgcgatagcattgcgagacgctggagccggagcaccttatgtcgcagtatctgtctttgattcctgcctcatcctattatttatcgcacctacgttcaatattacaggcgaacatacttactaaagtgtgttaattaattaatgcttgtaggacataataataacaattgaatgtctgcacagccgctttccacacagacatcataacaaaaaatttccaccaaaccccccctcccccccgcttctggccacagcacttaaacacatctctgccaaaccccaaaaacaaagaaccctaacaccagcctaaccagatttcaaattttatcttttggcggtatgcacttttaacagtcaccccccaactaacacattattttcccctcccactcccatactactaatctcatcaatacaaccctcgcccatcctacccagcacacacacaccgctgctaaccccataccccgaaccaaccaaaccccaaagacaccccccacagtttatgtagcttacctcctcaaagcaatacactgaaaatgtttagacgggctcacatcaccccataaacaaataggtttggtcctagcctttctattagctcttagtaagattacacatgcaagcatccccgttccagtgagttcaccctctaaatcaccacgatcaaaagggacaagcatcaagcacgcagcaatgcagctcaaaacgcttagcctagccacacccccacgggaaacagcagtgattaacctttagcaataaacgaaagtttaactaagctatactaaccccagggttggtcaatttcgtgccagccaccgcggtcacacgattaacccaagtcaatagaagccggcgtaaagagtgttttagatcaccccctccccaataaagctaaaactcacctgagttgtaaaaaactccagttgacacaaaatagactacgaaagtggctttaacatatctgaacacacaatagctaagacccaaactgggattagataccccactatgcttagccctaaacctcaacagttaaatcaacaaaactgctcgccagaacactacgagccacagcttaaaactcaaaggacctggcggtgcttcatacccctctagaggagcctgttctgtaatcgataaaccccgatcaacctcaccacctcttgctcagcctatataccgccatcttcagcaaaccctgatgaaggctacaaagtaagcgcaagtacccacgtaaagacgttaggtcaaggtgtagcccatgaggtggcaagaaatgggctacattttctaccccagaaaactacgatagcccttatgaaacttaagggtcgaaggtggatttagcagtaaactgagagtagagtgcttagttgaacagggccctgaagcgcgtacacaccgcccgtcaccctcctcaagtatacttcaaaggacatttaactaaaacccctacgcatttatatagaggagacaagtcgtaacatggtaagtgtactggaaagtgcacttggacgaaccagagtgtagcttaacacaaagcacccaacttacacttaggagatttcaacttaacttgaccgctctgagctaaacctagccccaaacccactccaccttactaccagacaaccttagccaaaccatttacccaaataaagtataggcgatagaaattgaaacctggcgcaatagatatagtaccgcaagggaaagatgaaaaattatagccaagcataatatagcaaggactaacccctataccttctgcataatgaattaactagaaataactttgcaaggagagccaaagctaagacccccgaaaccagacgagctacctaagaacagctaaaagagcacacccgtctatgtagcaaaatagtgggaagatttataggtagaggcgacaaacctaccgagcctggtgatagctggttgtccaagatagaatcttagttcaactttaaatttgcccacagaaccctctaaatccccttgtaaatttaactgttagtccaaagaggaacagctctttggacactaggaaaaaaccttgtagagagagtaaaaaatttaacacccatagtaggcctaaaagcagccaccaattaagaaagcgttcaagctcaacacccactacctaaaaaatcccaaacatataactgaactcctcacacccaattggaccaatctatcaccctatagaagaactaatgttagtataagtaacatgaaaacattctcctccgcataagcctgcgtcagattaaaacactgaactgacaattaacagcccaatatctacaatcaaccaacaagtcattattaccctcactgtcaacccaacacaggcatgctcataaggaaaggttaaaaaaagtaaaaggaactcggcaaatcttaccccgcctgtttaccaaaaacatcacctctagcatcaccagtattagaggcaccgcctgcccagtgacacatgtttaacggccgcggtaccctaaccgtgcaaaggtagcataatcacttgttccttaaatagggacctgtatgaatggctccacgagggttcagctgtctcttacttttaaccagtgaaattgacctgcccgtgaagaggcgggcatgacacagcaagacgagaagaccctatggagctttaatttattaatgcaaacagtacctaacaaacccacaggtcctaaactaccaaacctgcattaaaaatttcggttggggcgacctcggagcagaacccaacctccgagcagtacatgctaagacttcaccagtcaaagcgaactactatactcaattgatccaataacttgaccaacggaacaagttaccctagggataacagcgcaatcctattctagagtccatatcaacaatagggtttacgacctcgatgttggatcaggacatcccgatggtgcagccgctattaaaggttcgtttgttcaacgattaaagtcctacgtgatctgagttcagaccggagtaatccaggtcggtttctatctacnttcaaattcctccctgtacgaaaggacaagagaaataaggcctacttcacaaagcgccttcccccgtaaatgatatcatctcaacttagtattatacccacacccacccaagaacagggtttgttaagatggcagagcccggtaatcgcataaaacttaaaactttacagtcagaggttcaattcctcttcttaacaacatacccatggccaacctcctactcctcattgtacccattctaatcgcaatggcattcctaatgcttaccgaacgaaaaattctaggctatatacaactacgcaaaggccccaacgttgtaggcccctacgggctactacaacccttcgctgacgccataaaactcttcaccaaggagcccctaaaacccgccacatctaccatcaccctctacatcaccgccccgaccttagctctcaccatcgctcttctactatgaacccccctccccatacccaaccccctggtcaacctcaacctaggcctcctatttattctagccacctctagcctagccgtttactcaatcctctgatcagggtgagcatcaaactcaaactacgccctgatcggcgcactgcgagcagtagcccaaacaatctcatatgaagtcaccctagccatcattctactatcaacattactaataagtggctcctttaacctctccacccttatcacaacacaagaacacctctgattactcctgccatcatgacccttggccataatatgatttatctccacactagcagagaccaaccgaacccccttcgaccttgccgaaggggagtccgaactagtctcaggcttcaacatcgaatacgccgcaggccccttcgccctattcttcatagccgaatacacaaacattattataataaacaccctcaccactacaatcttcctaggaacaacatatgacgcactctcccctgaactctacacaacatattttgtcaccaagaccctacttctaacctccctgttcttatgaattcgaacagcatacccccgattccgctacgaccaactcatacacctcctatgaaaaaacttcctaccactcaccctagcattacttatatgatatgtctccatacccattacaatctccagcattccccctcaaacctaagaaatatgtctgataaaagagttactttgatagagtaaataataggagcttaaacccccttatttctaggactatgagaatcgaacccatccctgagaatccaaaattctccgtgccacctatcacaccccatcctaaagtaaggtcagctaaataagctatcgggcccataccccgaaaatgttggttatacccttcccgtactaattaatcccctggcccaacccgtcatctactctaccatctttgcaggcacactcatcacagcgctaagctcgcactgattttttacctgagtaggcctagaaataaacatgctagcttttattccagttctaaccaaaaaaataaaccctcgttccacagaagctgccatcaagtatttcctcacgcaagcaaccgcatccataatccttctaatagctatcctcttcaacaatatactctccggacaatgaaccataaccaatactaccaatcaatactcatcattaataatcataatggctatagcaataaaactaggaatagccccctttcacttctgagtcccagaggttacccaaggcacccctctgacatccggcctgcttcttctcacatgacaaaaactagcccccatctcaatcatataccaaatctctccctcactaaacgtaagccttctcctcactctctcaatcttatccatcatagcaggcagttgaggtggattaaaccaaacccagctacgcaaaatcttagcatactcctcaattacccacataggatgaataatagcagttctaccgtacaaccctaacataaccattcttaatttaactatttatattatcctaactactaccgcattcctactactcaacttaaactccagcaccacgaccctactactatctcgcacctgaaacaagctaacatgactaacacccttaattccatccaccctcctctccctaggaggcctgcccccgctaaccggctttttgcccaaatgggccattatcgaagaattcacaaaaaacaatagcctcatcatccccaccatcatagccaccatcaccctccttaacctctacttctacctacgcctaatctactccacctcaatcacactactccccatatctaacaacgtaaaaataaaatgacagtttgaacatacaaaacccaccccattcctccccacactcatcgcccttaccacgctactcctacctatctccccttttatactaataatcttatagaaatttaggttaaatacagaccaagagccttcaaagccctcagtaagttgcaatacttaatttctgtaacagctaaggactgcaaaaccccactctgcatcaactgaacgcaaatcagccactttaattaagctaagcccttactagaccaatgggacttaaacccacaaacacttagttaacagctaagcaccctaatcaactggcttcaatctacttctcccgccgccgggaaaaaaggcgggagaagccccggcaggtttgaagctgcttcttcgaatttgcaattcaatatgaaaatcacctcggagctggtaaaaagaggcctaacccctgtctttagatttacagtccaatgcttcactcagccattttacctcacccccactgatgttcgccgaccgttgactattctctacaaaccacaaagacattggaacactatacctattattcggcgcatgagctggagtcctaggcacagctctaagcctccttattcgagccgagctgggccagccaggcaaccttctaggtaacgaccacatctacaacgttatcgtcacagcccatgcatttgtaataatcttcttcatagtaatacccatcataatcggaggctttggcaactgactagttcccctaataatcggtgcccccgatatggcgtttccccgcataaacaacataagcttctgactcttacctccctctctcctactcctgctcgcatctgctatagtggaggccggagcaggaacaggttgaacagtctaccctcccttagcagggaactactcccaccctggagcctccgtagacctaaccatcttctccttacacctagcaggtatctcctctatcttaggggccatcaatttcatcacaacaattatcaatataaaaccccctgccataacccaataccaaacgcccctcttcgtctgatccgtcctaatcacagcagtcctacttctcctatctctcccagtcctagctgctggcatcactatactactaacagaccgcaacctcaacaccaccttcttcgaccccgccggaggaggagaccccattctataccaacacctattctgatttttcggtcaccctgaagtttatattcttatcctaccaggcttcggaataatctcccatattgtaacttactactccggaaaaaaagaaccatttggatacataggtatggtctgagctatgatatcaattggcttcctagggtttatcgtgtgagcacaccatatatttacagtaggaatagacgtagacacacgagcatatttcacctccgctaccataatcatcgctatccccaccggcgtcaaagtatttagctgactcgccacactccacggaagcaatatgaaatgatctgctgcagtgctctgagccctaggattcatctttcttttcaccgtaggtggcctgactggcattgtattagcaaactcatcactagacatcgtactacacgacacgtactacgttgtagctcacttccactatgtcctatcaataggagctgtatttgccatcataggaggcttcattcactgatttcccctattctcaggctacaccctagaccaaacctacgccaaaatccatttcactatcatattcatcggcgtaaatctaactttcttcccacaacactttctcggcctatccggaatgccccgacgttactcggactaccccgatgcatacaccacatgaaacatcctatcatctgtaggctcattcatttctctaacagcagtaatattaataattttcatgatttgagaagccttcgcttcgaagcgaaaagtcctaatagtagaagaaccctccataaacctggagtgactatatggatgccccccaccctaccacacattcgaagaacccgtatacataaaatctagacaaaaaaggaaggaatcgaaccccccaaagctggtttcaagccaaccccatggcctccatgactttttcaaaaaggtattagaaaaaccatttcataactttgtcaaagttaaattataggctaaatcctatatatcttaatggcacatgcagcgcaagtaggtctacaagacgctacttcccctatcatagaagagcttatcacctttcatgatcacgccctcataatcattttccttatctgcttcctagtcctgtatgcccttttcctaacactcacaacaaaactaactaatactaacatctcagacgctcaggaaatagaaaccgtctgaactatcctgcccgccatcatcctagtcctcatcgccctcccatccctacgcatcctttacataacagacgaggtcaacgatccctcccttaccatcaaatcaattggccaccaatggtactgaacctacgagtacaccgactacggcggactaatcttcaactcctacatacttcccccattattcctagaaccaggcgacctgcgactccttgacgttgacaatcgagtagtactcccgattgaagcccccattcgtataataattacatcacaagacgtcttgcactcatgagctgtccccacattaggcttaaaaacagatgcaattcccggacgtctaaaccaaaccactttcaccgctacacgaccgggggtatactacggtcaatgctctgaaatctgtggagcaaaccacagtttcatgcccatcgtcctagaattaattcccctaaaaatctttgaaatagggcccgtatttaccctatagcaccccctctaccccctctagagcccactgtaaagctaacttagcattaaccttttaagttaaagattaagagaaccaacacctctttacagtgaaatgccccaactaaatactaccgtatggcccaccataattacccccatactccttacactattcctcatcacccaactaaaaatattaaacacaaactaccacctacctccctcaccaaagcccataaaaataaaaaattataacaaaccctgagaaccaaaatgaacgaaaatctgttcgcttcattcattgcccccacaatcctaggcctacccgccgcagtactgatcattctatttccccctctattgatccccacctccaaatatctcatcaacaaccgactaatcaccacccaacaatgactaatcaaactaacctcaaaacaaatgataaccatacacaacactaaaggacgaacctgatctcttatactagtatccttaatcatttttattgccacaactaacctcctcggactcctgcctcactcatttacaccaaccacccaactatctataaacctagccatggccatccccttatgagcgggcgcagtgattataggctttcgctctaagattaaaaatgccctagcccacttcttaccacaaggcacacctacaccccttatccccatactagttattatcgaaaccatcagcctactcattcaaccaatagccctggccgtacgcctaaccgctaacattactgcaggccacctactcatgcacctaattggaagcaccaccctagcaatatcaaccattaaccttccctctacacttatcatcttcacaattctaattctactgactatcctagaaatcgctgtcgccttaatccaagcctacgttttcacacttctagtaagcctctacctgcacgacaacacataatgacccaccaatcacatgcctatcatatagtaaaacccagcccatgacccctaacaggggccctctcagccctcctaatgacctccggcctagccatgtgatttcacttccactccataacgctcctcatactaggcctactaaccaacacactaaccatataccaatgatggcgcgatgtaacacgagaaagcacataccaaggccaccacacaccacctgtccaaaaaggccttcgatacgggataatcctatttattacctcagaagtttttttcttcgcaggatttttctgagccttttaccactccagcctagcccctaccccccaattaggagggcactggcccccaacaggcatcaccccgctaaatcccctagaagtcccactcctaaacacatccgtattactcgcatcaggagtatcaatcacctgagctcaccatagtctaatagaaaacaaccgaaaccaaataattcaagcactgctcattacaattttactgggtctctattttaccctcctacaagcctcagagtacttcgagtctcccttcaccatttccgacggcatctacggctcaacattttttgtagccacaggcttccacggacttcacgtcattattggctcaactttcctcactatctgcttcatccgccaactaatatttcactttacatccaaacatcactttggcttcgaagccgccgcctgatactggcattttgtagatgtggtttgactatttctgtatgtctccatctattgatgagggtcttactcttttagtataaatagtaccgttaacttccaattaactagttttgacaacattcaaaaaagagtaataaacttcgccttaattttaataatcaacaccctcctagccttactactaataattattacattttgactaccacaactcaacggctacatagaaaaatccaccccttacgagtgcggcttcgaccctatatcccccgcccgcgtccctttctccataaaattcttcttagtagctattaccttcttattatttgatctagaaattgccctccttttacccctaccatgagccctacaaacaactaacctgccactaatagttatgtcatccctcttattaatcatcatcctagccctaagtctggcctatgagtgactacaaaaaggattagactgagccgaattggtatatagtttaaacaaaacgaatgatttcgactcattaaattatgataatcatatttaccaaatgcccctcatttacataaatattatactagcatttaccatctcacttctaggaatactagtatatcgctcacacctcatgtcctccctactatgcctagaaggaataatactatcgctgttcattatagctactctcataaccctcaacacccactccctcttagccaatattgtgcctattgccatactagtctttgccgcctgcgaagcagcggtgggcctagccctactagtctcaatctccaacacatatggcctagactacgtacataacctaaacctactccaatgctaaaactaatcgtcccaacaattatattactaccactgacatgactttccaaaaaacacataatttgaatcaacacaaccacccacagcctaattattagcatcatccctctactattttttaaccaaatcaacaacaacctatttagctgttccccaaccttttcctccgaccccctaacaacccccctcctaatactaactacctgactcctgcccctcacaatcatggcaagccaacgccacttatccagtgaaccactatcacgaaaaaaactctacctctctatactaatctccctacaaatctccttaattataacattcacagccacagaactaatcatattttatatcttcttcgaaaccacacttatccccaccttggctatcatcacccgatgaggcaaccagccagaacgcctgaacgcaggcacatacttcctattctacaccctagtaggctcccttcccctactcatcgcactaatttacactcacaacaccctaggctcactaaacattctactactcaccctcactgcccaagaactatcaaactcctgagccaacaacttaatatgactagcttacacaatagcttttatagtaaagatacctctttacggactccacttatgactccctaaagcccatgtcgaagcccccatcgctgggtcaatagtacttgccgcagtactcttgaagctaggcggctatggtataatacgcctcacactcattctcaaccccctgacaaaacacatagcctaccccttccttgtactatccctatgaggcataattataacaagctccatctgcctacgacaaacagacctaaaatcgctcattgcatactcttcaatcagccacatagccctcgtagtaacagccattctcatccaaaccccctgaagcttcaccggcgcagtcattctcataatcgcccacggacttacatcctcattactattctgcctagcaaactcaaactacgaacgcactcacagtcgcatcataatcctctctcaaggacttcaaactctactcccactaatagctttttgatgacttctagcaagcctcgctaacctcgccttaccccccactattaacctactgggagaactctctgtgctagtaaccacattctcctgatcaaatatcactctcctacttacaggactcaacatactagtcacagccctatactccctctacatatttaccacaacacaatggggctcactcacccaccacattaacaacataaaaccctcattcacacgagaaaacaccctcatgttcatacacctatcccccattctcctcctatccctcaaccccgacatcattaccgggttttcctcttgtaaatatagtttaaccaaaacatcagattgtgaatctgacaacagaggcttacgaccccttatttaccgagaaagctcacaagaactgctaactcatgcccccatgtctaacaacatggctttctcaacttttaaaggataacagctatccattggtcttaggccccaagaattttggtgcaactccaaataaaagtaataaccatgcacactactataaccaccctaaccctaacttccctaattccccccatccttaccaccctcgttaaccctaacaaaaaaaactcatacccccattatgtaaaatccattgtcgcatccacctttattatcagtctcttccccacaacaatattcatgtgcctagaccaagaagttattatctcgaactgacactgagccacaacccaaacaacccagctctccctaagcttcaaactagactacttctccataatattcatccctgtagcattgttcgttacatggtccatcatagaattctcactgtgatatataaactcagacccaaacattaatcagttcttcaaatatctactcatcttcctaattaccatactaatcttagttaccgctaacaacctattccaactgttcatcggctgagagggcgtaggaattatatccttcttgctcatcagttgatgatacgcccgagcagatgccaacacagcagccattcaagcaatcctatacaaccgtatcggcgatatcggtttcatcctcgccttagcatgatttatcctacactccaactcatgagacccacaacaaatagcccttctaaacgccaatccaagcctcaccccactactaggcctcctcctagcagcagcaggcaaatcagcccaattaggtctccacccctgactcccctcagccatagaaggccccaccccagtctcagccctactccactcaagcactatagttgtagcaggaatcttcttactcatccgcttccaccccctagcagaaaatagcccactaatccaaactctaacactatgcttaggcgctatcaccactctgttcgcagcagtctgcgcccttacacaaaatgacatcaaaaaaatcgtagccttctccacttcaagtcaactaggactcataatagttacaatcggcatcaaccaaccacacctagcattcctgcacatctgtacccacgccttcttcaaagccatactatttatgtgctccgggtccatcatccacaaccttaacaatgaacaagatattcgaaaaataggaggactactcaaaaccatacctctcacttcaacctccctcaccattggcagcctagcattagcaggaatacctttcctcacaggtttctactccaaagaccacatcatcgaaaccgcaaacatatcatacacaaacgcctgagccctatctattactctcatcgctacctccctgacaagcgcctatagcactcgaataattcttctcaccctaacaggtcaacctcgcttccccacccttactaacattaacgaaaataaccccaccctactaaaccccattaaacgcctggcagccggaagcctattcgcaggatttctcattactaacaacatttcccccgcatcccccttccaaacaacaatccccctctacctaaaactcacagccctcgctgtcactttcctaggacttctaacagccctagacctcaactacctaaccaacaaacttaaaataaaatccccactatgcacattttatttctccaacatactcggattctaccctagcatcacacaccgcacaatcccctatctaggccttcttacgagccaaaacctgcccctactcctcctagacctaacctgactagaaaagctattacctaaaacaatttcacagcaccaaatctccacctccatcatcacctcaacccaaaaaggcataattaaactttacttcctctctttcttcttcccactcatcctaaccctactcctaatcacataacctattcccccgagcaatttcaattacaatatatacaccaacaaacaatgttcaaccagtaactactactaatcaacgcccataatcatacaaagcccccgcaccaataggatcctcccgaatcaaccctgacccctctccttcataaattattcagcttcctacactattaaagtttaccacaaccaccaccccatcatactctttcacccacagcaccaatcctacctccatcgctaaccccactaaaacactcaccaagacctcaacccctgacccccatgcctcaggatactcctcaatagccatcgctgtagtatatccaaagacaaccatcattccccctaaataaattaaaaaaactattaaacccatataacctcccccaaaattcagaataataacacacccgaccacaccgctaacaatcaatactaaacccccataaataggagaaggcttagaagaaaaccccacaaaccccattactaaacccacactcaacagaaacaaagcatacatcattattctcgcacggactacaaccacgaccaatgatatgaaaaaccatcgttgtatttcaactacaagaacaccaatgaccccaatacgcaaaattaaccccctaataaaattaattaaccactcactcatcgacctccccaccccatccaacatctccgcatgatgaaacttcggctcactccttggcgcctgcctgatcctccaaatcaccacaggactattcctagccatgcactactcaccagacgcctcaaccgccttttcatcaatcgcccacatcactcgagacgtaaattatggctgaatcatccgctaccttcacgccaatggcgcctcaatattctttatctgcctcttcctacacatcgggcgaggcctatattacggatcatttctctactcagaaacctgaaacatcggcattatcctcctgcttgcaactatagcaacagccttcataggctatgtcctcccgtgaggccaaatatcattctgaggggccacagtaattacaaacttactatccgccatcccatacattgggacagacctagttcaatgaatctgaggaggctactcagtagacagtcccaccctcacacgattctttacctttcacttcatcttgcccttcattattgcagccctagcagcactccacctcctattcttgcacgaaacgggatcaaacaaccccctaggaatcacctcccattccgataaaatcaccttccacccttactacacaatcaaagacgccctcggcttacttctcttccttctctccttaatgacattaacactattctcaccagacctcctaggcgacccagacaattataccctagccaaccccttaaacacccctccccacatcaagcccgaatgatatttcctattcgcctacacaattctccgatccgtccctaacaaactaggaggcgtccttgccctattactatccatcctcatcctagcaataatccccatcctccatatatccaaacaacaaagcataatatttcgcccactaagccaatcactttattgactcctagccgcagacctcctcattctaacctgaatcggaggacaaccagtaagctacccttttaccatcattggacaagtagcatccgtactatacttcacaacaatcctaatcctaataccaactatctccctaattgaaaacaaaatactcaaatgggcctgtccttgtagtataaactaatacaccagtcttgtaagccggagatgaaaacctttttccaaggacaaatcagagaaaaagtctttaactccaccattagcacccaaagctaagattctaatttaaactattctctgttctttcatggggaagcagatttgggtaccacccaagtattgactcacccatcaacaaccgctatgtatttcgtacattactgccagccaccatgaatattgtacggtaccataaatacttgaccacctgtagtacataaaaacccaatccacatcaaaaccccctccccatgcttacaagcaagtacagcaatcaaccctcaactatcacacatcaactgcaactccaaagccacccctcacccactaggataccaacaaacctacccacccttaacagtacatagtacataaagccatttaccgtacatagcacattacagtcaaatcccttctcgtccccatggatgacccccctcagataggggtcccttgaccaccatcctccgtgaaatcaatatcccgcacaagagtgctactctcctcgctccgggcccataacacttgggggtagctaaagtgaactgtatccgacatctggttcctacttcagggccataaagcctaaatagcccacacgttccccttaaataagacatcacgatg

SEQ ID NO: 57 - DNA, 16571 bp, Homo sapiens mitochondrial
  3109: "n" refers to a nucleotide at position 3107 of the Cambridge Reference Sequence (CRS, Anderson et al. 1981 Nature 290:457-465), later determined to be absent from the human mtDNA sequence according to the revised CRS (rCRS, Andrews et al. 1999 Nature Genetics 23:147); "n" therefore represents a single nucleotide deletion at a position corresponding to nucleotide 3107 of SEQ ID NO:1 as provided herein.
gatcacaggtctatcaccctattaaccactcacgggagctctccatgcatttggtattttcgtctggggggtatgcacgcgatagcattgcgagacgctggagccggagcaccctatgtcgcagtatctgtctttgattcctgcctcatcctattatttatcgcacctacgttcaatattacaggcgaacatacttactaaagtgtgttaattaattaatgcttgtaggacataataataacaattgaatgtctgcacagccgctttccacacagacatcataacaaaaaatttccaccaaaccccccctcccccccgcttctggccacagcacttaaacacatctctgccaaaccccaaaaacaaagaaccctaacaccagcctaaccagatttcaaattttatcttttggcggtatgcacttttaacagtcaccccccaactaacacattattttcccctcccactcccatactactaatctcatcaatacaacccccgcccatcctacccagcacacacacaccgctgctaaccccataccccgaaccaaccaaaccccaaagacaccccccacagtttatgtagcttacctcctcaaagcaatacactgaaaatgtttagacgggctcacatcaccccataaacaaataggtttggtcctagcctttctattagctcttagtaagattacacatgcaagcatccccgttccagtgagttcaccctctaaatcaccacgatcaaaagggacaagcatcaagcacgcagcaatgcagctcaaaacgcttagcctagccacacccccacgggaaacagcagtgattaacctttagcaataaacgaaagtttaactaagctatactaaccccagggttggtcaatttcgtgccagccaccgcggtcacacgattaacccaagtcaatagaagccggcgtaaagagtgttttagatcaccccctccccaataaagctaaaacccacctgagttgtaaaaaactccagttgacacaaaatagactacgaaagtggctttaacatatctgaacacacaatagctaagacccaaactgggattagataccccactatgcttagccctaaacctcaacagttaaatcaacaaaactgctcgccagaacactacgagccacagcttaaaactcaaaggacctggcggtgcttcatatccctctagaggagcctgttctgtaatcgataaaccccgatcaacctcaccacctcttgctcagcctatataccgccatcttcagcaaaccctgatgaaggctacaaagtaagcgcaagtacccacgtaaagacgttaggtcaaggtgtagcccatgaggtggcaagaaatgggctacattttctaccccagaaaactacgatagcccttatgaaacttaagggtcgaaggtggatttagcagtaaactgagagtagagtgcttagttgaacagggccctgaagcgcgtacacaccgcccgtcaccctcctcaagtatacttcaaaggacatttaactaaaacccctacgcatttatatagaggagacaagtcgtaacatggtaagtgtactggaaagtgcacttggacgaaccagagtgtagcttaacacaaagcacccaacttacacttaggagatttcaacttaacttgaccgctctgagctaaacctagccccaaacccactccaccttactaccagacaaccttagccaaaccatttacccaaataaagtataggcgatagaaattgaaacctggcgcaatagatatagtaccgcaagggaaagatgaaaaattataaccaagcataatatagcaaggactaacccctataccttctgcataatgaattaactagaaataactttgcaaggagagccaaagctaagacccccgaaaccagacgagctacctaagaacagctaaaagagcacacccgtctatgtagcaaaatagtgggaagatttataggtagaggcgacaaacctaccgagcctggtgatagctggttgtccaagatagaatcttagttcaactttaaatttgcccacagaaccctctaaatccccttgtaaatttaactgttagtccaaagaggaacagctctttggacactaggaaaaaaccttgtagagagagtaaaaaatttaacacccatagtaggcctaaaagcagccaccaattaagaaagcgttcaagctcaacacccactacctaaaaaatcccaaacatataactgaactcctcacacccaattggaccaatctatcaccctatagaagaactaatgttagtataagtaacatgaaaacattctcctccgcataagcctgcgtcagattaaaacactgaactgacaattaacagcccaatatctacaatcaaccaacaagtcattattaccctcactgtcaacccaacacaggcatgctcataaggaaaggttaaaaaaagtaaaaggaactcggcaaatcttaccccgcctgtttaccaaaaacatcacctctagcatcaccagtattagaggcaccgcctgcccagtgacacatgtttaacggccgcggtaccctaaccgtgcaaaggtagcataatcacttgttccttaaatagggacctgtatgaatggctccacgagggttcagctgtctcttacttttaaccagtgaaattgacctgcccgtgaagaggcgggcataacacagcaagacgagaagaccctatggagctttaatttattaatgcaaacagtacctaacaaacccacaggtcctaaactaccaaacctgcattaaaaatttcggttggggcgacctcggagcagaacccaacctccgagcagtacatgctaagacttcaccagtcaaagcgaactactatactcaattgatccaataacttgaccaacggaacaagttaccctagggataacagcgcaatcctattctagagtccatatcaacaatagggtttacgacctcgatgttggatcaggacatcccaatggtgcagccgctattaaaggttcgtttgttcaacgattaaagtcctacgtgatctgagttcagaccggagtaatccaggtcggtttctatctacnttcaaattcctccctgtacgaaaggacaagagaaataaggcctacttcacaaagcgccttcccccgtaaatgatatcatctcaacttagtattatacccacacccacccaagaacagggtttgttaagatggcagagcccggtaatcgcataaaacttaaaactttacagtcagaggttcaattcctcttcttaacaacatacccatggccaacctcctactcctcattgtacccattctaatcgcaatggcattcctaatgcttaccgaacgaaaaattctaggctatatacaactacgcaaaggccccaacgttgtaggcccctacgggctactacaacccttcgctgacgccataaaactcttcaccaaagagcccctaaaacccgccacatctaccatcaccctctacatcaccgccccgaccttagctctcaccatcgctcttctactatgaacccccctccccatacccaaccccctggtcaacctcaacctaggcctcctatttattctagccacctctagcctagccgtttactcaatcctctgatcagggtgagcatcaaactcaaactacgccctgatcggcgcactgcgagcagtagcccaaacaatctcatatgaagtcaccctagccatcattctactatcaacattactaataagtggctcctttaacctctccacccttatcacaacacaagaacacctctgattactcctgccatcatgacccttggccataatatgatttatctccacactagcagagaccaaccgaacccccttcgaccttgccgaaggggagtccgaactagtctcaggcttcaacatcgaatacgccgcaggccccttcgccctattcttcatagccgaatacacaaacattattataataaacaccctcaccactacaatcttcctaggaacaacatatgacgcactctcccctgaactctacacaacatattttgtcaccaagaccctacttctaacctccctgttcttatgaattcgaacagcatacccccgattccgctacgaccaactcatacacctcctatgaaaaaacttcctaccactcaccctagcattacttatatgatatgtctccatacccattacaatctccagcattccccctcaaacctaagaaatatgtctgataaaagagttactttgatagagtaaataataggagcttaaacccccttatttctaggactatgagaatcgaacccatccctgagaatccaaaattctccgtgccacctatcacaccccatcctaaagtaaggtcagctaaataagctatcgggcccataccccgaaaatgttggttatacccttcccgtactaattaatcccctggcccaacccgtcatctactctaccatctttgcaggcacactcatcacagcgctaagctcgcactgattttttacctgagtaggcctagaaataaacatgctagcttttattccagttctaaccaaaaaaataaaccctcgttccacagaagctgccatcaagtatttcctcacgcaagcaaccgcatccataatccttctaatagctatcctcttcaacaatatactctccggacaatgaaccataaccaatactaccaatcaatactcatcattaataatcataatggctatagcaataaaactaggaatagccccctttcacttctgagtcccagaggttacccaaggcacccctctgacatccggcctgcttcttctcacatgacaaaaactagcccccatctcaatcatataccaaatctctccctcactaaacgtaagccttctcctcactctctcaatcttatccatcatagcaggcagttgaggtggattaaaccaaacccagctacgcaaaatcttagcatactcctcaattacccacataggatgaataatagcagttctaccgtacaaccctaacataaccattcttaatttaactatttatattatcctaactactaccgcattcctactactcaacttaaactccagcaccacgaccctactactatctcgcacctgaaacaagctaacatgactaacacccttaattccatccaccctcctctccctaggaggcctgcccccgctaaccggctttttgcccaaatgggccattatcgaagaattcacaaaaaacaatagcctcatcatccccaccatcatagccaccatcaccctccttaacctctacttctacctacgcctaatctactccacctcaatcacactactccccatatctaacaacgtaaaaataaaatgacagtttgaacatacaaaacccaccccattcctccccacactcatcgcccttaccacgctactcctacctatctccccttttatactaataatcttatagaaatttaggttaaatacagaccaagagccttcaaagccctcagtaagttgcaatacttaatttctgtaacagctaaggactgcaaaaccccactctgcatcaactgaacgcaaatcagccactttaattaagctaagcccttactagaccaatgggacttaaacccacaaacacttagttaacagctaagcaccctaatcaactggcttcaatctacttctcccgccgccgggaaaaaaggcgggagaagccccggcaggtttgaagctgcttcttcgaatttgcaattcaatatgaaaatcacctcggagctggtaaaaagaggcctaacccctgtctttagatttacagtccaatgcttcactcagccattttacctcacccccactgatgttcgccgaccgttgactattctctacaaaccacaaagacattggaacactatacctattattcggcgcatgagctggagtcctaggcacagctctaagcctccttattcgagccgagctgggccagccaggcaaccttctaggtaacgaccacatctacaacgttatcgtcacagcccatgcatttgtaataatcttcttcatagtaatacccatcataatcggaggctttggcaactgactagttcccctaataatcggtgcccccgatatggcgtttccccgcataaacaacataagcttctgactcttacctccctctctcctactcctgctcgcatctgctatagtggaggccggagcaggaacaggttgaacagtctaccctcccttagcagggaactactcccaccctggagcctccgtagacctaaccatcttctccttacacctagcaggtgtctcctctatcttaggggccatcaatttcatcacaacaattatcaatataaaaccccctgccataacccaataccaaacgcccctcttcgtctgatccgtcctaatcacagcagtcctacttctcctatctctcccagtcctagctgctggcatcactatactactaacagaccgcaacctcaacaccaccttcttcgaccccgccggaggaggagaccccattctataccaacacctattctgatttttcggtcaccctgaagtttatattcttatcctaccaggcttcggaataatctcccatattgtaacttactactccggaaaaaaagaaccatttggatacataggtatggtctgagctatgatatcaattggcttcctagggtttatcgtgtgagcacaccatatatttacagtaggaatagacgtagacacacgagcatatttcacctccgctaccataatcatcgctatccccaccggcgtcaaagtatttagctgactcgccacactccacggaagcaatatgaaatgatctgctgcagtgctctgagccctaggattcatctttcttttcaccgtaggtggcctgactggcattgtattagcaaactcatcactagacatcgtactacacgacacgtactacgttgtagcccacttccactatgtcctatcaataggagctgtatttgccatcataggaggcttcattcactgatttcccctattctcaggctacaccctagaccaaacctacgccaaaatccatttcactatcatattcatcggcgtaaatctaactttcttcccacaacactttctcggcctatccggaatgccccgacgttactcggactaccccgatgcatacaccacatgaaacatcctatcatctgtaggctcattcatttctctaacagcagtaatattaataattttcatgatttgagaagccttcgcttcgaagcgaaaagtcctaatagtagaagaaccctccataaacctggagtgactatatggatgccccccaccctaccacacattcgaagaacccgtatacataaaatctagacaaaaaaggaaggaatcgaaccccccaaagctggtttcaagccaaccccatggcctccatgactttttcaaaaaggtattagaaaaaccatttcataactttgtcaaagttaaattataggctaaatcctatatatcttaatggcacatgcagcgcaagtaggtctacaagacgctacttcccctatcatagaagagcttatcacctttcatgatcacgccctcataatcattttccttatctgcttcctagtcctgtatgcccttttcctaacactcacaacaaaactaactaatactaacatctcagacgctcaggaaatagaaaccgtctgaactatcctgcccgccatcatcctagtcctcatcgccctcccatccctacgcatcctttacataacagacgaggtcaacgatccctcccttaccatcaaatcaattggccaccaatggtactgaacctacgagtacaccgactacggcggactaatcttcaactcctacatacttcccccattattcctagaaccaggcgacctgcgactccttgacgttgacaatcgagtagtactcccgattgaagcccccattcgtataataattacatcacaagacgtcttgcactcatgagctgtccccacattaggcttaaaaacagatgcaattcccggacgtctaaaccaaaccactttcaccgctacacgaccgggggtatactacggtcaatgctctgaaatctgtggagcaaaccacagtttcatgcccatcgtcctagaattaattcccctaaaaatctttgaaatagggcccgtatttaccctatagcaccccctctaccccctctagagcccactgtaaagctaacttagcattaaccttttaagttaaagattaagagaaccaacacctctttacagtgaaatgccccaactaaatactaccgtatggcccaccataattacccccatactccttacactattcctcatcacccaactaaaaatattaaacacaaactaccacctacctccctcaccaaagcccataaaaataaaaaattataacaaaccctgagaaccaaaatgaacgaaaatctgttcgcttcattcattgcccccacaatcctaggcctacccgccgcagtactgatcattctatttccccctctattgatccccacctccaaatatctcatcaacaaccgactaatcaccacccaacaatgactaatcaaactaacctcaaaacaaatgataaccatacacaacactaaaggacgaacctgatctcttatactagtatccttaatcatttttattgccacaactaacctcctcggactcctgcctcactcatttacaccaaccacccaactatctataaacctagccatggccatccccttatgagcgggcgcagtgattataggctttcgctctaagattaaaaatgccctagcccacttcttaccacaaggcacacctacaccccttatccccatactagttattatcgaaaccatcagcctactcattcaaccaatagccctggccgtacgcctaaccgctaacattactgcaggccacctactcatgcacctaattggaagcgccaccctagcaatatcaaccattaaccttccctctacacttatcatcttcacaattctaattctactgactatcctagaaatcgctgtcgccttaatccaagcctacgttttcacacttctagtaagcctctacctgcacgacaacacataatgacccaccaatcacatgcctatcatatagtaaaacccagcccatgacccctaacaggggccctctcagccctcctaatgacctccggcctagccatgtgatttcacttccactccataacgctcctcatactaggcctactaaccaacacactaaccatataccaatgatggcgcgatgtaacacgagaaagcacataccaaggccaccacacaccacctgtccaaaaaggccttcgatacgggataatcctatttattacctcagaagtttttttcttcgcaggatttttctgagccttttaccactccagcctagcccctaccccccaattaggagggcactggcccccaacaggcatcaccccgctaaatcccctagaagtcccactcctaaacacatccgtattactcgcatcaggagtatcaatcacctgagctcaccatagtctaatagaaaacaaccgaaaccaaataattcaagcactgcttattacaattttactgggtctctattttaccctcctacaagcctcagagtacttcgagtctcccttcaccatttccgacggcatctacggctcaacattttttgtagccacaggcttccacggacttcacgtcattattggctcaactttcctcactatctgcttcatccgccaactaatatttcactttacatccaaacatcactttggcttcgaagccgccgcctgatactggcattttgtagatgtggtttgactatttctgtatgtctccatctattgatgagggtcttactcttttagtataaatagtaccgttaacttccaattaactagttttgacaacattcaaaaaagagtaataaacttcgccttaattttaataatcaacaccctcctagccttactactaataattattacattttgactaccacaactcaacggctacatagaaaaatccaccccttacgagtgcggcttcgaccctatatcccccgcccgcgtccctttctccataaaattcttcttagtagctattaccttcttattatttgatctagaaattgccctccttttacccctaccatgagccctacaaacaactaacctgccactaatagttatgtcatccctcttattaatcatcatcctagccctaagtctggcctatgagtgactacaaaaaggattagactgaaccgaattggtatatagtttaaacaaaacgaatgatttcgactcattaaattatgataatcatatttaccaaatgcccctcatttacataaatattatactagcatttaccatctcacttctaggaatactagtatatcgctcacacctcatatcctccctactatgcctagaaggaataatactatcgctgttcattatagctactctcataaccctcaacacccactccctcttagccaatattgtgcctattgccatactagtctttgccgcctgcgaagcagcggtgggcctagccctactagtctcaatctccaacacatatggcctagactacgtacataacctaaacctactccaatgctaaaactaatcgtcccaacaattatattactaccactgacatgactttccaaaaaacacataatttgaatcaacacaaccacccacagcctaattattagcatcatccctctactattttttaaccaaatcaacaacaacctatttagctgttccccaaccttttcctccgaccccctaacaacccccctcctaatactaactacctgactcctacccctcacaatcatggcaagccaacgccacttatccagtgaaccactatcacgaaaaaaactctacctctctatactaatctccctacaaatctccttaattataacattcacagccacagaactaatcatattttatatcttcttcgaaaccacacttatccccaccttggctatcatcacccgatgaggcaaccagccagaacgcctgaacgcaggcacatacttcctattctacaccctagtaggctcccttcccctactcatcgcactaatttacactcacaacaccctaggctcactaaacattctactactcactctcactgcccaagaactatcaaactcctgagccaacaacttaatatgactagcttacacaatagcttttatagtaaagatacctctttacggactccacttatgactccctaaagcccatgtcgaagcccccatcgctgggtcaatagtacttgccgcagtactcttaaaactaggcggctatggtataatacgcctcacactcattctcaaccccctgacaaaacacatagcctaccccttccttgtactatccctatgaggcataattataacaagctccatctgcctacgacaaacagacctaaaatcgctcattgcatactcttcaatcagccacatagccctcgtagtaacagccattctcatccaaaccccctgaagcttcaccggcgcagtcattctcataatcgcccacgggcttacatcctcattactattctgcctagcaaactcaaactacgaacgcactcacagtcgcatcataatcctctctcaaggacttcaaactctactcccactaatagctttttgatgacttctagcaagcctcgctaacctcgccttaccccccactattaacctactgggagaactctctgtgctagtaaccacgttctcctgatcaaatatcactctcctacttacaggactcaacatactagtcacagccctatactccctctacatatttaccacaacacaatggggctcactcacccaccacattaacaacataaaaccctcattcacacgagaaaacaccctcatgttcatacacctatcccccattctcctcctatccctcaaccccgacatcattaccgggttttcctcttgtaaatatagtttaaccaaaacatcagattgtgaatctgacaacagaggcttacgaccccttatttaccgagaaagctcacaagaactgctaactcatgcccccatgtctaacaacatggctttctcaacttttaaaggataacagctatccattggtcttaggccccaaaaattttggtgcaactccaaataaaagtaataaccatgcacactactataaccaccctaaccctgacttccctaattccccccatccttaccaccctcgttaaccctaacaaaaaaaactcatacccccattatgtaaaatccattgtcgcatccacctttattatcagtctcttccccacaacaatattcatgtgcctagaccaagaagttattatctcgaactgacactgagccacaacccaaacaacccagctctccctaagcttcaaactagactacttctccataatattcatccctgtagcattgttcgttacatggtccatcatagaattctcactgtgatatataaactcagacccaaacattaatcagttcttcaaatatctactcatcttcctaattaccatactaatcttagttaccgctaacaacctattccaactgttcatcggctgagagggcgtaggaattatatccttcttgctcatcagttgatgatacgcccgagcagatgccaacacagcagccattcaagcaatcctatacaaccgtatcggcgatatcggtttcatcctcgccttagcatgatttatcctacactccaactcatgagacccacaacaaatagcccttctaaacgctaatccaagcctcaccccactactaggcctcctcctagcagcagcaggcaaatcagcccaattaggtctccacccctgactcccctcagccatagaaggccccaccccagtctcagccctactccactcaagcactatagttgtagcaggaatcttcttactcatccgcttccaccccctagcagaaaatagcccactaatccaaactctaacactatgcttaggcgctatcaccactctgttcgcagcagtctgcgcccttacacaaaatgacatcaaaaaaatcgtagccttctccacttcaagtcaactaggactcataatagttacaatcggcatcaaccaaccacacctagcattcctgcacatctgtacccacgccttcttcaaagccatactatttatgtgctccgggtccatcatccacaaccttaacaatgaacaagatattcgaaaaataggaggactactcaaaaccatacctctcacttcaacctccctcaccattggcagcctagcattagcaggaatacctttcctcacaggtttctactccaaagaccacatcatcgaaaccgcaaacatatcatacacaaacgcctgagccctatctattactctcatcgctacctccctgacaagcgcctatagcactcgaataattcttctcaccctaacaggtcaacctcgcttccccacccttactaacattaacgaaaataaccccaccctactaaaccccattaaacgcctggcagccggaagcctattcgcaggatttctcattactaacaacatttcccccgcatcccccttccaaacaacaatccccctctacctaaaactcacagccctcgctgtcactttcctaggacttctaacagccctagacctcaactacctaaccaacaaacttaaaataaaatccccactatgcacattttatttctccaacatactcggattctaccctagcatcacacaccgcacaatcccctatctaggccttcttacgagccaaaacctgcccctactcctcctagacctaacctgactagaaaagctattacctaaaacaatttcacagcaccaaatctccacctccatcatcacctcaacccaaaaaggcataattaaactttacttcctctctttcttcttcccactcatcctaaccctactcctaatcacataacctattcccccgagcaatctcaattacaatatatacaccaacaaacaatgttcaaccagtaactactactaatcaacgcccataatcatacaaagcccccgcaccaataggatcctcccgaatcaaccctgacccctctccttcataaattattcagcttcctacactattaaagtttaccacaaccaccaccccatcatactctttcacccacagcaccaatcctacctccatcgctaaccccactaaaacactcaccaagacctcaacccctgacccccatgcctcaggatactcctcaatagccatcgctgtagtatatccaaagacaaccatcattccccctaaataaattaaaaaaactattaaacccatataacctcccccaaaattcagaataataacacacccgaccacaccgctaacaatcaatactaaacccccataaataggagaaggcttagaagaaaaccccacaaaccccattactaaacccacactcaacagaaacaaagcatacatcattattctcgcacggactacaaccacgaccaatgatatgaaaaaccatcgttgtatttcaactacaagaacaccaatgaccccaatacgcaaaactaaccccctaataaaattaattaaccactcattcatcgacctccccaccccatccaacatctccgcatgatgaaacttcggctcactccttggcgcctgcctgatcctccaaatcaccacaggactattcctagccatgcactactcaccagacgcctcaaccgccttttcatcaatcgcccacatcactcgagacgtaaattatggctgaatcatccgctaccttcacgccaatggcgcctcaatattctttatctgcctcttcctacacatcgggcgaggcctatattacggatcatttctctactcagaaacctgaaacatcggcattatcctcctgcttgcaactatagcaacagccttcataggctatgtcctcccgtgaggccaaatatcattctgaggggccacagtaattacaaacttactatccgccatcccatacattgggacagacctagttcaatgaatctgaggaggctactcagtagacagtcccaccctcacacgattctttacctttcacttcatcttgcccttcattattgcagccctagcagcactccacctcctattcttgcacgaaacgggatcaaacaaccccctaggaatcacctcccattccgataaaatcaccttccacccttactacacaatcaaagacgccctcggcttacttctcttccttctctccttaatgacattaacactattctcaccagacctcctaggcgacccagacaattataccctagccaaccccttaaacacccctccccacatcaagcccgaatgatatttcctattcgcctacacaattctccgatccgtccctaacaaactaggaggcgtccttgccctattactatccatcctcatcctagcaataatccccatcctccatatatccaaacaacaaagcataatatttcgcccactaagccaatcactttattgactcctagccgcagacctcctcattctaacctgaatcggaggacaaccagtaagctacccttttaccatcattggacaagtagcatccgtactatacttcacaacaatcctaatcctaataccaactatctccctaattgaaaacaaaatactcaaatgggcctgtccttgtagtataaactaatacaccagtcttgtaagccggagatgaaaacctttttccaaggacaaatcagagaaaaagtctttaactccaccattagcacccaaagctaagattctaatttaaactattctctgttctttcatggggaagcagatttgggtaccacccaagtattgactcacccatcaacaaccgctatgtatttcgtacattactgccagccaccatgaatattgtacggtaccataaatacttgaccacctgtagtacataaaaacccaatccacatcaaaaccccctccccatgcttacaagcaagtacagcaatcaaccctcaactatcacacatcaactgcaactccaaagccacccctcacccactaggataccaacaaacctacccacccttaacagtacatagtacataaagccatttaccgtacatagcacattacagtcaaatcccttctcgtccccatggatgacccccctcagataggggtcccttgaccaccatcctccgtgaaatcaatatcccgcacaagagtgctactctcctcgctccgggcccataacacttgggggtagctaaagtgaactgtatccgacatctggttcctacttcagggccataaagcctaaatagcccacacgttccccttaaataagacatcacgatg

SEQ ID NO: 58 - DNA, 16570 bp, Homo sapiens mitochondrial
  3108: "n" refers to a nucleotide at position 3107 of the Cambridge Reference Sequence (CRS, Anderson et al. 1981 Nature 290:457-465), later determined to be absent from the human mtDNA sequence according to the revised CRS (rCRS, Andrews et al. 1999 Nature Genetics 23:147); "n" therefore represents a single nucleotide deletion at a position corresponding to nucleotide 3107 of SEQ ID NO:1 as provided herein.
gatcacaggtctatcaccctattaaccactcacgggagctctccatgcatttggtattttcgtctggggggtatgcacgcgatagcattgcgagacgctggagccggagcaccctatgtcgcagtatctgtctttgattcctgcctcatcctattatttatcgcacctacgttcaatattacaggcgaacatacttactaaagtgtgttaattaattaatgcttgtaggacataataataacaattgaatgtctgcacagccgctttccacacagacatcataacaaaaaatttccaccaaaccccccctcccccgccttctggccacagcacttaaacacatctctgccaaaccccaaaaacaaagaaccctaacaccagcctaaccagatttcaaattttatcttttggcggtatgcacttttaacagtcaccccccaactaacacattattttcccctcccactcccatactactaatctcatcaatacaacccccggccatcctacccagcacacacacaccgctgctaaccccataccccgaaccaaccaaaccccaaagacaccccccacagtttatgtagcttacctcctcaaagcaatacactgaaaatgtttagacgggctcacatcaccccataaacaaataggtttggtcctagcctttctattagctcttagtaagattacacatgcaagcatccccgttccagtgagttcaccctctaaatcaccacgatcaaaagggacaagcatcaagcacgcagcaatgcagctcaaaacgcttagcctagccacacccccacgggaaacagcagtgattaacctttagcaataaacgaaagtttaactaagctatactaaccccagggttggtcaatttcgtgccagccaccgcggtcacacgattaacccaagtcaatagaagccggcgtaaagagtgttttagatcaccccctccccaataaagctaaaactcacctgagttgtaaaaaactccagttgacacaaaatagactacgaaagtggctttaacatatctgaacacacaatagctaagacccaaactgggattagataccccactatgcttagccctaaacctcaacagttaaatcaacaaaactgctcgccagaacactacgagccacagcttaaaactcaaaggacctggcggtgcttcatatccctctagaggagcctgttctgtaatcgataaaccccgatcaacctcaccacctcttgctcagcctatataccgccatcttcagcaaaccctgatgaaggctacaaagtaagcgcaagtacccacgtaaagacgttaggtcaaggtgtagcccatgaggtggcaagaaatgggctacattttctaccccagaaaactacgatagcccttatgaaacttaagggtcgaaggtggatttagcagtaaactgagagtagagtgcttagttgaacagggccctgaagcgcgtacacaccgcccgtcaccctcctcaagtatacttcaaaggacatttaactaaaacccctacgcatttatatagaggagacaagtcgtaacatggtaagtgtactggaaagtgcacttggacgaaccagagtgtagcttaacacaaagcacccaacttacacttaggagatttcaacttaacttgaccgctctgagctaaacctagccccaaacccactccaccttactaccagacaaccttagccaaaccatttacccaaataaagtataggcgatagaaattgaaacctggcgcaatagatatagtaccgcaagggaaagatgaaaaattataaccaagcataatatagcaaggactaacccctataccttctgcataatgaattaactagaaataactttgcaaggagagccaaagctaagacccccgaaaccagacgagctacctaagaacagctaaaagagcacacccgtctatgtagcaaaatagtgggaagatttataggtagaggcgacaaacctaccgagcctggtgatagctggttgtccaagatagaatcttagttcaactttaaatttgcccacagaaccctctaaatccccttgtaaatttaactgttagtccaaagaggaacagctctttggacactaggaaaaaaccttgtagagagagtaaaaaatttaacacccatagtaggcctaaaagcagccaccaattaagaaagcgttcaagctcaacacccactacctaaaaaatcccaaacatataactgaactcctcacacccaattggaccaatctatcaccctatagaagaactaatgttagtataagtaacatgaaaacattctcctccgcataagcctgcgtcagattaaaacactgaactgacaattaacagcccaatatctacaatcaaccaacaagtcattattaccctcactgtcaacccaacacaggcatgctcataaggaaaggttaaaaaaagtaaaaggaactcggcaaatcttaccccgcctgtttaccaaaaacatcacctctagcatcaccagtattagaggcaccgcctgcccagtgacacatgtttaacggccgcggtaccctaaccgtgcaaaggtagcataatcacttgttccttaaatagggacctgtatgaatggctccacgagggttcagctgtctcttacttttaaccagtgaaattgacctgcccgtgaagaggcgggcataacacagcaagacgagaagaccctatggagctttaatttattaatgcaaacagtacctaacaaacccacaggtcctaaactaccaaacctgcattaaaaatttcggttggggcgacctcggagcagaacccaacctccgagcagtacatgctaagacttcaccagtcaaagcgaactactatactcaattgatccaataacttgaccaacggaacaagttaccctagggataacagcgcaatcctattctagagtccatatcaacaatagggtttacgacctcgatgttggatcaggacatcccaatggtgcagccgctattaaaggttcgtttgttcaacgattaaagtcctacgtgatctgagttcagaccggagtaatccaggtcggtttctatctacnttcaaattcctccctgtacgaaaggacaagagaaataaggcctacttcacaaagcgccttcccccgtaaatgatatcatctcaacttagtattatacccacacccacccaagaacagggtttgttaagatggcagagcccggtaatcgcataaaacttaaaactttacagtcagaggttcaattcctcttcttaacaacatacccatggccaacctcctactcctcattgtacccattctaatcgcaatggcattcctaatgcttaccgaacgaaaaattctaggctatatacaactacgcaaaggccccaacgttgtaggcccctacgggctactacaacccttcgctgacgccataaaactcttcaccaaagagcccctaaaacccgccacatctaccatcaccctctacatcaccgccccgaccttagctctcaccatcgctcttctactatgaacccccctccccatacccaaccccctggtcaacctcaacctaggcctcctatttattctagccacctctagcctagccgtttactcaatcctctgatcagggtgagcatcaaactcaaactacgccctgatcggcgcactgcgagcagtagcccaaacaatctcatatgaagtcaccctagccatcattctactatcaacattactaataagtggctcctttaacctctccacccttatcacaacacaagaacacctctgattactcctgccatcatgacccttggccataatatgatttatctccacactagcagagaccaaccgaacccccttcgaccttgccgaaggggagtccgaactagtctcaggcttcaacatcgaatacgccgcaggccccttcgccctattcttcatagccgaatacacaaacattattataataaacaccctcaccactacaatcttcctaggaacaacatatgacgcactctcccctgaactctacacaacatattttgtcaccaagaccctacttctaacctccctgttcttatgaattcgaacagcatacccccgattccgctacgaccaactcatacacctcctatgaaaaaacttcctaccactcaccctagcattacttatatgatatgtctccatacccattacaatctccagcattccccctcaaacctaagaaatatgtctgataaaagagttactttgatagagtaaataataggagcttaaacccccttatttctaggactatgagaatcgaacccatccctgagaatccaaaattctccgtgccacctatcacaccccatcctaaagtaaggtcagctaaataagctatcgggcccataccccgaaaatgttggttatacccttcccgtactaattaatcccctggcccaacccgtcatctactctaccatctttgcaggcacactcatcacagcgctaagctcgcactgattttttacctgagtaggcctagaaataaacatgctagcttttattccagttctaaccaaaaaaataaaccctcgttccacagaagctgccatcaagtatttcctcacgcaagcaaccgcatccataatccttctaatagctatcctcttcaacaatatactctccggacaatgaaccataaccaatactaccaatcaatactcatcattaataatcataatggctatagcaataaaactaggaatagccccctttcacttctgagtcccagaggttacccaaggcacccctctgacatccggcctgcttcttctcacatgacaaaaactagcccccatctcaatcatataccaaatctctccctcactaaacgtaagccttctcctcactctctcaatcttatccatcatagcaggcagttgaggtggattaaaccaaacccagctacgcaaaatcttagcatactcctcaattacccacataggatgaataatagcagttctaccgtacaaccctaacataaccattcttaatttaactatttatattatcctaactactaccgcattcctactactcaacttaaactccagcaccacgaccctactactatctcgcacctgaaacaagctaacatgactaacacccttaattccatccaccctcctctccctaggaggcctgcccccgctaaccggctttttgcccaaatgggccattatcgaagaattcacaaaaaacaatagcctcatcatccccaccatcatagccaccatcaccctccttaacctctacttctacctacgcctaatctactccacctcaatcacactactccccatatctaacaacgtaaaaataaaatgacagtttgaacatacaaaacccaccccattcctccccacactcatcgcccttaccacgctactcctacctatctccccttttatactaataatcttatagaaatttaggttaaatacagaccaagagccttcaaagccctcagtaagttgcaatacttaatttctgtaacagctaaggactgcaaaaccccactctgcatcaactgaacgcaaatcagccactttaattaagctaagcccttactagaccaatgggacttaaacccacaaacacttagttaacagctaagcaccctaatcaactggcttcaatctacttctcccgccgccgggaaaaaaggcgggagaagccccggcaggtttgaagctgcttcttcgaatttgcaattcaatatgaaaatcacctcggagctggtaaaaagaggcctaacccctgtctttagatttacagtccaatgcttcactcagccattttacctcacccccactgatgttcgccgaccgttgactattctctacaaaccacaaagacattggaacactatacctattattcggcgcatgagctggagtcctaggcacagctctaagcctccttattcgagccgagctgggccagccaggcaaccttctaggtaacgaccacatctacaacgttatcgtcacagcccatgcatttgtaataatcttcttcatagtaatacccatcataatcggaggctttggcaactgactagttcccctaataatcggtgcccccgatatggcgtttccccgcataaacaacataagcttctgactcttacctccctctctcctactcctgctcgcatctgctatagtggaggccggagcaggaacaggttgaacagtctaccctcccttagcagggaactactcccaccctggagcctccgtagacctaaccatcttctccttacacctagcaggtgtctcctctatcttaggggccatcaatttcatcacaacaattatcaatataaaaccccctgccataacccaataccaaacgcccctcttcgtctgatccgtcctaatcacagcagtcctacttctcctatctctcccagtcctagctgctggcatcactatactactaacagaccgcaacctcaacaccaccttcttcgaccccgccggaggaggagaccccattctataccaacacctattctgatttttcggtcaccctgaagtttatattcttatcctaccaggcttcggaataatctcccatattgtaacttactactccggaaaaaaagaaccatttggatacataggtatggtctgagctatgatatcaattggcttcctagggtttatcgtgtgagcacaccatatatttacagtaggaatagacgtagacacacgagcatatttcacctccgctaccataatcatcgctatccccaccggcgtcaaagtatttagctgactcgccacactccacggaagcaatatgaaatgatctgctgcagtgctctgagccctaggattcatctttcttttcaccgtaggtggcctgactggcattgtattagcaaactcatcactagacatcgtactacacgacacgtactacgttgtagcccacttccactatgtcctatcaataggagctgtatttgccatcataggaggcttcattcactgatttcccctattctcaggctacaccctagaccaaacctacgccaaaatccatttcactatcatattcatcggcgtaaatctaactttcttcccacaacactttctcggcctatccggaatgccccgacgttactcggactaccccgatgcatacaccacatgaaacatcctatcatctgtaggctcattcatttctctaacagcagtaatattaataattttcatgatttgagaagccttcgcttcgaagcgaaaagtcctaatagtagaagaaccctccataaacctggagtgactatatggatgccccccaccctaccacacattcgaagaacccgtatacataaaatctagacaaaaaaggaaggaatcgaaccccccaaagctggtttcaagccaaccccatggcctccatgactttttcaaaaaggtattagaaaaaccatttcataactttgtcaaagttaaattataggctaaatcctatatatcttaatggcacatgcagcgcaagtaggtctacaagacgctacttcccctatcatagaagagcttatcacctttcatgatcacgccctcataatcattttccttatctgcttcctagtcctgtatgcccttttcctaacactcacaacaaaactaactaatactaacatctcagacgctcaggaaatagaaaccgtctgaactatcctgcccgccatcatcctagtcctcatcgccctcccatccctacgcatcctttacataacagacgaggtcaacgatccctcccttaccatcaaatcaattggccaccaatggtactgaacctacgagtacaccgactacggcggactaatcttcaactcctacatacttcccccattattcctagaaccaggcgacctgcgactccttgacgttgacaatcgagtagtactcccgattgaagcccccattcgtataataattacatcacaagacgtcttgcactcatgagctgtccccacattaggcttaaaaacagatgcaattcccggacgtctaaaccaaaccactttcaccgctacacgaccgggggtatactacggtcaatgctctgaaatctgtggagcaaaccacagtttcatgcccatcgtcctagaattaattcccctaaaaatctttgaaatagggcccgtatttaccctatagcaccccctctaccccctctagagcccactgtaaagctaacttagcattaaccttttaagttaaagattaagagaaccaacacctctttacagtgaaatgccccaactaaatactaccgtatggcccaccataattacccccatactccttacactattcctcatcacccaactaaaaatattaaacacaaactaccacctgcctccctcaccaaagcccataaaaataaaaaattataacaaaccctgagaaccaaaatgaacgaaaatctgttcgcttcattcattgcccccacaatcctaggcctacccgccgcagtactgatcattctatttccccctctattgatccccacctccaaatatctcatcaacaaccgactaatcaccacccaacaatgactaatcaaactaacctcaaaacaaatgataaccatacacaacactaaaggacgaacctgatctcttatactagtatccttaatcatttttattgccacaactaacctcctcggactcctgcctcactcatttacaccaaccacccaactatctataaacctagccatggccatccccttatgagcgggcgcagtgattataggctttcgctctaagattaaaaatgccctagcccacttcttaccacaaggcacacctacaccccttatccccatactagttattatcgaaaccatcagcctactcattcaaccaatagccctggccgtacgcctaaccgctaacattactgcaggccacctactcatgcacctaattggaagcgccaccctagcaatatcaaccattaaccttccctctacacttatcatcttcacaattctaattctactgactatcctagaaatcgctgtcgccttaatccaagcctacgttttcacacttctagtaagcctctacctgcacgacaacacataatgacccaccaatcacatgcctatcatatagtaaaacccagcccatgacccctaacaggggccctctcagccctcctaatgacctccggcctagccatgtgatttcacttccactccataacgctcctcatactaggcctactaaccaacacactaaccatataccaatgatggcgcgatgtaacacgagaaagcacataccaaggccaccacacaccacctgtccaaaaaggccttcgatacgggataatcctatttattacctcagaagtttttttcttcgcaggatttttctgagccttttaccactccagcctagcccctaccccccaattaggagggcactggcccccaacaggcatcaccccgctaaatcccctagaagtcccactcctaaacacatccgtattactcgcatcaggagtatcaatcacctgagctcaccatagtctaatagaaaacaaccgaaaccaaataattcaagcactgcttattacaattttactgggtctctattttaccctcctacaagcctcagagtacttcgagtctcccttcaccatttccgacggcatctacggctcaacattttttgtagccacaggcttccacggacttcacgtcattattggctcaactttcctcactatctgcttcatccgccaactaatatttcactttacatccaaacatcactttggcttcgaagccgccgcctgatactggcattttgtagatgtggtttgactatttctgtatgtctccatctattgatgagggtcttactcttttagtataaatagtaccgttaacttccaattaactagttttgacaacattcaaaaaagagtaataaacttcgccttaattttaataatcaacaccctcctagccttactactaataattattacattttgactaccacaactcaacggctacatagaaaaatccaccccttacgagtgcggcttcgaccctatatcccccgcccgcgtccctttctccataaaattcttcttagtagctattaccttcttattatttgatctagaaattgccctccttttacccctaccatgagccctacaaacaactaacctgccactaatagttatgtcatccctcttattaatcatcatcctagccctaagtctggcctatgagtgactacaaaaaggattagactgaaccgaattggtatatagtttaaacaaaacgaatgatttcgactcattaaattatgataatcatatttaccaaatgcccctcatttacataaatattatactagcatttaccatctcacttctaggaatactagtatatcgctcacacctcatatcctccctactatgcctagaaggaataatactatcgctgttcattatagctactctcataaccctcaacacccactccctcttagccaatattgtgcctattgccatactagtctttgccgcctgcgaagcagcggtgggcctagccctactagtctcaatctccaacacatatggcctagactacgtacataacctaaacctactccaatgctaaaactaatcgtcccaacaattatattactaccactgacatgactttccaaaaaacacataatttgaatcaacacaaccacccacagcctaattattagcatcatccctctactattttttaaccaaatcaacaacaacctatttagctgttccccaaccttttcctccgaccccctaacaacccccctcctaatactaactacctgactcctacccctcacaatcatggcaagccaacgccacttatccagtgaaccactatcacgaaaaaaactctacctctctatactaatctccctacaaatctccttaattataacattcacagccacagaactaatcatattttatatcttcttcgaaaccacacttatccccaccttggctatcatcacccgatgaggcaaccagccagaacgcctgaacgcaggcacatacttcctattctacaccctagtaggctcccttcccctactcatcgcactaatttacactcacaacaccctaggctcactaaacattctactactcactctcactgcccaagaactatcaaactcctgagccaacaacttaatatgactagcttacacaatagcttttatagtaaagatacctctttacggactccacttatgactccctaaagcccatgtcgaagcccccatcgctgggtcaatagtacttgccgcagtactcttaaaactaggcggctatggtataatacgcctcacactcattctcaaccccctgacaaaacacatagcctaccccttccttgtactatccctatgaggcataattataacaagctccatctgcctacgacaaacagacctaaaatcgctcattgcatactcttcaatcagccacatagccctcgtagtaacagccattctcatccaaaccccctgaagcttcaccggcgcagtcattctcataatcgcccacgggcttacatcctcattactattctgcctagcaaactcaaactacgaacgcactcacagtcgcatcataatcctctctcaaggacttcaaactctactcccactaatagctttttgatgacttctagcaagcctcgctaacctcgccttaccccccactattaacctactgggagaactctctgtgctagtaaccacgttctcctgatcaaatatcactctcctacttacaggactcaacatactagtcacagccctatactccctctacatatttaccacaacacaatggggctcactcacccaccacattaacaacataaaaccctcattcacacgagaaaacaccctcatgttcatacacctatcccccattctcctcctatccctcaaccccgacatcattaccgggttttcctcttgtaaatatagtttaaccaaaacatcagattgtgaatctgacaacagaggcttacgaccccttatttaccgagaaagctcacaagaactgctaactcatgcccccatgtctaacaacatggctttctcaacttttaaaggataacagctatccattggtcttaggccccaaaaattttggtgcaactccaaataaaagtaataaccatgcacactactataaccaccctaaccctgacttccctaattccccccatccttaccaccctcgttaaccctaacaaaaaaaactcatacccccattatgtaaaatccattgtcgcatccacctttattatcagtctcttccccacaacaatattcatgtgcctagaccaagaagttattatctcgaactgacactgagccacaacccaaacaacccagctctccctaagcttcaaactagactacttctccataatattcatccctgtagcattgttcgttacatggtccatcatagaattctcactgtgatatataaactcagacccaaacattaatcagttcttcaaatatctactcatcttcctaattaccatactaatcttagttaccgctaacaacctattccaactgttcatcggctgagagggcgtaggaattatatccttcttgctcatcagttgatgatacgcccgagcagatgccaacacagcagccattcaagcaatcctatacaaccgtatcggcgatatcggtttcatcctcgccttagcatgatttatcctacactccaactcatgagacccacaacaaatagcccttctaaacgctaatccaagcctcaccccactactaggcctcctcctagcagcagcaggcaaatcagcccaattaggtctccacccctgactcccctcagccatagaaggccccaccccagtctcagccctactccactcaagcactatagttgtagcaggaatcttcctactcatccgcttccaccccctagcagaaaatagcccactaatccaaactctaacactatgcttaggcgctatcaccactctgttcgcagcagtctgcgcccttacacaaaatgacatcaaaaaaatcgtagccttctccacttcaagtcaactaggactcataatagttacaatcggcatcaaccaaccacacctagcattcctgcacatctgtacccacgccttcttcaaagccatactatttatgtgctccgggtccatcatccacaaccttaacaatgaacaagatattcgaaaaataggaggactactcaaaaccatacctctcacttcaacctccctcaccattggcagcctagcattagcaggaatacctttcctcacaggtttctactccaaagaccacatcatcgaaaccgcaaacatatcatacacaaacgcctgagccctatctattactctcatcgctacctccctgacaagcgcctatagcactcgaataattcttctcaccctaacaggtcaacctcgcttccccacccttactaacattaacgaaaataaccccaccctactaaaccccattaaacgcctggcagccggaagcctattcgcaggatttctcattactaacaacatttcccccgcatcccccttccaaacaacaatccccctctacctaaaactcacagccctcgctgtcactttcctaggacttctaacagccctagacctcaactacctaaccaacaaacttaaaataaaatccccactatgcacattttatttctccaacatactcggattctaccctagcatcacacaccgcacaatcccctatctaggccttcttacgagccaaaacctgcccctactcctcctagacctaacctgactagaaaagctattacctaaaacaatttcacagcaccaaatctccacctccatcatcacctcaacccaaaaaggcataattaaactttacttcctctctttcttcttcccactcatcctaaccctactcctaatcacataacctattcccccgagcaatctcaattacaatatatacaccaacaaacaatgttcaaccagtaactactactaatcaacgcccataatcatacaaagcccccgcaccaataggatcctcccgaatcaaccctgacccctctccttcataaattattcagcttcctacactattaaagtttaccacaaccaccaccccatcatactctttcacccacagcaccaatcctacctccatcgctaaccccactaaaacactcaccaagacctcaacccctgacccccatgcctcaggatactcctcaatagccatcgctgtagtatatccaaagacaaccatcattccccctaaataaattaaaaaaactattaaacccatataacctcccccaaaattcagaataataacacacccgaccacaccgctaacaatcaatactaaacccccataaataggagaaggcttagaagaaaaccccacaaaccccattactaaacccacactcaacagaaacaaagcatacatcattattctcgcacggactacaaccacgaccaatgatatgaaaaaccatcgttgtatttcaactacaagaacaccaatgaccccaatacgcaaaactaaccccctaataaaattaattaaccactcattcatcgacctccccaccccatccaacatctccgcatgatgaaacttcggctcactccttggcgcctgcctgatcctccaaatcaccacaggactattcctagccatgcactactcaccagacgcctcaaccgccttttcatcaatcgcccacatcactcgagacgtaaattatggctgaatcatccgctaccttcacgccaatggcgcctcaatattctttatctgcctcttcctacacatcgggcgaggcctatattacggatcatttctctactcagaaacctgaaacatcggcattatcctcctgcttgcaactatagcaacagccttcataggctatgtcctcccgtgaggccaaatatcattctgaggggccacagtaattacaaacttactatccgccatcccatacattgggacagacctagttcaatgaatctgaggaggctactcagtagacagtcccaccctcacacgattctttacctttcacttcatcttgcccttcattattgcagccctagcagcactccacctcctattcttgcacgaaacgggatcaaacaaccccctaggaatcacctcccattccgataaaatcaccttccacccttactacacaatcaaagacgccctcggcttacttctcttccttctctccttaatgacattaacactattctcaccagacctcctaggcgacccagacaattataccctagccaaccccttaaacacccctccccacatcaaacccgaatgatatttcctattcgcctacacaattctccgatccgtccctaacaaactaggaggcgtccttgccctattactatccatcctcatcctagcaataatccccatcctccatatatccaaacaacaaagcataatatttcgcccactaagccaatcactttattgactcctagccgcagacctcctcattctaacctgaatcggaggacaaccagtaagctacccttttaccatcattggacaagtagcatccgtactatacttcacaacaatcctaatcctaataccaactatctccctaattgaaaacaaaatactcaaatgggcctgtccttgtagtataaactaatacaccagtcttgtaaaccggagatgaaaacctttttccaaggacaaatcagagaaaaagtctttaactccaccattagcacccaaagctaagattctaatttaaactattctctgttctttcatggggaagcagatttgggtaccacccaagtattgactcacccatcaacaaccgctatgtatttcgtacattactgccagccaccatgaatattgtacggtaccataaatacttgaccacctgtagtacataaaaacccaatccacatcaaaaccccctccccatgcttacaagcaagtacagcaatcaaccctcaactatcacacatcaactgcaactccaaagccacccctcacccactaggataccaacaaacctacccacccttaacagtacatagtacataaagccatttaccgtacatagcacattacagtcaaatcccttctcgtccccatggatgacccccctcagataggggtcccttgaccaccatcctccgtgaaatcaatatcccgcacaagagtgctactctcctcgctccgggcccataacacttgggggtagctaaagtgaactgtatccgacatctggttcctacttcagggccataaagcctaaatagcccacacgttccccttaaataagacatcacgatg

SEQ ID NO: 59 - DNA, 16574 bp, Homo sapiens mitochondrial
  3112: "n" refers to a nucleotide at position 3107 of the Cambridge Reference Sequence (CRS, Anderson et al. 1981 Nature 290:457-465), later determined to be absent from the human mtDNA sequence according to the revised CRS (rCRS, Andrews et al. 1999 Nature Genetics 23:147); "n" therefore represents a single nucleotide deletion at a position corresponding to nucleotide 3107 of SEQ ID NO:1 as provided herein.
gatcacaggtctatcaccctattaaccactcacgggagctctccatgcatttggtattttcgtctggggggtgtgcacgcgatagcattgcgagacgctggagccggagcaccctatgtcgcagtatctgtctttgattcctgcctcatcctattatttatcgcacctacgttcaatattacaggcgaacatacctactaaagtgtgttaattaattaatgcttgtaggacataataataacaattgaatgtctgcacagccgctttccacacagacatcataacaaaaaatttccaccaaaccccccctcccccgccttctggccacagcacttaaacacatctctgccaaaccccaaaaacaaagaaccctaacaccagcctaaccagatttcaaattttatcttttggcggtatgcacttttaacagtcaccccccaactaacacattattttcccctcccactcccatactactaatctcatcaatacaaccctcgcccatcctacccagcacacacacaccacacgctgctaaccccataccccgaaccaaccaaaccccaaagacaccccccacagtttatgtagcttacctcctcaaagcaatacactgaaaatgtttagacgggctcacatcaccccataaacaaataggtttggtcctagcctttctattagctcttagtaagattacacatgcaagcatccccgttccagtgagttcaccctctaaatcaccacgatcaaaagggacaagcatcaagcacgcagcaatgcagctcaaaacgcttagcctagccacacccccacgggaaacagcagtgattaacctttagcaataaacgaaagtttaactaagctatactaaccccagggttggtcaatttcgtgccagccaccgcggtcacacgattaacccaagtcaatagaagccggcgtaaagagtgttttagatcaccccctccccaataaagctaaaactcacctgagttgtaaaaaactccagttgacacaaaatagactacgaaagtggctttaacatatctgaacacacaatagctaagacccaaactgggattagataccccactatgcttagccctaaacctcaacagttaaatcaacaaaactgctcgccagaacactacgagccacagcttaaaactcaaaggacctggcggtgcttcatacccctctagaggagcctgttctgtaatcgataaaccccgatcaacctcaccacctcttgctcagcctatataccgccatcttcagcaaaccctgatgaaggctacaaagtaagcgcaagtacccacgtaaagacgttaggtcaaggtgtagcccatgaggtggcaagaaatgggctacattttctaccccagaaaactacgatagcccttatgaaacttaagggtcgaaggtggatttagcagtaaactgagagtagagtgcttagttgaacagggccctgaagcgcgtacacaccgcccgtcaccctcctcaagtatacttcaaaggacatttaactaaaacccctacgcatttatatagaggagacaagtcgtaacatggtaagtgtactggaaagtgcacttggacgaaccagagtgtagcttaacacaaagcacccaacttacacttaggagatttcaacttaacttgaccgctctgagctaaacctagccccaaacccactccaccttactaccagacaaccttagccaaaccatttacccaaataaagtataggcgatagaaattgaaacctggcgcaatagatatagtaccgcaagggaaagatgaaaaattatagccaagcataatatagcaaggactaacccctataccttctgcataatgaattaactagaaataactttgcaaggagagccaaagctaagacccccgaaaccagacgagctacctaagaacagctaaaagagcacacccgtctatgtagcaaaatagtgggaagatttataggtagaggcgacaaacctaccgagcctggtgatagctggttgtccaagatagaatcttagttcaactttaaatttgcccacagaaccctctaaatccccttgtaaatttaactgttagtccaaagaggaacagctctttggacactaggaaaaaaccttgtagagagagtaaaaaatttaacacccatagtaggcctaaaagcagccaccaattaagaaagcgttcaagctcaacacccactacctaaaaaatcccaaacatataactgaactcctcacacccaattggaccaatctatcaccctatagaagaactaatgttagtataagtaacatgaaaacattctcctccgcataagcctgcgtcagattaaaacactgaactgacaattaacagcccaatatctacaatcaaccaacaagtcattattaccctcactgtcaacccaacacaggcatgctcataaggaaaggttaaaaaaagtaaaaggaactcggcaaatcttaccccgcctgtttaccaaaaacatcacctctagcatcaccagtattagaggcaccgcctgcccagtgacacatgtttaacggccgcggtaccctaaccgtgcaaaggtagcataatcacttgttccttaaatagggacctgtatgaatggctccacgagggttcagctgtctcttacttttaaccagtgaaattgacctgcccgtgaagaggcgggcatgacacagcaagacgagaagaccctatggagctttaatttattaatgcaaacagtacctaacaaacccacaggtcctaaactaccaaacctgcattaaaaatttcggttggggcgacctcggagcagaacccaacctccgagcagtacatgctaagacttcaccagtcaaagcgaactactatactcaattgatccaataacttgaccaacggaacaagttaccctagggataacagcgcaatcctattctagagtccatatcaacaatagggtttacgacctcgatgttggatcaggacatcccgatggtgcagccgctattaaaggttcgtttgttcaacgattaaagtcctacgtgatctgagttcagaccggagtaatccaggtcggtttctatctacnttcaaattcctccctgtacgaaaggacaagagaaataaggcctacttcacaaagcgccttcccccgtaaatgatatcatctcaacttagtattatacccacacccacccaagaacagggtttgttaagatggcagagcccggtaatcgcataaaacttaaaactttacagtcagaggttcaattcctcttcttaacaacatacccatggccaacctcctactcctcattgtacccattctaatcgcaatggcattcctaatgcttaccgaacgaaaaattctaggctatatacaactacgcaaaggccccaacgttgtaggcccctacgggctactacaacccttcgctgacgccataaaactcttcaccaaggagcccctaaaacccgccacatctaccatcaccctctacatcaccgccccgaccttagctctcaccatcgctcttctactatgaacccccctccccatacccaaccccctggtcaacctcaacctaggcctcctatttattctagccacctctagcctagccgtttactcaatcctctgatcagggtgagcatcaaactcaaactacgccctgatcggcgcactgcgagcagtagcccaaacaatctcatatgaagtcaccctagccatcattctactatcaacattactaataagtggctcctttaacctctccacccttatcacaacacaagaacacctctgattactcctgccatcatgacccttggccataatatgatttatctccacactagcagagaccaaccgaacccccttcgaccttgccgaaggggagtccgaactagtctcaggcttcaacatcgaatacgccgcaggccccttcgccctattcttcatagccgaatacacaaacattattataataaacaccctcaccactacaatcttcctaggaacaacatatgacgcactctcccctgaactctacacaacatattttgtcaccaagaccctacttctaacctccctgttcttatgaattcgaacagcatacccccgattccgctacgaccaactcatacacctcctatgaaaaaacttcctaccactcaccctagcattacttatatgatatgtctccatacccattacaatctccagcattccccctcaaacctaagaaatatgtctgataaaagagttactttgatagagtaaataataggagcttaaacccccttatttctaggactatgagaatcgaacccatccctgagaatccaaaattctccgtgccacctatcacaccccatcctaaagtaaggtcagctaaataagctatcgggcccataccccgaaaatgttggttatacccttcccgtactaattaatcccctggcccaacccgtcatctactctaccatctttgcaggcacactcatcacagcgctaagctcgcactgattttttacctgagtaggcctagaaataaacatgctagcttttattccagttctaaccaaaaaaataaaccctcgttccacagaagctgccatcaagtatttcctcacgcaagcaaccgcatccataatccttctaatagctatcctcttcaacaatatactctccggacaatgaaccataaccaatactaccaatcaatactcatcattaataatcataatggctatagcaataaaactaggaatagccccctttcacttctgagtcccagaggttacccaaggcacccctctgacatccggcctgcttcttctcacatgacaaaaactagcccccatctcaatcatataccaaatctctccctcactaaacgtaagccttctcctcactctctcaatcttatccatcatagcaggcagttgaggtggattaaaccaaacccagctacgcaaaatcttagcatactcctcaattacccacataggatgaataatagcagttctaccgtacaaccctaacataaccattcttaatttaactatttatattatcctaactactaccgcattcctactactcaacttaaactccagcaccacgaccctactactatctcgcacctgaaacaagctaacatgactaacacccttaattccatccaccctcctctccctaggaggcctgcccccgctaaccggctttttgcccaaatgggccattatcgaagaattcacaaaaaacaatagcctcatcatccccaccatcatagccaccatcaccctccttaacctctacttctacctacgcctaatctactccacctcaatcacactactccccatatctaacaacgtaaaaataaaatgacagtttgaacatacaaaacccaccccattcctccccacactcatcgcccttaccacgctactcctacctatctccccttttatactaataatcttatagaaatttaggttaaatacagaccaagagccttcaaagccctcagtaagttgcaatacttaatttctgtaacagctaaggactgcaaaaccccactctgcatcaactgaacgcaaatcagccactttaattaagctaagcccttactagaccaatgggacttaaacccacaaacacttagttaacagctaagcaccctaatcaactggcttcaatctacttctcccgccgccgggaaaaaaggcgggagaagccccggcaggtttgaagctgcttcttcgaatttgcaattcaatatgaaaatcacctcggagctggtaaaaagaggcctaacccctgtctttagatttacagtccaatgcttcactcagccattttacctcacccccactgatgttcgccgaccgttgactattctctacaaaccacaaagacattggaacactatacctattattcggcgcatgagctggagtcctaggcacagctctaagcctccttattcgagccgagctgggccagccaggcaaccttctaggtaacgaccacatctacaacgttatcgtcacagcccatgcatttgtaataatcttcttcatagtaatacccatcataatcggaggctttggcaactgactagttcccctaataatcggtgcccccgatatggcgtttccccgcataaacaacataagcttctgactcttacctccctctctcctactcctgctcgcatctgctatagtggaggccggagcaggaacaggttgaacagtctaccctcccttagcagggaactactcccaccctggagcctccgtagacctaaccatcttctccttacacctagcaggtgcctcctctatcttaggggccatcaatttcatcacaacaattatcaatataaaaccccctgccataacccaataccaaacgcccctcttcgtctgatccgtcctaatcacagcagtcctacttctcctatctctcccagtcctagctgctggcatcactatactactaacagaccgcaacctcaacaccaccttcttcgaccccgccggaggaggagaccccattctataccaacacctattctgatttttcggtcaccctgaagtttatattcttatcctaccaggcttcggaataatctcccatattgtaacttactactccggaaaaaaagaaccatttggatacataggtatggtctgagctatgatatcaattggcttcctagggtttatcgtgtgagcacaccatatatttacagtaggaatagacgtagacacacgagcatatttcacctccgctaccataatcatcgctatccccaccggcgtcaaagtatttagctgactcgccacactccacggaagcaatatgaaatgatctgctgcagtgctctgagccctaggattcatctttcttttcaccgtaggtggcctgactggcattgtattagcaaactcatcactagacatcgtactacacgacacgtactacgttgtagctcacttccactatgtcctatcaataggagctgtatttgccatcataggaggcttcattcactgatttcccctattctcaggctacaccctagaccaaacctacgccaaaatccatttcactatcatattcatcggcgtaaatctaactttcttcccacaacactttctcggcctatccggaatgccccgacgttactcggactaccccgatgcatacaccacatgaaacatcctatcatctgtaggctcattcatttctctaacagcagtaatattaataattttcatgatttgagaagccttcgcttcgaagcgaaaagtcctaatagtagaagaaccctccataaacctggagtgactatatggatgccccccaccctaccacacattcgaagaacccgtatacataaaatctagacaaaaaaggaaggaatcgaaccccccaaagctggtttcaagccaaccccatggcctccatgactttttcaaaaaggtattagaaaaaccatttcataactttgtcaaagttaaattataggctaaatcctatatatcttaatggcacatgcagcgcaagtaggtctacaagacgccacttcccctatcatagaagagcttatcacctttcatgatcacgccctcataatcattttccttatctgcttcctagtcctgtatgcccttttcctaacactcacaacaaaactaactaatactaacatctcagacgctcaggaaatagaaaccgtctgaactatcctgcccgccatcatcctagtcctcatcgccctcccatccctacgcatcctttacataacagacgaggtcaacgatccctcccttaccatcaaatcaattggccaccaatggtactgaacctacgagtacaccgactacggcggactaatcttcaactcctacatacttcccccattattcctagaaccaggcgacctgcgactccttgacgttgacaatcgagtagtactcccgattgaagcccccattcgtataataattacatcacaagacgtcttgcactcatgagctgtccccacattaggcttaaaaacagatgcaattcccggacgtctaaaccaaaccactttcaccgctacacgaccgggggtatactacggtcaatgctctgaaatctgtggagcaaaccacagtttcatgcccatcgtcctagaattaattcccctaaaaatctttgaaatagggcccgtatttaccctatagcaccccctctaccccctctagagcccactgtaaagctaacttagcattaaccttttaagttaaagattaagagaaccaacacctctttacagtgaaatgccccaactaaatactaccgtatggcccaccataattacccccatactccttacactattcctcatcacccaactaaaaatattaaacacaaactaccacctacctccctcaccaaagcccataaaaataaaaaattataacaaaccctgagaaccaaaatgaacgaaaatctgttcgcttcattcattgcccccacaatcctaggcctacccgccgcagtactgatcattctatttccccctctattgatccccacctccaaatatctcatcaacaaccgactaatcaccacccaacaatgactaatcaaactaacctcaaaacaaatgataaccatacacaacactaaaggacgaacctgatctcttatactagtatccttaatcatttttattgccacaactaacctcctcggactcctgcctcactcatttacaccaaccacccaactatctataaacctagccatggccatccccttatgagcgggcgcagtgattataggctttcgctctaagattaaaaatgccctagcccacttcttaccacaaggcacacctacaccccttatccccatactagttattatcgaaaccatcagcctactcattcaaccaatagccctggccgtacgcctaaccgctaacattactgcaggccacctactcatgcacctaattggaagcaccaccctagcaatatcaaccattaaccttccctctacacttatcatcttcacaattctaattctactgactatcctagaaatcgctgtcgccttaatccaagcctacgttttcacacttctagtaagcctctacctgcacgacaacacataatgacccaccaatcacatgcctatcatatagtaaaacccagcccatgacccctaacaggggccctctcagccctcctaatgacctccggcctagccatgtgatttcacttccactccataacgctcctcatactaggcctactaaccaacacactaaccatataccaatgatggcgcgatgtaacacgagaaagcacataccaaggccaccacacaccacctgtccaaaaaggccttcgatacgggataatcctatttattacctcagaagtttttttcttcgcaggatttttctgagccttttaccactccagcctagcccctaccccccaattaggagggcactggcccccaacaggcatcaccccgctaaatcccctagaagtcccactcctaaacacatccgtattactcgcatcaggagtatcaatcacctgagctcaccatagtctaatagaaaacaaccgaaaccaaataattcaagcactgctcattacaattttactgggtctctattttaccctcctacaagcctcagagtacttcgagtctcccttcaccatttccgacggcatctacggctcaacattttttgtagccacaggcttccacggacttcacgtcattattggctcaactttcctcactatctgcttcatccgccaactaatatttcactttacatccaaacatcactttggcttcgaagccgccgcctgatactggcattttgtagatgtggtttgactatttctgtatgtctccatctattgatgagggtcttactcttttagtataaatagtaccgttaacttccaattaactagttttgacaacattcaaaaaagagtaataaacttcgccttaattttaataatcaacaccctcctagccttactactaataattattacattttgactaccacaactcaacggctacatagaaaaatccaccccttacgagtgcggcttcgaccctatatcccccgcccgcgtccctttctccataaaattcttcttagtagctattaccttcttattatttgatctagaaattgccctccttttacccctaccatgagccctacaaacaactaacctgccactaatagttatgtcatccctcttattaatcatcatcctagccctaagtctggcctatgagtgactacaaaaaggattagactgagccgaattggtatatagtttaaacaaaacgaatgatttcgactcattaaattatgataatcatatttaccaaatgcccctcatttacataaatattatactagcatttaccatctcacttctaggaatactagtatatcgctcacacctcatgtcctccctactatgcctagaaggaataatactatcgctgttcattatagctactctcataaccctcaacacccactccctcttagccaatattgtgcctattgccatactagtctttgccgcctgcgaagcagcggtgggcctagccctactagtctcaatctccaacacatatggcctagactacgtacataacctaaacctactccaatgctaaaactaatcgtcccaacaattatattactaccactgacatgactttccaaaaaacacataatttgaatcaacacaaccacccacagcctaattattagcatcatccctctactattttttaaccaaatcaacaacaacctatttagctgttccccaaccttttcctccgaccccctaacaacccccctcctaatactaactacctgactcctacccctcacaatcatggcaagccaacgccacttatccagtgaaccactatcacgaaaaaaactctacctctctatactaatctccctacaaatctccttaattataacattcacagccacagaactaatcatattttatatcttcttcgaaaccacacttatccccaccttggctatcatcacccgatgaggcaaccagccagaacgcctgaacgcaggcacatacttcctattctacaccctagtaggctcccttcccctactcatcgcactaatttacactcacaacaccctaggctcactaaacattctactactcaccctcactgcccaagaactatcaaactcctgagccaacaacttaatatgactagcttacacaatagcttttatagtaaagatacctctttacggactccacttatgactccctaaagcccatgtcgaagcccccatcgctgggtcaatagtacttgccgcagtactcttgaaactaggcggctatggtataatacgcctcacactcattctcaaccccctgacaaaacacatagcctaccccttccttgtactatccctatgaggcataattataacaagctccatctgcctacgacaaacagacctaaaatcgctcattgcatactcttcaatcagccacatagccctcgtagtaacagccattctcatccaaaccccctgaagcttcaccggcgcagtcattctcataatcgcccacggacttacatcctcattactattctgcctagcaaactcaaactacgaacgcactcacagtcgcatcataatcctctctcaaggacttcaaactctactcccactaatagctttttgatgacttctagcaagcctcgctaacctcgccttaccccccactattaacctactgggagaactctctgtgctagtaaccacgttctcctgatcaaatatcactctcctacttacaggactcaacatactagtcacagccctatactccctctacatatttaccacaacacaatggggctcactcacccaccacattaacaacataaaaccctcattcacacgagaaaacaccctcatgttcatacacctatcccccattctcctcctatccctcaaccccgacatcattaccgggttttcctcttgtaaatatagtttaaccaaaacatcagattgtgaatctgacaacagaggcttacgaccccttatttaccgagaaagctcacaagaactgctaactcatgcccccatgtctaacaacatggctttctcaacttttaaaggataacagctatccattggtcttaggccccaagaattttggtgcaactccaaataaaagtaataaccatgcacactactataaccaccctaaccctaacttccctaattccccccatccttaccaccctcgttaaccctaacaaaaaaaactcatacccccattatgtaaaatccattgtcgcatccacctttattatcagtctcttccccacaacaatattcatgtgcctagaccaagaagttattatctcgaactgacactgagccacaacccaaacaacccagctctccctaagcttcaaactagactacttctccataatattcatccctgtagcattgttcgttacatggtccatcatagaattctcactgtgatatataaactcagacccaaacattaatcagttcttcaaatatctactcatcttcctaattaccatactaatcttagttaccgctaacaacctattccaactgttcatcggctgagagggcgtaggaattatatccttcttgctcatcagttgatgatacgcccgagcagatgccaacacagcagccattcaagcaatcctatacaaccgtatcggcgatatcggtttcatcctcgccttagcatgatttatcctacactccaactcatgagacccacaacaaatagcccttctaaacgctaatccaagcctcaccccactactaggcctcctcctagcagcagcaggcaaatcagcccaattaggtctccacccctgactcccctcagccatagaaggccccaccccagtctcagccctactccactcaagcactatagttgtagcaggaatcttcttactcatccgcttccaccccctagcagaaaatagcccactaatccaaactctaacactatgcttaggcgctatcaccactctgttcgcagcagtctgcgcccttacacaaaatgacatcaaaaaaatcgtagccttctccacttcaagtcaactaggactcataatagttacaatcggcatcaaccaaccacacctagcattcctgcacatctgtacccacgccttcttcaaagccatactatttatgtgctccgggtccatcatccacaaccttaacaatgaacaagatattcgaaaaataggaggactactcaaaaccatacctctcacttcaacctccctcaccattggcagcctagcattagcaggaatacctttcctcacaggtttctactccaaagaccacatcatcgaaaccgcaaacatatcatacacaaacgcctgagccctatctattactctcatcgctacctccctgacaagcgcctatagcactcgaataattcttctcaccctaacaggtcaacctcgcttccccacccttactaacattaacgaaaataaccccaccctactaaaccccattaaacgcctggcagccggaagcctattcgcaggatttctcattactaacaacatttcccccgcatcccccttccaaacaacaatccccctctacctaaaactcacagccctcgctgtcactttcctaggacttctaacagccctagacctcaactacctaaccaacaaacttaaaataaaatccccactatgcacattttatttctccaacatactcggattctaccctagcatcacacaccgcacaatcccctatctaggccttcttacgagccaaaacctgcccctactcctcctagacctaacctgactagaaaagctattacctaaaacaatttcacagcaccaaatctccacctccatcatcacctcaacccaaaaaggcataattaaactttacttcctctctttcttcttcccactcatcctaaccctactcctaatcacataacctattcccccgagcaatttcaattacaatatatacaccaacaaacaatgttcaaccagtaactactactaatcaacgcccataatcatacaaagcccccgcaccaataggatcctcccgaatcaaccctgacccctctccttcataaattattcagcttcctacactattaaagtttaccacaaccaccaccccatcatactctttcacccacagcaccaatcctacctccatcgctaaccccactaaaacactcaccaagacctcaacccctgacccccatgcctcaggatactcctcaatagccatcgctgtagtatatccaaagacaaccatcattccccctaaataaattaaaaaaactattaaacccatataacctcccccaaaattcagaataataacacacccgaccacaccgctaacaatcaatactaaacccccataaataggagaaggcttagaagaaaaccccacaaaccccattactaaacccacactcaacagaaacaaagcatacatcattattctcgcacggactacaaccacgaccaatgatatgaaaaaccatcgttgtatttcaactacaagaacaccaatgaccccaatacgcaaaattaaccccctaataaaattaattaaccactcactcatcgacctccccaccccatccaacatctccgcatgatgaaacttcggctcactccttggcgcctgcctgatcctccaaatcaccacaggactattcctagccatgcactactcaccagacgcctcaaccgccttttcatcaatcgcccacatcactcgagacgtaaattatggctgaatcatccgctaccttcacgccaatggcgcctcaatattctttatctgcctcttcctacacatcgggcgaggcctatattacggatcatttctctactcagaaacctgaaacatcggcattatcctcctgcttgcaactatagcaacagccttcataggctatgtcctcccgtgaggccaaatatcattctgaggggccacagtaattacaaacttactatccgccatcccatacattgggacagacctagttcaatgaatctgaggaggctactcagtagacagtcccaccctcacacgattctttacctttcacttcatcttgcccttcattattgcagccctagcagcactccacctcctattcttgcacgaaacgggatcaaacaaccccctaggaatcacctcccattccgataaaatcaccttccacccttactacacaatcaaagacgccctcggcttacttctcttccttctctccttaatgacattaacactattctcaccagacctcctaggcgacccagacaattataccctagccaaccccttaaacacccctccccacatcaagcccgaatgatatttcctattcgcctacacaattctccgatccgtccctaacaaactaggaggcgtccttgccctattactatccatcctcatcctagcaataatccccatcctccatatatccaaacaacaaagcataatatttcgcccactaagccaatcactttattgactcctagccgcagacctcctcattctaacctgaatcggaggacaaccagtaagctacccttttaccatcattggacaagtagcatccgtactatacttcacaacaatcctaatcctaataccaactatctccctaattgaaaacaaaatactcaaatgggcctgtccttgtagtataaactaatacaccagtcttgtaaaccggagatgaaaacctttttccaaggacaaatcagagaaaaagtctttaactccaccattagcacccaaagctaagattctaatttaaactattctctgttctttcatggggaagcagatttgggtaccacccaagtattgactcacccatcaacaaccgctatgtatttcgtacattactgccagccaccatgaatattgtacggtaccataaatacttgaccacctgtagtacataaaaacccaatccacatcaaaaccccctccccatgcttacaagcaagtacagcaatcaacccccaactatcacacatcaactgcaactccaaagccacccctcacccactaggataccaacaaacctacccacccttaacagtacatagcacataaagccatttaccgtacatagcacattacagtcaaatcccttctcgtccccatggatgacccccctcagataggggtcccttgaccaccatcctccgtgaaatcaatatcccgcacaagagtgctactctcctcgctccgggcccataacacttgggggtagctaaagtgaactgtatccgacatctggttcctacttcagggccataaagcctaaatagcccacacgttccccttaaataagacatcacgatg

SEQ ID NO: 60 - DNA, 16572 bp, Homo sapiens mitochondrial
  3110: "n" refers to a nucleotide at position 3107 of the Cambridge Reference Sequence (CRS, Anderson et al. 1981 Nature 290:457-465), later determined to be absent from the human mtDNA sequence according to the revised CRS (rCRS, Andrews et al. 1999 Nature Genetics 23:147); "n" therefore represents a single nucleotide deletion at a position corresponding to nucleotide 3107 of SEQ ID NO:1 as provided herein.
gatcacaggtctatcaccctattaaccactcacgggagctctccatgcatttggtattttcgtctggggggcatgcacgcgatagcattgcgagacgctggagccggagcaccctatgtcgcagtatctgtctttgattcctgcctcatcctattatttatcgcacctacgttcaatattacaggcgaacatacctactaaagtgtgttaattaattaatgcttgtaggacataataataacaattgaatgtctgcacagccgctttccacacagacatcataacaaaaaatttccaccaaaccccccctccccccccgcttctggccacagcacttaaacacatctctgccaaaccccaaaaacaaagaaccctaacaccagcctaaccagatttcaaattttatcttttggcggtatgcacttttaacagtcaccccccaactaacacattattttcccctcccactcccatactactaatctcatcaatacaacccccgcccatcctacccagcacacacacaccgctgctaaccccataccccgaaccaaccaaaccccaaagacaccccccacagtttatgtagcttacctcctcaaagcaatacactgaaaatgtttagacgggctcacatcaccccataaacaaataggtttggtcctagcctttctattagctcttagtaagattacacatgcaagcatccccgttccagtgagttcaccctctaaatcaccacgatcaaaagggacaagcatcaagcacgcagcaatgcagctcaaaacgcttagcctagccacacccccacgggaaacagcagtgattaacctttagcaataaacgaaagtttaactaagctatactaaccccagggttggtcaatttcgtgccagccaccgcggtcacacgattaacccaagtcaatagaagccggcgtaaagagtgttttagatcaccccctccccaataaagctaaaactcacctgagttgtaaaaaactccagttgacacaaaatagactacgaaagtggctttaacatatctgaacacacaatagctaagacccaaactgggattagataccccactatgcttagccctaaacctcaacagttaaatcaacaaaactgctcgccagaacactacgagccacagcttaaaactcaaaggacctggcggtgcttcatatccctctagaggagcctgttctgtaatcgataaaccccgatcaacctcaccacctcttgctcagcctatataccgccatcttcagcaaaccctgatgaaggctacaaagtaagcgcaagtacccacgtaaagacgttaggtcaaggtgtagcccatgaggtggcaagaaatgggctacattttctaccccagaaaactacgatagcccttatgaaacttaagggtcgaaggtggatttagcagtaaactgagagtagagtgcttagttgaacagggccctgaagcgcgtacacaccgcccgtcaccctcctcaagtatacttcaaaggacatttaactaaaacccctacgcatttatatagaggagacaagtcgtaacatggtaagtgtactggaaagtgcacttggacgaaccagagtgtagcttaacacaaagcacccaacttacacttaggagatttcaacttaacttgaccgctctgagctaaacctagccccaaacccactccaccttactaccagacaaccttagccaaaccatttacccaaataaagtataggcgatagaaattgaaacctggcgcaatagatatagtaccgcaagggaaagatgaaaaattataaccaagcataatatagcaaggactaacccctataccttctgcataatgaattaactagaaataactttgcaaggagagccaaagctaagacccccgaaaccagacgagctacctaagaacagctaaaagagcacacccgtctatgtagcaaaatagtgggaagatttataggtagaggcgacaaacctaccgagcctggtgatagctggttgtccaagatagaatcttagttcaactttaaatttgcccacagaaccctctaaatccccttgtaaatttaactgttagtccaaagaggaacagctctttggacactaggaaaaaaccttgtagagagagtaaaaaatttaacacccatagtaggcctaaaagcagccaccaattaagaaagcgttcaagctcaacacccactacctaaaaaatcccaaacatataactgaactcctcacacccaattggaccaatctatcaccctatagaagaactaatgttagtataagtaacatgaaaacattctcctccgcataagcctgcgtcagattaaaacactgaactgacaattaacagcccaatatctacaatcaaccaacaagtcattattaccctcactgtcaacccaacacaggcatgctcataaggaaaggttaaaaaaagtaaaaggaactcggcaaatcttaccccgcctgtttaccaaaaacatcacctctagcatcaccagtattagaggcaccgcctgcccagtgacacatgtttaacggccgcggtaccctaaccgtgcaaaggtagcataatcacttgttccttaaatagggacctgtatgaatggctccacgagggttcagctgtctcttacttttaaccagtgaaattgacctgcccgtgaagaggcgggcatgacacagcaagacgagaagaccctatggagctttaatttattaatgcaaacagtacctaacaaacccacaggtcctaaactaccaaacctgcattaaaaatttcggttggggcgacctcggagcagaacccaacctccgagcagtacatgctaagacttcaccagtcaaagcgaactactatactcaattgatccaataacttgaccaacggaacaagttaccctagggataacagcgcaatcctattctagagtccatatcaacaatagggtttacgacctcgatgttggatcaggacatcccgatggtgcagccgctattaaaggttcgtttgttcaacgattaaagtcctacgtgatctgagttcagaccggagtaatccaggtcggtttctatctacnttcaaattcctccctgtacgaaaggacaagagaaataaggcctacttcacaaagcgccttcccccgtaaatgatatcatctcaacttagtattatacccacacccacccaagaacagggtttgttaagatggcagagcccggtaatcgcataaaacttaaaactttacagtcagaggttcaattcctcttcttaacaacatacccatggccaacctcctactcctcattgtacccattctaatcgcaatggcattcctaatgcttaccgaacgaaaaattctaggctatatacaactacgcaaaggccccaacgttgtaggcccctacgggctactacaacccttcgctgacgccataaaactcttcaccaaagagcccctaaaacccgccacatctaccatcaccctctacatcaccgccccgaccttagctctcaccatcgctcttctactatgaacccccctccccatacccaaccccctggtcaacctcaacctaggcctcctatttattctagccacctctagcctagccgtttactcaatcctctgatcagggtgagcatcaaactcaaactacgccctgatcggcgcactgcgagcagtagcccaaacaatctcatatgaagtcaccctagccatcattctactatcaacattactaataagtggctcctttaacctctccacccttatcacaacacaagaacacctctgattactcctgccatcatgacccttggccataatatgatttatctccacactagcagagaccaaccgaacccccttcgaccttgccgaaggggagtccgaactagtctcaggcttcaacatcgaatacgccgcaggccccttcgccctattcttcatagccgaatacacaaacattattataataaacaccctcaccactacaatcttcctaggaacaacatatgacgcactctcccctgaactctacacaacatattttgtcaccaagaccctacttctaacctccctgttcttatgaattcgaacagcatacccccgattccgctacgaccaactcatacacctcctatgaaaaaacttcctaccactcaccctagcattacttatatgatatgtctccatacccattacaatctccagcattccccctcaaacctaagaaatatgtctgataaaagagttactttgatagagtaaataataggagcttaaacccccttatttctaggactatgagaatcgaacccatccctgagaatccaaaattctccgtgccacctatcacaccccatcctaaagtaaggtcagctaaataagctatcgggcccataccccgaaaatgttggttatacccttcccgtactaattaatcccctggcccaacccgtcatctactctaccatctttgcaggcacactcatcacagcgctaagctcgcactgattttttacctgagtaggcctagaaataaacatgctagcttttattccagttctaaccaaaaaaataaaccctcgttccacagaagctgccatcaagtatttcctcacgcaagcaaccgcatccataatccttctaatagctatcctcttcaacaatatactctccggacaatgaaccataaccaatactaccaatcaatactcatcattaataatcataatggctatagcaataaaactaggaatagccccctttcacttctgagtcccagaggttacccaaggcacccctctgacatccggcctgcttcttctcacatgacaaaaactagcccccatctcaatcatataccaaatctctccctcactaaacgtaagccttctcctcactctctcaatcttatccatcatagcaggcagttgaggtggattaaaccaaacccagctacgcaaaatcttagcatactcctcaattacccacataggatgaataatagcagttctaccgtacaaccctaacataaccattcttaatttaactatttatattatcctaactactaccgcattcctactactcaacttaaactccagcaccacgaccctactactatctcgcacctgaaacaagctaacatgactaacacccttaattccatccaccctcctctccctaggaggcctgcccccgctaaccggctttttgcccaaatgggccattatcgaagaattcacaaaaaacaatagcctcatcatccccaccatcatagccaccatcaccctccttaacctctacttctacctacgcctaatctactccacctcaatcacactactccccatatctaacaacgtaaaaataaaatgacagtttgaacatacaaaacccaccccattcctccccacactcatcgcccttaccacgctactcctacctatctccccttttatactaataatcttatagaaatttaggttaaatacagaccaagagccttcaaagccctcagtaagttgcaatacttaatttctgtaacagctaaggactgcaaaaccccactctgcatcaactgaacgcaaatcagccactttaattaagctaagcccttactagaccaatgggacttaaacccacaaacacttagttaacagctaagcaccctaatcaactggcttcaatctacttctcccgccgccgggaaaaaaggcgggagaagccccggcaggtttgaagctgcttcttcgaatttgcaattcaatatgaaaatcacctcggagctggtaaaaagaggcctaacccctgtctttagatttacagtccaatgcttcactcagccattttacctcacccccactgatgttcgccgaccgttgactattctctacaaaccacaaagacattggaacactatacctattattcggcgcatgagctggagtcctaggcacagctctaagcctccttattcgagccgagctgggccagccaggcaaccttctaggtaacgaccacatctacaacgttatcgtcacagcccatgcatttgtaataatcttcttcatagtaatacccatcataatcggaggctttggcaactgactagttcccctaataatcggtgcccccgatatggcgtttccccgcataaacaacataagcttctgactcttacctccctctctcctactcctgctcgcatctgctatagtggaggccggagcaggaacaggttgaacagtctaccctcccttagcagggaactactcccaccctggagcctccgtagacctaaccatcttctccttacacctagcaggtgtctcctctatcttaggggccatcaatttcatcacaacaattatcaatataaaaccccctgccataacccaataccaaacgcccctcttcgtctgatccgtcctaatcacagcagtcctacttctcctatctctcccagtcctagctgctggcatcactatactactaacagaccgcaacctcaacaccaccttcttcgaccccgccggaggaggagaccccattctataccaacacctattctgatttttcggtcaccctgaagtttatattcttatcctaccaggcttcggaataatctcccatattgtaacttactactccggaaaaaaagaaccatttggatacataggtatggtctgagctatgatatcaattggcttcctagggtttatcgtgtgagcacaccatatatttacagtaggaatagacgtagacacacgagcatatttcacctccgctaccataatcatcgctatccccaccggcgtcaaagtatttagctgactcgccacactccacggaagcaatatgaaatgatctgctgcagtgctctgagccctaggattcatctttcttttcaccgtaggtggcctgactggcattgtattagcaaactcatcactagacatcgtactacacgacacgtactacgttgtagctcacttccactatgtcctatcaataggagctgtatttgccatcataggaggcttcattcactgatttcccctattctcaggctacaccctagaccaaacctacgccaaaatccatttcactatcatattcatcggcgtaaatctaactttcttcccacaacactttctcggcctatccggaatgccccgacgttactcggactaccccgatgcatacaccacatgaaacatcctatcatctgtaggctcattcatttctctaacagcagtaatattaataattttcatgatttgagaagccttcgcttcgaagcgaaaagtcctaatagtagaagaaccctccataaacctggagtgactatatggatgccccccaccctaccacacattcgaagaacccgtatacataaaatctagacaaaaaaggaaggaatcgaaccccccaaagctggtttcaagccaaccccatggcctccatgactttttcaaaaaggtattagaaaaaccatttcataactttgtcaaagttaaattataggctaaatcctatatatcttaatggcacatgcagcgcaagtaggtctacaagacgctacttcccctatcatagaagagcttatcacctttcatgatcacgccctcataatcattttccttatctgcttcctagtcctgtatgcccttttcctaacactcacaacaaaactaactaatactaacatctcagacgctcaggaaatagaaaccgtctgaactatcctgcccgccatcatcctagtcctcatcgccctcccatccctacgcatcctttacataacagacgaggtcaacgatccctcccttaccatcaaatcaattggccaccaatggtactgaacctacgagtacaccgactacggcggactaatcttcaactcctacatacttcccccattattcctagaaccaggcgacctgcgactccttgacgttgacaatcgagtagtactcccgattgaagcccccattcgtataataattacatcacaagacgtcttgcactcatgagctgtccccacattaggcttaaaaacagatgcaattcccggacgtctaaaccaaaccactttcaccgctacacgaccgggggtatactacggtcaatgctctgaaatctgtggagcaaaccacagtttcatgcccatcgtcctagaattaattcccctaaaaatctttgaaatagggcccgtatttaccctatagcaccccctctaccccctctagagcccactgtaaagctaacttagcattaaccttttaagttaaagattaagagaaccaacacctctttacagtgaaatgccccaactaaatactaccgtatggcccaccataattacccccatactccttacactattcctcatcacccaactaaaaatattaaacacaaactaccacctacctccctcaccaaagcccataaaaataaaaaattataacaaaccctgagaaccaaaatgaacgaaaatctgttcgcttcattcattgcccccacaatcctaggcctacccgccgcagtactgatcattctatttccccctctattgatccccacctccaaatatctcatcaacaaccgactaatcaccacccaacaatgactaatcaaactaacctcaaaacaaatgataaccatacacaacactaaaggacgaacctgatctcttatactagtatccttaatcatttttattgccacaactaacctcctcggactcctgcctcactcatttacaccaaccacccaactatctataaacctagccatggccatccccttatgagcgggcgcagtgattataggctttcgctctaagattaaaaatgccctagcccacttcttaccacaaggcacacctacaccccttatccccatactagttattatcgaaaccatcagcctactcattcaaccaatagccctggccgtacgcctaaccgctaacattactgcaggccacctactcatgcacctaattggaagcgccaccctagcaatatcaaccattaaccttccctctacacttatcatcttcacaattctaattctactgactatcctagaaatcgctgtcgccttaatccaagcctacgttttcacacttctagtaagcctctacctgcacgacaacacataatgacccaccaatcacatgcctatcatatagtaaaacccagcccatgacccctaacaggggccctctcagccctcctaatgacctccggcctagccatgtgatttcacttccactccataacgctcctcatactaggcctactaaccaacacactaaccatataccaatgatggcgcgatgtaacacgagaaagcacataccaaggccaccacacaccacctgtccaaaaaggccttcgatacgggataatcctatttattacctcagaagtttttttcttcgcaggatttttctgagccttttaccactccagcctagcccctaccccccaattaggagggcactggcccccaacaggcatcaccccgctaaatcccctagaagtcccactcctaaacacatccgtattactcgcatcaggagtatcaatcacctgagctcaccatagtctaatagaaaacaaccgaaaccaaataattcaagcactgcttattacaattttactgggtctctattttaccctcctacaagcctcagagtacttcgagtctcccttcaccatttccgacggcatctacggctcaacattttttgtagccacaggcttccacggacttcacgtcattattggctcaactttcctcactatctgcttcatccgccaactaatatttcactttacatccaaacatcactttggcttcgaagccgccgcctgatactggcattttgtagatgtggtttgactatttctgtatgtctccatctattgatgagggtcttactcttttagtataaatagtaccgttaacttccaattaactagttttgacaacattcaaaaaagagtaataaacttcgccttaattttaataatcaacaccctcctagccttactactaataattattacattttgactaccacaactcaacggctacatagaaaaatccaccccttacgagtgcggcttcgaccctatatcccccgcccgcgtccctttctccataaaattcttcttagtagctattaccttcttattatttgatctagaaattgccctccttttacccctaccatgagccctacaaacaactaacctgccactaatagttatgtcatccctcttattaatcatcatcctagccctaagtctggcctatgagtgactacaaaaaggattagactgaaccgaattggtatatagtttaaacaaaacgaatgatttcgactcattaaattatgataatcatatttaccaaatgcccctcatttacataaatattatactagcatttaccatctcacttctaggaatactagtatatcgctcacacctcatatcctccctactatgcctagaaggaataatactatcgctgttcattatagctactctcataaccctcaacacccactccctcttagccaatattgtgcctattgccatactagtctttgccgcctgcgaagcagcggtgggcctagccctactagtctcaatctccaacacatatggcctagactacgtacataacctaaacctactccaatgctaaaactaatcgtcccaacaattatattactaccactgacatgactttccaaaaaacacataatttgaatcaacacaaccacccacagcctaattattagcatcatccctctactattttttaaccaaatcaacaacaacctatttagctgttccccaaccttttcctccgaccccctaacaacccccctcctaatactaactacctgactcctacccctcacaatcatggcaagccaacgccacttatccagtgaaccactatcacgaaaaaaactctacctctctatactaatctccctacaaatctccttaattataacattcacagccacagaactaatcatattttatatcttcttcgaaaccacacttatccccaccttggctatcatcacccgatgaggcaaccagccagaacgcctgaacgcaggcacatacttcctattctacaccctagtaggctcccttcccctactcatcgcactaatttacactcacaacaccctaggctcactaaacattctactactcactctcactgcccaagaactatcaaactcctgagccaacaacttaatatgactagcttacacaatagcttttatagtaaagatacctctttacggactccacttatgactccctaaagcccatgtcgaagcccccatcgctgggtcaatagtacttgccgcagtactcttaaaactaggcggctatggtataatacgcctcacactcattctcaaccccctgacaaaacacatagcctaccccttccttgtactatccctatgaggcataattataacaagctccatctgcctacgacaaacagacctaaaatcgctcattgcatactcttcaatcagccacatagccctcgtagtaacagccattctcatccaaaccccctgaagcttcaccggcgcagtcattctcataatcgcccacgggcttacatcctcattactattctgcctagcaaactcaaactacgaacgcactcacagtcgcatcataatcctctctcaaggacttcaaactctactcccactaatagctttttgatgacttctagcaagcctcgctaacctcgccttaccccccactattaacctactgggagaactctctgtgctagtaaccacgttctcctgatcaaatatcactctcctacttacaggactcaacatactagtcacagccctatactccctctacatatttaccacaacacaatggggctcactcacccaccacattaacaacataaaaccctcattcacacgagaaaacaccctcatgttcatacacctatcccccattctcctcctatccctcaaccccgacatcattaccgggttttcctcttgtaaatatagtttaaccaaaacatcagattgtgaatctgacaacagaggcttacgaccccttatttaccgagaaagctcacaagaactgctaactcatgcccccatgtctaacaacatggctttctcaacttttaaaggataacagctatccattggtcttaggccccaaaaattttggtgcaactccaaataaaagtaataaccatgcacactactataaccaccctaaccctgacttccctaattccccccatccttaccaccctcgttaaccctaacaaaaaaaactcatacccccattatgtaaaatccattgtcgcatccacctttattatcagtctcttccccacaacaatattcatgtgcctagaccaagaagttattatctcgaactgacactgagccacaacccaaacaacccagctctccctaagcttcaaactagactacttctccataatattcatccctgtagcattgttcgttacatggtccatcatagaattctcactgtgatatataaactcagacccaaacattaatcagttcttcaaatatctactcatcttcctaattaccatactaatcttagttaccgctaacaacctattccaactgttcatcggctgagagggcgtaggaattatatccttcttgctcatcagttgatgatacgcccgagcagatgccaacacagcagccattcaagcaatcctatacaaccgtatcggcgatatcggtttcatcctcgccttagcatgatttatcctacactccaactcatgagacccacaacaaatagcccttctaaacgctaatccaagcctcaccccactactaggcctcctcctagcagcagcaggcaaatcagcccaattaggtctccacccctgactcccctcagccatagaaggccccaccccagtctcagccctactccactcaagcactatagttgtagcaggaatcttcttactcatccgcttccaccccctagcagaaaatagcccactaatccaaactctaacactatgcttaggcgctatcaccactctgttcgcagcagtctgcgcccttacacaaaatgacatcaaaaaaatcgtagccttctccacttcaagtcaactaggactcataatagttacaatcggcatcaaccaaccacacctagcattcctgcacatctgtacccacgccttcttcaaagccatactatttatgtgctccgggtccatcatccacaaccttaacaatgaacaagatattcgaaaaataggaggactactcaaaaccatacctctcacttcaacctccctcaccattggcagcctagcattagcaggaatacctttcctcacaggtttctactccaaagaccacatcatcgaaaccgcaaacatatcatacacaaacgcctgagccctatctattactctcatcgctacctccctgacaagcgcctatagcactcgaataattcttctcaccctaacaggtcaacctcgcttccccacccttactaacattaacgaaaataaccccaccctactaaaccccattaaacgcctggcagccggaagcctattcgcaggatttctcattactaacaacatttcccccgcatcccccttccaaacaacaatccccctctacctaaaactcacagccctcgctgtcactttcctaggacttctaacagccctagacctcaactacctaaccaacaaacttaaaataaaatccccactatgcacattttatttctccaacatactcggattctaccctagcatcacacaccgcacaatcccctatctaggccttcttacgagccaaaacctgcccctactcctcctagacctaacctgactagaaaagctattacctaaaacaatttcacagcaccaaatctccacctccatcatcacctcaacccaaaaaggcataattaaactttacttcctctctttcttcttcccactcatcctaaccctactcctaatcacataacctattcccccgagcaatctcaattacaatatatacaccaacaaacaatgttcaaccagtaactactactaatcaacgcccataatcatacaaagcccccgcaccaataggatcctcccgaatcaaccctgacccctctccttcataaattattcagcttcctacactattaaagtttaccacaaccaccaccccatcatactctttcacccacagcaccaatcctacctccatcgctaaccccactaaaacactcaccaagacctcaacccctgacccccatgcctcaggatactcctcaatagccatcgctgtagtatatccaaagacaaccatcattccccctaaataaattaaaaaaactattaaacccatataacctcccccaaaattcagaataataacacacccgaccacaccgctaacaatcaatactaaacccccataaataggagaaggcttagaagaaaaccccacaaaccccattactaaacccacactcaacagaaacaaagcatacatcattattctcgcacggactacaaccacgaccaatgatatgaaaaaccatcgttgtatttcaactacaagaacaccaatgaccccaatacgcaaaactaaccccctaataaaattaattaaccactcattcatcgacctccccaccccatccaacatctccgcatgatgaaacttcggctcactccttggcgcctgcctgatcctccaaatcaccacaggactattcctagccatgcactactcaccagacgcctcaaccgccttttcatcaatcgcccacatcactcgagacgtaaattatggctgaatcatccgctaccttcacgccaatggcgcctcaatattctttatctgcctcttcctacacatcgggcgaggcctatattacggatcatttctctactcagaaacctgaaacatcggcattatcctcctgcttgcaactatagcaacagccttcataggctatgtcctcccgtgaggccaaatatcattctgaggggccacagtaattacaaacttactatccgccatcccatacattgggacagacctagttcaatgaatctgaggaggctactcagtagacagtcccaccctcacacgattctttacctttcacttcatcttgcccttcattattgcagccctagcagcactccacctcctattcttgcacgaaacgggatcaaacaaccccctaggaatcacctcccattccgataaaatcaccttccacccttactacacaatcaaagacgccctcggcttacttctcttccttctctccttaatgacattaacactattctcaccagacctcctaggcgacccagacaattataccctagccaaccccttaaacacccctccccacatcaagcccgaatgatatttcctattcgcctacacaattctccgatccgtccctaacaaactaggaggcgtccttgccctattactatccatcctcatcctagcaataatccccatcctccatatatccaaacaacaaagcataatatttcgcccactaagccaatcactttattgactcctagccgcagacctcctcattctaacctgaatcggaggacaaccagtaagctacccttttaccatcattggacaagtagcatccgtactatacttcacaacaatcctaatcctaataccaactatctccctaattgaaaacaaaatactcaaatgggcctgtccttgtagtataaactaatacaccagtcttgtaaaccggagatgaaaacctttttccaaggacaaatcagagaaaaagtctttaactccaccattagcacccaaagctaagattctaatttaaactattctctgttctttcatggggaagcagatttgggtaccacccaagtattgactcacccatcaacaaccgctatgtatttcgtacattactgccagccaccatgaatattgtacggtaccataaatacttgaccacctgtagtacataaaaacccaatccacatcaaaaccccctccccatgcttacaagcaagtacagcaatcaaccctcaactatcacacatcaactgcaactccaaagccacccctcacccactaggataccaacaaacctacccaccctcaacagtacatagtacataaagccatttaccgtacatagcacattacagtcaaatcccttctcgtccccatggatgacccccctcagataggggtcccttgaccaccatcctccgtgaaatcaatatcccgcacaagagtgctactctcctcgctccgggcccataacacttgggggtagctaaagtgaactgtatccgacatctggttcctacttcagggccataaagcctaaatagcccacacgttccccttaaataagacatcacgatg

SEQ ID NO: 61 - DNA, 16570 bp, Homo sapiens mitochondrial
  3108: "n" refers to a nucleotide at position 3107 of the Cambridge Reference Sequence (CRS, Anderson et al. 1981 Nature 290:457-465), later determined to be absent from the human mtDNA sequence according to the revised CRS (rCRS, Andrews et al. 1999 Nature Genetics 23:147); "n" therefore represents a single nucleotide deletion at a position corresponding to nucleotide 3107 of SEQ ID NO:1 as provided herein.
gatcacaggtctatcaccctattaaccactcacgggagctctccatgcatttggtattttcgtctggggggtgtgcacgcgatagcattgcgagacgctggagccggagcaccctatgtcgcagtatctgtctttgattcctgcctcatcctattatttatcgcacctacgttcaatattacaggcgagcatacctactaaagcgtattaattaattaatgcttgtaggacataataataacaattgaatgtctgcacagccgctttccacacagacatcataacaaaaaatttccaccaaaccccccctcccccgccttctggccacagcacttaaacacatctctgccaaaccccaaaaacaaagaaccctaacaccagcctaaccagatttcaaattttatcttttggcggtatgcacttttaacagtcaccccccaactaacacattattttcccctcccactcccatactactaatctcatcaatacaacccccggccatcctacccagcacacacacaccgctgctaaccccataccccgaaccaaccaaaccccaaagacaccccccacagtttatgtagcttacctcctcaaagcaatacactgaaaatgtttagacgggctcacatcaccccataaacaaataggtttggtcctagcctttctattagctcttagtaagattacacatgcaagcatccccattccagtgagttcaccctctaaatcaccacgatcaaaagggacaagcatcaagcacgcagcaatgcagctcaaaacgcttagcctagccacacccccacgggaaacagcagtgattaacctttagcaataaacgaaagtttaactaagctatactaaccccagggttggtcaatttcgtgccagccaccgcggtcacacgattaacccaagtcaatagaagccggcgtaaagagtgttttagatcaccccctccccaataaagctaaaactcacctgagttgtaaaaaactccagttgacacaaaatagactacgaaagtggctttaacatatctgaacacacaatagctaagacccaaactgggattagataccccactatgcttagccctaaacctcaacagttaaatcaacaaaactgctcgccagaacactacgagccacagcttaaaactcaaaggacctggcggtgcttcatatccctctagaggagcctgttctgtaatcgataaaccccgatcaacctcaccaccccttgctcagcctatataccgccatcttcagcaaaccctgatgaaggctacaaagtaagcgcaagtacccacgtaaagacgttaggtcaaggtgtagcccatgaggtggcaagaaatgggctacattttctaccccagaaaactacgatagcccttatgaaacttaagggtcgaaggtggatttagcagtaaactgagagtagagtgcttagttgaacagggccctgaagcgcgtacacaccgcccgtcaccctcctcaagtatacttcaaaggacatttaactaaaacccctacgcatttatatagaggagacaagtcgtaacatggtaagtgtactggaaagtgcacttggacgaaccagagtgtagcttaacacaaagcacccaacttacacttaggagatttcaacttaacttgaccgctctgagctaaacctagccccaaacccactccaccttactaccagacaaccttagccaaaccatttacccaaataaagtataggcgatagaaattgaaacctggcgcaatagatatagtaccgcaagggaaagatgaaaaattataaccaagcataatatagcaaggactaacccctataccttctgcataatgaattaactagaaataactttgcaaggagagccaaagctaagacccccgaaaccagacgagctacctaagaacagctaaaagagcacacccgtctatgtagcaaaatagtgggaagatttataggtagaggcgacaaacctaccgagcctggtgatagctggttgtccaagatagaatcttagttcaactttaaatttgcccacagaaccctctaaatccccttgtaaatttaactgttagtccaaagaggaacagctctttggacactaggaaaaaaccttgtagagagagtaaaaaatttaacacccatagtaggcctaaaagcagccaccaattaagaaagcgttcaagctcaacacccactacctaaaaaatcccaaacatataactgaactcctcacacccaattggaccaatctatcaccctatagaagaactaatgttagtataagtaacatgaaaacattctcctccgcataagcctgcgtcagattaaaacactgaactgacaattaacagcccaatatctacaatcaaccaacaagtcattattaccctcactgtcaacccaacacaggcatgctcataaggaaaggttaaaaaaagtaaaaggaactcggcaaatcttaccccgcctgtttaccaaaaacatcacctctagcatcaccagtattagaggcaccgcctgcccagtgacacatgtttaacggccgcggtaccctaaccgtgcaaaggtagcataatcacttgttccttaaatagggacctgtatgaatggctccacgagggttcagctgtctcttacttttaaccagtgaaattgacctgcccgtgaagaggcgggcatgacacagcaagacgagaagaccctatggagctttaatttattaatgcaaacagtacctaacaaacccacaggtcctaaactaccaaacctgcattaaaaatttcggttggggcgacctcggagcagaacccaacctccgagcagtacatgctaagacttcaccagtcaaagcgaactactatactcaattgatccaataacttgaccaacggaacaagttaccctagggataacagcgcaatcctattctagagtccatatcaacaatagggtttacgacctcgatgttggatcaggacatcccgatggtgcagccgctattaaaggttcgtttgttcaacgattaaagtcctacgtgatctgagttcagaccggagtaatccaggtcggtttctatctacnttcaaattcctccctgtacgaaaggacaagagaaataaggcctacttcacaaagcgccttcccccgtaaatgatatcatctcaacttagtattatacccacacccacccaagaacagggtttgttaagatggcagagcccggtaatcgcataaaacttaaaactttacagtcagaggttcaattcctcttcttaacaacatacccatggccaacctcctactcctcattgtacccattctaatcgcaatggcattcctaatgcttaccgaacgaaaaattctaggctatatacaactacgcaaaggccccaacgttgtaggcccctacgggctactacaacccttcgctgacgccataaaactcttcaccaaagagcccctaaaacccgccacatctgccatcaccctctacatcaccgccccgaccttagctctcaccatcgctcttctactatgaacccccctccccatacccaaccccctggtcaacctcaacctaggcctcctatttattctagccacctctagcctagccgtttactcaatcctctgatcagggtgagcatcaaactcaaactacgccctgatcggcgcactgcgagcagtagcccaaacaatctcatatgaagtcaccctagccatcattctactatcaacattactaataagtggctcctttaacctctccacccttatcacaacacaagaacacctctgattactcctgccatcatgacccttggccataatatgatttatctccacactagcagagaccaaccgaacccccttcgaccttgccgaaggggagtccgaactagtctcaggcttcaacatcgaatacgccgcaggccccttcgccctattcttcatagccgaatacacaaacattattataataaacaccctcaccactacaatcttcctaggaacaacatatgacgcactctcccctgaactctacacaacatattttgtcaccaagaccctacttctaacctccctgttcttatgaattcgaacagcatacccccgattccgctacgaccaactcatacacctcctatgaaaaaacttcctaccactcaccctagcattacttatatgatatgtctccatacccattacaatctccagcattccccctcaaacctaagaaatatgtctgataaaagagttactttgatagagtaaataataggagcttaaacccccttatttctaggactatgagaatcgaacccatccctgagaatccaaaattctccgtgccacctatcacaccccatcctaaagtaaggtcagctaaataagctatcgggcccataccccgaaaatgttggttatacccttcccgtactaattaatcccctggcccaacccgtcatctactctaccatctttgcaggcacactcatcacagcgctaagctcgcactgattttttacctgagtaggcctagaaataaacatgctagcttttattccagttctaaccaaaaaaataaaccctcgttccacagaagctgccatcaagtatttcctcacgcaagcaaccgcatccataatccttctaatagctatcctcttcaacaatatactctccggacaatgaaccataaccaatactaccaatcaatactcatcattaataatcataatggctatagcaataaaactaggaatagccccctttcacttctgagtcccagaggttacccaaggcacccctctgacatccggcctgcttcttctcacatgacaaaaactagcccccatctcaatcatataccaaatctctccctcactaaacgtaagccttctcctcactctctcaatcttatccatcatagcaggcagttgaggtggattaaaccaaacccagctacgcaaaatcctagcatactcctcaattacccacataggatgaataatagcaattctaccgtacaaccctaacataaccattcttaatttaactatttatattatcctaactactaccgcattcctactactcaacttaaactccagcaccacgaccctactactatctcgcacctgaaacaagctaacatgactaacacccttaattccatccaccctcctctccctaggaggcctgcccccgctaaccggctttttgcccaaatgggccattatcgaagaattcacaaaaaacaatagcctcatcatccccaccatcatagccaccatcaccctccttaacctctacttctacctacgcctaatctactccacctcaatcacactactccccatatctaacaacgtaaaaataaaatgacagtttgaacatacaaaacccaccccattcctccccacactcatcacccttaccacgctactcctacctatctccccttttatactaataatcttatagaaatttaggttaaatacagaccaagagccttcaaagccctcagtaagttgcaatacttaatttctgtaacagctaaggactgcaaaaccccactctgcatcaactgaacgcaaatcagccactttaattaagctaagcccttactagaccaatgggacttaaacccacaaacacttagttaacagctaagcaccctaatcaactggcttcaatctacttctcccgccgccgggaaaaaaggcgggagaagccccggcaggtttgaagctgcttcttcgaatttgcaattcaatatgaaaatcacctcggagctggtaaaaagaggcctaacccctgtctttagatttacagtccaatgcttcactcagccattttacctcacccccactgatgttcgccgaccgttgactattctctacaaaccacaaagacattggaacactatacctattattcggcgcatgagctggagtcctaggcacagctctaagcctccttattcgagccgagctgggccagccaggcaaccttctaggtaacgaccacatctacaacgttatcgtcacagcccatgcatttgtaataatcttcttcatagtaatacccatcataatcggaggctttggcaactgactagttcccctaataatcggtgcccccgatatggcgtttccccgcataaacaacataagcttctgactcttacctccctctctcctactcctgctcgcatctgctatagtggaggccggagcaggaacaggttgaacagtctaccctcccttagcagggaactactcccaccctggagcctccgtagacctaaccatcttctccttacacctagcaggtgtctcctctatcttaggggccatcaatttcatcacaacaattatcaatataaaaccccctgccataacccaataccaaacgcccctcttcgtctgatccgtcctaatcacagcagtcctacttctcctatctctcccagtcctagctgctggcatcactatactactaacagaccgcaacctcaacaccaccttcttcgaccccgccggaggaggagaccccattctataccaacacctattctgatttttcggtcaccctgaagtttatattcttatcctaccaggcttcggaataatctcccatattgtaacttactactccggaaaaaaagaaccatttggatacataggtatggtctgagctatgatatcaattggcttcctagggtttatcgtgtgagcacaccatatatttacagtaggaatagacgtagacacacgagcatatttcacctccgctaccataatcatcgctatccccaccggcgtcaaagtatttagctgactcgccacactccacggaagcaatatgaaatgatctgctgcagtgctctgagccctaggattcatctttcttttcaccgtaggtggcctgactggcattgtattagcaaactcatcactagacatcgtactacacgacacgtactacgttgtagctcacttccactatgtcctatcaataggagctgtatttgccatcataggaggcttcattcactgatttcccctattctcaggctacaccctagaccaaacctacgccaaaatccatttcactatcatattcatcggcgtaaatctaactttcttcccacaacactttctcggcctatccggaatgccccgacgttactcggactaccccgatgcatacaccacatgaaacatcctatcatctgtaggctcattcatttctctaacagcagtaatattaataattttcatgatttgagaagccttcgcttcgaagcgaaaagtcctaatagtagaagaaccctccataaacctggagtgactatatggatgccccccaccctaccacacattcgaagaacccgtatacataaaatctagacaaaaaaggaaggaatcgaaccccccaaagctggtttcaagccaaccccatggcctccatgactttttcaaaaaggtattagaaaaaccatttcataactttgtcaaagttaaattataggctaaatcctatatatcttaatggcacatgcagcgcaagtaggtctacaagacgctacttcccctatcatagaagagcttatcacctttcatgatcacgccctcataatcattttccttatctgcttcctagtcctgtatgcccttttcctaacactcacaacaaaactaactaatactaacatctcagacgctcaggaaatagaaaccgtctgaactatcctgcccgccatcatcctagtcctcatcgccctcccatccctacgcatcctttacataacagacgaggtcaacgatccttcccttaccatcaaatcaattggccaccaatggtactgaacctacgagtacaccgactacggcggactaatcttcaactcctacatacttcccccattattcctagaaccaggcgacctgcgactccttgacgttgacaatcgagtagtactcccgattgaagcccccattcgtataataattacatcacaagacgtcttgcactcatgagctgtccccacattaggcttaaaaacagatgcaattcccggacgtctaaaccaaaccactttcaccgctacacgaccgggggtatactacggtcaatgctctgaaatctgtggagcaaaccacagtttcatgcccatcgtcctagaattaattcccctaaaaatctttgaaataggacccgtatttaccctatagcaccccctctaccccctctagagcccactgtaaagctaacttagcattaaccttttaagttaaagattaagagaaccaacacctctttacagtgaaatgccccaactaaatactaccgtatggcccaccataattacccccatactccttacactattcctcatcacccaactaaaaatattaaacacaaactaccacctacctccctcaccaaagcccataaaaataaaaaattataacaaaccctgagaaccaaaatgaacgaaaatctgttcgcttcattcattgcccccacaatcctaggcctacccgccgcagtactgatcattctatttccccctctattgatccccacctccaaatatctcatcaacaaccgactaatcaccacccaacaatgactaatcaaactaacctcaaaacaaatgataaccatacacaacactaaaggacgaacctgatctcttatactagtatccttaatcatttttattgccacaactaacctcctcggactcctgcctcactcatttacaccaaccacccaactatctataaacctagccatggccatccccttatgagcgggcgcagtgattataggctttcgctctaagattaaaaatgccctagcccacttcttaccacaaggcacacctacaccccttatccccatactagttattatcgaaaccatcagcctactcattcaaccaatagccctagccgtacgcctaaccgctaacattactgcaggccacctactcatgcacctaattggaagcgccaccctagcaatatcaaccattaaccttccctctacacttatcatcttcacaattctaattctactgactatcctagaaatcgctgtcgccttaatccaagcctacgttttcacacttctagtaagcctctacctgcacgacaacacataatgacccaccaatcacatgcctatcatatagtaaaacccagcccatgacccctaacaggggccctctcagccctcctaatgacctccggcctagccatgtgatttcacttccactccataacgctcctcatactaggcctactaaccaacacactaaccatataccaatgatggcgcgatgtaacacgagaaagcacataccaaggccaccacacaccacctgtccaaaaaggccttcgatacgggataatcctatttattacctcagaagtttttttcttcgcaggatttttctgagccttttaccactccagcctagcccctaccccccaattaggagggcactggcccccaacaggcatcaccccgctaaatcccctagaagtcccactcctaaacacatccgtattactcgcatcaggagtatcaatcacctgagctcaccatagtctaatagaaaacaaccgaaaccaaataattcaagcactgcttattacaattttactgggtctctattttaccctcctacaagcctcagagtacttcgagtctcccttcaccatttccgacggcatctacggctcaacattttttgtagccacaggcttccacggacttcacgtcattattggctcaactttcctcactatctgcttcatccgccaactaatatttcactttacatccaaacatcactttggcttcgaagccgccgcctgatactggcattttgtagatgtggtttgactatttctgtatgtctccatctattgatgagggtcttactcttttagtataaatagtaccgttaacttccaattaactagttttgacaacattcaaaaaagagtaataaacttcgccttaattttaataatcaacaccctcctagccttactactaataattattacattttgactaccacaactcaacggctacatagaaaaatccaccccttacgagtgcggcttcgaccctatatcccccgcccgcgtccctttctccataaaattcttcttagtagctattaccttcttattatttgatctagaaattgccctccttttacccctaccatgagccctacaaacaactaacctgccactaatagttatgtcatccctcttattaatcatcatcctagccctaagtctggcctatgagtgactacaaaaaggattagactgaaccgaattggtatatagtttaaacaaaacgaatgatttcgactcattaaattatgataatcatatttaccaaatgcccctcatttacataaatattatactagcatttaccatctcacttctaggaatactagtatatcgctcacacctcatatcctccctactatgcctagaaggaataatactatcgctgttcattatagctactctcataaccctcaacacccactccctcttagccaatattgtgcctattgccatactagtctttgccgcctgcgaagcagcggtgggcctagccctactagtctcaatctccaacacatatggcctagactacgtacataacctaaacctactccaatgctaaaactaatcgtcccaacaattatattactaccactgacatgactttccaaaaaacacataatttgaatcaacacaaccacccacagcctaattattagcatcatccctctactattttttaaccaaatcaacaacaacctatttagctgttccccaaccttttcctccgaccccctaacaacccccctcctaatactaactacctgactcctacccctcacaatcatggcaagccaacgccacttatccagtgaaccactatcacgaaaaaaactctacctctctatactaatctccctacaaatctccttaattataacattcacagccacagaactaatcatattttatatcttcttcgaaaccacacttatccccaccttggctatcatcacccgatgaggcaaccagccagaacgcctgaacgcaggcacatacttcctattctacaccctagtaggctcccttcccctactcatcgcactaatttacactcacaacaccctaggctcactaaacattctactactcactctcactgcccaagaactatcaaactcctgagccaacaacttaatatgactagcttacacaatagcttttatagtaaagatacctctttacggactccacttatgactccctaaagcccatgtcgaagcccccatcgctgggtcaatagtacttgccgcagtactcttaaaactaggcggctatggtataatacgcctcacactcattctcaaccccctgacaaaacacatagcctaccccttccttgtactatccctatgaggcataattataacaagctccatctgcctacgacaaacagacctaaaatcgctcattgcatactcttcaatcagccacatagccctcgtagtaacagccattctcatccaaactccctgaagcttcaccggcgcagtcattctcataatcgcccacggacttacatcctcattactattctgcctagcaaactcaaactacgaacgcactcacagtcgcatcataatcctctctcaaggacttcaaactctactcccactaatagctttttgatgacttctagcaagcctcgctaacctcgccttaccccccactattaacctactgggagaactctctgtgctagtaaccacgttctcctgatcaaatatcactctcctacttacgggactcaacatactagtcacagccctatactccctctacatatttaccacaacacaatggggctcactcacccaccacattaacaacataaaaccctcattcacacgagaaaacaccctcatgttcatacacctatcccccattctcctcctatccctcaaccccgacatcattaccgggttttcctcttgtaaatatagtttaaccaaaacatcagattgtgaatctgacaacagaggcttacgaccccttatttaccgagaaagctcacaagaactgctaactcatgcccccatgtctaacaacatggctttctcaacttttaaaggataacagctatccattggtcttaggccccaaaaattttggtgcaactccaaataaaagtaataaccatgcacactactataaccaccctaaccctgacttccctaattccccccatccttaccaccctcgttaaccccaacaaaaaaaactcatacccccattatgtaaaatccattgtcgcatccacctttattatcagtctcttccccacaacaatattcatgtgcctagaccaagaagttattatctcgaactgacactgagccacaacccaaacaacccagctctccctaagcttcaaactagactacttctccataatattcatccctgtagcattgttcgttacatggtccatcatagaattctcactgtgatatataaactcagacccaaacattaatcagttcttcaaatatctactcattttcctaattaccatactaatcttagttaccgctaacaacctattccaactgttcatcggctgagagggcgtaggaattatatccttcttgctcatcagttgatgatacgcccgagcagatgccaacacagcagccattcaagcaatcctatacaaccgtatcggcgatatcggtttcatcctcgccttagcatgatttatcctacactccaactcatgagacccacaacaaatagcccttctaaacgctaatccaagcctcaccccactactaggcctcctcctagcagcagcaggcaaatcagcccaattaggtctccacccctgactcccctcagccatagaaggccccaccccagtctcagccctactccactcaagcactatagttgtagcaggaatcttcttactcatccgcttccaccccctagcagaaaatagcccactaatccaaactctaacactatgcttaggcgctatcaccactctgttcgcagcagtctgcgcccttacacaaaatgacatcaaaaaaatcgtagccttctccacttcaagtcaactaggactcataatagttacaatcggcatcaaccaaccacacctagcattcctgcacatctgtacccacgccttcttcaaagccatactatttatgtgctccgggtccatcatccacaaccttaacaatgaacaagatattcgaaaaataggaggactactcaaaaccatacctctcacttcaacctccctcaccattggcagcctagcattagcaggaatacctttcctcacaggtttctactccaaagaccacatcatcgaaaccgcaaacatatcatacacaaacgcctgagccctatctattactctcatcgctacctccctgacaagcgcctatagcactcgaataattcttctcaccctaacaggtcaacctcgcttccccacccttactaacattaacgaaaataaccccaccctactaaaccccattaaacgcctggcagccggaagcctattcgcaggatttctcattactaacaacatttcccccgcatcccccttccaaacaacaatccccctctacctaaaactcacagccctcgctgtcactttcctaggacttctaacagccctagacctcaactacctaaccaacaaacttaaaataaaatccccactatgcacattttatttctccaacatactcggattctaccctagcatcacacaccgcacaatcccctatctaggccttcttacgagccaaaacctgcccctactcctcctagacctaacctgactagaaaagctattacctaaaacaatttcacagcaccaaatctccacctccatcatcacctcaacccaaaaaggcataattaaactttacttcctctctttcttcttcccactcatcctaaccctactcctaatcacatagcctattcccccgagcaatctcaattacaatatatacaccaacaaacaatgttcaaccagtaactactactaatcaacgcccataatcatacaaagcccccgcaccaataggatcctcccgaatcaaccctgacccctctccttcataaattattcagcttcctacactattaaagtttaccacaaccaccaccccatcatactctttcacccacagcaccaatcctacctccatcgctaaccccactaaaacactcaccaagacctcaacccctgacccccatgcctcaggatactcctcaatagccatcgctgtagtatatccaaagacaaccatcattccccctaaataaattaaaaaaactattaaacccatataacctcccccaaaattcagaataataacacacccgaccacaccgctaacaatcaatactaaacccccataaataggagaaggcttagaagaaaaccccacaaaccccattactaaacccacactcaacagaaacaaagcatacatcattattctcgcacggactacaaccacgaccaatgatatgaaaaaccatcgttgtatttcaactacaagaacaccaatgaccccaatacgcaaaattaaccccctaataaaattaattaaccactcattcatcgacctccccaccccatccaacatctccgcatgatgaaacttcggctcactccttggcgcctgcctgatcctccaaatcaccacaggactattcctagccatgcactactcaccagacgcctcaaccgccttttcatcaatcgcccacatcactcgagacgtaaattatggctgaatcatccgctaccttcacgccaatggcgcctcaatattctttatctgcctcttcctacacatcgggcgaggcctatattacggatcatttctctactcagaaacctgaaacatcggcattatcctcctgcttgcaactatagcaacagccttcataggctatgtcctcccgtgaggccaaatatcattctgaggggccacagtaattacaaacttactatccgccatcccatacattgggacagacctagttcaatgaatctgaggaggctactcagtagacagtcccaccctcacacgattctttacctttcacttcatcttgcccttcattattgcagccctagcagcactccacctcctattcttgcacgaaacgggatcaaacaaccccctaggaatcacctcccattccgataaaatcaccttccacccttactacacaatcaaagacgccctcggcttacttctcttccttctctccttaatgacattaacactattctcaccagacctcctaggcgacccagacaattataccctagccaaccccttaaacacccctccccacatcaagcccgaatgatatttcctattcgcctacacaattctccgatccgtccctaacaaactaggaggcgtccttgccctattactatccatcctcatcctagcaataatccccatcctccatatatccaaacaacaaagcataatatttcgcccactaagccaatcactttattgactcctagccgcagacctcctcattctaacctgaatcggaggacaaccagtaagctacccttttaccatcattggacaagtagcatccgtactatacttcacaacaatcctaatcctaataccaactatctccctaattgaaaacaaaatactcaaatggccctgtccttgtagtataaactaatacaccagtcttgtaaaccggagatgaaaacctttttccaaggacaaatcagagaaaaagtctttaactccaccattagcacccaaagctaagattctaatttaaactattctctgttctttcatggggaagcagatttgggtaccacccaagtattgactcacccatcaacaaccgctatgtatttcgtacattactgccagccaccatgaatattgtacggtaccataaatacttgaccacctgtagtacataaaaacccaatccacatcaaaaccccctccccatgcttacaagcaagtacagcaatcaaccttcaactatcacacatcaactgcaactccaaagccacccctcacccactaggataccaacaaacctacctacccttaacagtacatagtacataaagccatttaccgtacatagcacattacagtcaaatcccttctcgtccccatggatgacccccctcagataggggtcccttgaccaccatcctccgtgaaatcaatatcccgcacaagagtgctactctcctcgctccgggcccataacacttgggggtagctaaagtgaactgtatccgacatctggttcctacttcagggccataaagcctaaatagcccacacgttccccttaaataagacatcacgatg

SEQ ID NO: 62 - DNA, 16571 bp, Homo sapiens mitochondrial
  3109: "n" refers to a nucleotide at position 3107 of the Cambridge Reference Sequence (CRS, Anderson et al. 1981 Nature 290:457-465), later determined to be absent from the human mtDNA sequence according to the revised CRS (rCRS, Andrews et al. 1999 Nature Genetics 23:147); "n" therefore represents a single nucleotide deletion at a position corresponding to nucleotide 3107 of SEQ ID NO:1 as provided herein.
gatcacaggtctatcaccctattaaccactcacgggagctctccatgcatttggtattttcgtctggggggtgtgcacgcgatagcattgcgagacgctggagccggagcaccctatgtcgcagtatctgtctttgattcctgcctcatcctattatttatcgcacctacgttcaatattacagacgaacatacttactaaagtgtgttaattaattaatgcttgtaagacataataataacaattgaatgtctgcacagccgctttccacacagacatcataacaaaaaattttcaccaaaccccccctcccccccgcttctggccacagcacttaaacacatctctgccaaaccccaaaaacaaagaaccctaacaccagcctaaccagatttcaaattttatcttttggcggtatgcacttttaacagtcaccccccaactaacacattattttcccctctcactcccatactactaatcccatcaacacaacccccggccatcctacccagcacacacacaccgctgctaaccccataccccgaaccaaccaaaccccaaagacaccccccacagtttatgtagcttacctcctcaaagcaatacactgaaaatgtttagacgggctcacatcaccccataaacaaataggtttggtcctagcctttctattagctcttagtaagattacacatgcaagcatccccgttccagtgagttcaccctctaaatcaccacgatcaaaagggacaagcatcaagcacgcagcaatgcagctcaaaacgcttagcctagccacacccccacgggaaacagcagtgattaacctttagcaataaacgaaagtttaactaagctatactaaccccagggttggtcaatttcgtgccagccaccgcggtcacacgattaacccaagtcaatagaagccggcgtaaagagtgttttagatcaccccctccccaataaagctaaaactcacctgagttgtaaaaaactccagttgacacaaaatagactacgaaagtggctttaacatatctgaacacacaatagctaagacccaaactgggattagataccccactatgcttagccctaaacctcaacagttaaatcaacaaaactgctcgccagaacactacgagccacagcttaaaactcaaaggacctggcggtgcttcatatccctctagaggagcctgttctgtaatcgataaaccccgatcaacctcaccacctcttgctcagcctatataccgccatcttcagcaaaccctgatgaaggctacaaagtaagcgcaagtacccacgtaaagacgttaggtcaaggtgtagcccatgaggtggcaagaaatgggctacattttctaccccagaaaactacgatagcccttatgaaacttaagggtcgaaggtggatttagcagtaaactgagagtagagtgcttagttgaacagggccctgaagcgcgtacacaccgcccgtcaccctcctcaagtatacttcaaaggacatttaactaaaacccctacgcatttatatagaggagacaagtcgtaacatggtaagtgtactggaaagtgcacttggacgaaccagagtgtagcttaacacaaagcacccaacttacacttaggagatttcaacttaacttgaccgctctgagctaaacctagccccaaacccactccaccttactaccagacaaccttagccaaaccatttacccaaataaagtataggcgatagaaattgaaacctggcgcaatagatatagtaccgcaagggaaagatgaaaaattataaccaagcataatatagcaaggactaacccctataccttctgcataatgaattaactagaaataactttgcaaggagagccaaagctaagacccccgaaaccagacgagctacctaagaacagctaaaagagcacacccgtctatgtagcaaaatagtgggaagatttataggtagaggcgacaaacctaccgagcctggtgatagctggttgtccaagatagaatcttagttcaactttaaatttgcccacagaaccctctaaatccccttgtaaatttaactgttagtccaaagaggaacagctctttggacactaggaaaaaaccttgtagagagagtaaaaaatttaacacccatagtaggcctaaaagcagccaccaattaagaaagcgttcaagctcaacacccactacctaaaaaatcccaaacatataactgaactcctcacacccaattggaccaatctatcaccctatagaagaactaatgttagtataagtaacatgaaaacattctcctccgcataagcctgcgtcagattaaaacactgaactgacaattaacagcccaatatctacaatcaaccaacaagtcattattaccctcactgtcaacccaacacaggcatgctcataaggaaaggttaaaaaaagtaaaaggaactcggcaaatcttaccccgcctgtttaccaaaaacatcacctctagcatcaccagtattagaggcaccgcctgcccagtgacacatgtttaacggccgcggtaccctaaccgtgcaaaggtagcataatcacttgttccttaaatagggacctgtatgaatggctccacgagggttcagctgtctcttacttttaaccagtgaaattgacctgcccgtgaagaggcgggcatgacacagcaagacgagaagaccctatggagctttaatttattaatgcaaacagtacctaacaaacccacaggtcctaaactaccaaacctgcattaaaaatttcggttggggcgacctcggagcagaacccaacctccgagcagtacatgctaagacttcaccagtcaaagcgaactactatactcaattgatccaataacttgaccaacggaacaagttaccctagggataacagcgcaatcctattctagagtccatatcaacaatagggtttacgacctcgatgttggatcaggacatcccaatggtgcagccgctattaaaggttcgtttgttcaacgattaaagtcctacgtgatctgagttcagaccggagtaatccaggtcggtttctatctacnttcaaattcctccctgtacgaaaggacaagagaaataaggcctacttcacaaagcgccttcccccgtaaatgatatcatctcaacttagtattatacccacacccacccaagaacagggtttgttaagatggcagagcccggtaatcgcataaaacttaaaactttacagtcagaggttcaattcctcttcttaacaacatacccatggccaacctcctactcctcattgtacccattctaatcgcaatggcattcctaatgcttaccgaacgaaaaattctaggccatatacaactacgcaaaggccccaacgttgtaggcccctacgggctactacaacccttcgctgacgccataaaactcttcaccaaagagcccctaaaacccgccacatctaccatcaccctctacatcaccgccccgaccttagctctcaccatcgctcttctactatgaacccccctccccatacccaaccccctggtcaacctcaacctaggcctcctatttattctagccacctctagcctagccgtttactcaatcctctgatcagggtgagcatcaaactcaaactacgccctgatcggcgcactgcgagcagtagcccaaacaatctcatatgaagtcaccctagccatcattctactatcaacattactaataagtggctcctttaacctctccacccttatcacaacacaagaacacctctgattactcctgccatcatgacccttggccataatatgatttatctccacactagcagagaccaaccgaacccccttcgaccttgccgaaggggagtccgaactagtctcaggcttcaacatcgaatacgccgcaggccccttcgccctattcttcatagccgaatacacaaacattattataataaacaccctcaccactacaatcttcctaggaacaacatatgacgcactctcccctgaactctacacaacatattttgtcaccaagaccctacttctaacctccctgttcttatgaattcgaacagcatacccccgattccgctacgaccaactcatacacctcctatgaaaaaacttcctaccactcaccctagcattacttatatgacatgtctccatacccattacaatctccagcattccccctcaaacctaagaaatatgtctgataaaagagttactttgatagagtaaataataggagcttaaacccccttatttctaggactatgagaatcgaacccatccctgagaatccaaaattctccgtgccacctatcacaccccatcctaaagtaaggtcagctaaataagctatcgggcccataccccgaaaatgttggttatacccttcccgtactaattaatcccctggcccaacccgtcatctactctaccatctttgcaggcacactcatcacagcgctaagctcgcactgattttttacctgagtaggcctagaaataaacatgctagcttttattccagttctaaccaaaaaaataaaccctcgttccacagaagctgccatcaagtatttcctcacgcaagcaaccgcatccataatccttctaatagctatcctcttcaacaatatactctccggacaatgaaccataaccaatactaccaatcaatactcatcattaataatcataatggctatagcaataaaactaggaatagccccctttcacttctgagtcccagaggttacccaaggcacccctctgacatccggcctgcttcttctcacatgacaaaaactagcccccatctcaatcatataccaaatctctccctcactaaacgtaagccttctcctcactctctcaatcttatccatcatagcaggcagttgaggtggattaaaccaaacccagctacgcaaaatcttagcatactcctcaattacccacataggatgaataatagcagttctaccgtacaaccctaacataaccattcttaatttaactatttatattatcctaactactaccgcattcctactactcaacttaaactccagcaccacgaccctactactatctcgcacctgaaacaagctaacatgactaacacccttaattccatccaccctcctctccctaggaggcctgcccccgctaaccggctttttgcccaaatgggccattatcgaagaattcacaaaaaacaatagcctcatcatccccaccatcatagccaccatcaccctccttaacctctacttctacctacgcctaatctactccacctcaatcacactactccccatatctaacaacgtaaaaataaaatgacaggttgaacatacaaaacccaccccattcctccccacactcatcggccttaccacgctactcctacctatctccccttttatactaataatcttatagaaatttaggttaaatacagaccaagagccttcaaagccctcagtaagttgcaatacttaatttctgtaacagctaaggactgcaaaaccccactctgcatcaactgaacgcaaatcagccactttaattaagctaagcccttactagaccaatgggacttaaacccacaaacacttagttaacagctaagcaccctaatcaactggcttcaatctacttctcccgccgccgggaaaaaaggcgggagaagccccggcagatttgaagctgcttcttcgaatttgcaattcaatatgaaaatcacctcggagctggtaaaaagaggcctaacccctgtctttagatttacagtccaatgcttcactcagccattttacctcacccccactgatgttcgccgaccgttgactattctctacaaaccacaaagacattggaacactatacctattattcggcgcatgagctggagtcctaggcacagctctaagcctccttattcgagccgagctgggccagccaggcaaccttctaggtaacgaccacatctacaacgttatcgtcacagcccatgcatttgtaataatcttcttcatagtaatacccatcataatcggaggctttggcaactgactagttcccctaataatcggtgcccccgatatggcgtttccccgcataaacaacataagcttctgactcttacctccctctctcctactcctgctcgcatctgctatagtggaggccggagcaggaacaggttgaacagtctaccctcccttagcagggaactactcccaccctggagcctccgtagacctaaccatcttctccttacacctagcaggtgtctcctctatcttaggggccatcaatttcatcacaacaattatcaatataaaaccccctgccataacccaataccaaacgcccctcttcgtctgatccgtcctaatcacagcagtcctacttctcctatctctcccagtcctagctgctggcatcactatactactaacagaccgcaacctcaacaccaccttcttcgaccccgccggaggaggagaccccattctataccaacacctattctgatttttcggtcaccctgaagtttatattcttatcctaccaggcttcggaataatctcccatattgtaacttactactccggaaaaaaagaaccatttggatacataggtatggtctgagctatgatatcaattggcttcctagggtttatcgtgtgagcacaccatatatttacagtaggaatagacgtagacacacgagcatatttcacctccgctaccataatcatcgctatccccaccggcgtcaaagtatttagctgactcgccacactccacggaagcaatatgaaatgatctgctgcagtgctctgagccctaggattcatctttcttttcaccgtaggtggcctgactggcattgtattagcaaactcatcactagacatcgtactacacgacacgtactacgttgtagctcacttccactatgtcctatcaataggagctgtatttgccatcataggaggcttcattcactgatttcccctattctcaggctacaccctagaccaaacctacgccaaaatccatttcactatcatattcatcggcgtaaatctaactttcttcccgcaacactttctcggcctatccggaatgccccgacgttactcggactaccccgatgcatacaccacatgaaacatcctatcatctgtaggctcattcatttctctaacagcagtaatattaataattttcatgatttgagaagccttcgcttcgaagcgaaaagtcctaatagtagaagaaccctccataaacctggagtgactatatggatgccccccaccctaccacacattcgaagaacccgtatacataaaatctagacaaaaaaggaaggaatcgaaccccccaaagctggtttcaagccaaccccatggcctccatgactttttcaaaaaggtattagaaaaaccatttcataactttgtcaaagttaaattataggctaaatcctatatatcttaatggcacatgcagcgcaagtaggtctacaagacgctacttcccctatcatagaagagcttatcacctttcatgatcacgccctcataatcattttccttatctgcttcctagtcctgtatgcccttttcctaacactcacaacaaaactaactaatactaacatctcagacgctcaggaaatagaaaccgtctgaactatcctgcccgccatcatcctagtcctcatcgccctcccatccctacgcatcctttacataacagacgaggtcaacgatccctcccttaccatcaaatcaattggccaccaatggtactgaacctacgagtacaccgactacggcggactaatcttcaactcctacatacttcccccattattcctagaaccaggcgacctgcgactccttgacgttgacaatcgagtagtactcccgattgaagcccccattcgtataataattacatcacaagacgtcttgcactcatgagctgtccccacattaggcttaaaaacagatgcaattcccggacgtctaaaccaaaccactttcaccgctacacgaccgggggtatactacggtcaatgctctgaaatctgtggagcaaaccacagtttcatgcccatcgtcctagaattaattcccctaaaaatctttgaaatagggcccgtatttaccctatagcaccccctctaccccctctagagcccactgtaaagctaacttagcattaaccttttaagttaaagattaagagaaccaacacctctttacagtgaaatgccccaactaaatactaccgtatggcccaccataattacccccatactccttacactattcctcatcacccaactaaaaatattaaacacaaactaccacctacctccctcaccaaagcccataaaaataaaaaattataacaaaccctgagaaccaaaatgaacgaaaatctgttcgcttcattcattgcccccacaatcctaggcctacccgccgcagtactgatcattctatttccccctctattgatccccacctccaaatatctcatcaacaaccgactaatcaccacccaacaatgactaatcaaactaacctcaaaacaaatgataaccatacacaacactaaaggacgaacctgatctcttatactagtatccttaatcatttttattgccacaactaacctcctcggactcctgcctcactcatttacaccaaccacccaactatctataaacctagccatggccatccccttatgagcgggcgcagtgattataggctttcgctctaagattaaaaatgccctagcccacttcttaccacaaggcacacctacaccccttatccccatactagttattatcgaaaccatcagcctactcattcaaccaatagccctggccgtacgcctaaccgctaacattactgcaggccacctactcatgcacctaattggaagcgccaccctagcaatatcaaccattaaccttccctctacacttatcatcttcacaattctaattctactgactatcctagaaatcgctgtcgccttaatccaagcctacgttttcacacttctagtaagcctctacctgcacgacaacacataatgacccaccaatcacatgcctatcatatagtaaaacccagcccatgacccctaacaggggccctctcagccctcctaatgacctccggcctagccatgtgatttcacttccactccataacgctcctcatactaggcctactaaccaacacactaaccatataccaatgatggcgcgatgtaacacgagaaagcacataccaaggccaccacacaccacctgtccaaaaaggccttcgatacgggataatcctatttattacctcagaagtttttttcttcgcaggatttttctgagccttttaccactccagcctagcccctaccccccaattaggagggcactggcccccaacaggcatcaccccgctaaatcccctagaagtcccactcctaaacacatccgtattactcgcatcaggagtatcaatcacctgagctcaccatagtctaatagaaaacaaccgaaaccaaataattcaagcactgcttattacaattttactgggtctctattttaccctcctacaagcctcagagtacttcgagtctcccttcaccatttccgacggcatctacggctcaacattttttgtagccacaggcttccacggacttcacgtcattattggctcaactttcctcactatctgcttcatccgccaactaatatttcactttacatccaaacatcactttggcttcgaagccgccgcctgatactggcattttgtagatgtggtttgactatttctgtatgtctccatctattgatgagggtcttactcttttagtataaatagtaccgttaacttccaattaactagttttgacaacattcaaaaaagagtaataaacttcgccttaattttaataatcaacaccctcctagccttactactaataattattacattttgactaccacaactcaacggctacatagaaaaatccaccccttacgagtgcggcttcgaccctatatcccccgcccgcgtccctttctccataaaattcttcttagtagctattaccttcttattatttgatctagaaattgccctccttttacccctaccatgagccctacaaacaactaacctgccactaatagttatgtcatccctcttattaatcatcatcctagccctaagtctggcctatgagtgactacaaaaaggattagactgagccgaattggtatatagtttaaacaaaacgaatgatttcgactcattaaattatgataatcatatctaccaaatgcccctcatttacataaatattatactagcatttaccatctcacttctaggaatactagtatatcgctcacacctcatatcctccctactatgcctagaaggaataatactatcgctgttcattatagctactctcataaccctcaacacccactccctcttagccaatattgtgcctattgccatactagtctttgccgcctgcgaagcagcggtgggcctagccctactagtctcaatctccaacacatatggcctagactacgtacataacctaaacctactccaatgctaaaactaatcgtcccaacaattatattactaccactgacatgactttccaaaaaacacataatttgaatcaacacaaccacccacagcctaattattagcatcatccctctactattttttaaccaaatcaacaacaacctatttagctgttccccaaccttttcctccgaccccctaacaacccccctcctaatactaactacctgactcctacccctcacaatcatggcaagccaacgccacttatccagtgaaccactatcacgaaaaaaactctacctctctatactaatctccctacaaatctccttaattataacattcacagccacagaactaatcatattttatatcttcttcgaaaccacacttatccccaccttggctatcatcacccgatgaggcaaccagccagaacgcctgaacgcaggcacatacttcctattctacaccctagtaggctcccttcccctactcatcgcactgatttacactcacaacaccctaggctcactaaacattctactactcactctcactgcccaagaactatcaaactcctgagccaacaacttaatatgactagcttacacaatagcttttatagtaaagatacctctttacggactccacttatgactccctaaagcccatgtcgaagcccccatcgctgggtcaatagtacttgccgcagtactcttaaaactaggcggctatggtataatacgcctcacactcattctcaaccccctgacaaaacacatagcctaccccttccttgtactatccctatgaggcataattataacaagctccatctgcctacgacaaacagacctaaaatcgctcattgcatactcttcaatcagccacatagccctcgtagtaacagccattctcatccaaaccccctgaagcttcaccggcgcagtcattctcataatcgcccacggacttacatcctcattactattctgcctagcaaactcaaactacgaacgcactcacagtcgcatcataatcctctctcaaggacttcaaactctactcccactaatagctttttgatgacttctagcaagcctcgctaacctcgccttaccccccactattaacctactgggagaactctctgtgctagtaaccacgttctcctgatcaaatatcactctcctacttacaggactcaacatactagtcacagccctatactccctctacatatttaccacaacacaatggggctcactcacccaccacattaacaacataaaaccctcattcacacgagaaaacaccctcatgttcatacacctatcccccattctcctcctatccctcaaccccgacatcattaccgggttttcctcttgtaaatatagtttaaccaaaacatcagattgtgaatctgacaacagaggcttacgaccccttatttaccgagaaagctcacaagaactgctaactcatgcccccatgtctaacaacatggctttctcaacttttaaaggataacagctatccattggtcttaggccccaaaaattttggtgcaactccaaataaaagtaataaccatgcacactactataaccaccctaaccctgacttccctaattccccccatccttaccaccctcgttaaccctaacaaaaaaaactcatacccccattatgtaaaatccattgtcgcatccacctttattatcagtctcttccccacaacaatattcatgtgcctagaccaagaagttattatctcgaactgacactgagccacaacccaaacaacccagctctccctaagcttcaaactagactacttctccataatattcatccctgtggcattgttcgttacatggtccatcatagaattctcactgtgatatataaactcagacccaaacattaatcagttcttcaaatatctactcatcttcctaattaccatactaatcttagttaccgctaacaacctattccaactgttcatcggctgagagggcgtaggaattatatccttcttgctcatcagttgatgatacgcccgagcagatgccaacacagcagccattcaagcaatcctatacaaccgtatcggcgatatcggtttcatcctcgccttagcatgatttatcctacactccaactcatgagacccacaacaaatagcccttctaaacgctaatccaagcctcaccccactactaggcctcctcctagcagcagcaggcaaatcagcccaattaggtctccacccctgactcccctcagccatagaaggccccaccccagtctcagccctactccactcaagcactatagttgtagcaggaatcttcttactcatccgcttccaccccctagcagaaaatagcccactaatccaaactctaacactatgcttaggcgctatcaccactctgttcgcagcagtctgcgcccttacacaaaatgacatcaaaaaaatcgtagccttctccacttcaagtcaactaggactcataatagttacaatcggcatcaaccaaccacacctagcattcctgcacatctgtacccacgccttcttcaaagccatactatttatgtgctccgggtccatcatccacaaccttaacaatgaacaagatattcgaaaaataggaggactactcaaaaccatacctctcacttcaacctccctcaccattggcagcctagcattagcaggaatacctttcctcacaggtttctactccaaagaccacatcatcgaaaccgcaaacatatcatacacaaacgcctgagccctatctattactctcatcgctacctccctgacaagcgcctatagcactcgaataattcttctcaccctaacaggtcaacctcgcttccccacccttactaacattaacgaaaataaccccaccctactaaaccccattaaacgcctgacagccggaagcctattcgcaggatttctcattactaacaacatttcccccgcatcccccttccaaacaacaatccccctctacctaaaactcacagccctcgctgtcactttcctaggacttctaacagccctagacctcaactacctaaccaacaaacttaaaataaaatccccactatgcacattttatttctccaacatactcggattctaccctagcatcacacaccgcacaatcccctatctaggccttcttacgagccaaaacctgcccctactcctcctagacctaacctgactagaaaagctattacctaaaacaatttcacagcaccaaatctccacctccatcatcacctcaacccaaaaaggcataattaaactttacttcctctctttcttcttcccactcatcctaaccctactcctaatcacataacctattcccccgagcaatctcaattacaatatatacaccaacaaacaatgttcaaccagtaactactactaatcaacgcccataatcatacaaagcccccgcaccaataggatcctcccgaatcaaccctgacccctctccttcataaattattcagcttcctacactattaaagtttaccacaaccaccaccccatcatactctttcacccacagcaccaatcctacctccatcgctaaccccactaaaacactcaccaagacctcaacccctgacccccatgcctcaggatactcctcaatagccatcgctgtagtatatccaaagacaaccatcattccccctaaataaattaaaaaaactattaaacccatataacctcccccaaaattcagaataataacacacccgaccacaccgctaacaatcaatactaaacccccataaataggagaaggcttagaagaaaaccccacaaaccccattactaaacccacactcaacagaaacaaagcatacatcattattctcgcacggactacaaccacgaccaatgatatgaaaaaccatcgttgtatttcaactacaagaacaccaatgaccccaatacgcaaaattaaccccctaataaaattaattaaccactcactcatcgacctccccaccccatccaacatctccgcatgatgaaacttcggctcactccttggcgcctgcctgatcctccaaatcaccacaggactattcctagccatgcactactcaccagacgcctcaaccgccttttcatcaatcgcccacatcactcgagacgtaaattatggctgaatcatccgctaccttcacgccaatggcgcctcaatattctttatctgcctcttcctacacatcgggcgaggcctatattacggatcatttctctactcagaaacctgaaacatcggcattatcctcctgcttgcaactatagcaacagccttcataggctatgtcctcccgtgaggccaaatatcattctgaggggccacagtaattacaaacttactatccgccatcccatacattgggacagacctagttcaatgaatctgaggaggctactcagtagacagtcccaccctcacacgattctttacctttcacttcatcttgcccttcattattgcagccctagcagcactccacctcctattcttgcacgaaacgggatcaaacaaccccctaggaatcacctcccattccgataaaatcaccttccacccttactacacaatcaaagacgccctcggcttacttctcttcattctctccttaatgacattaacactattctcaccagacctcctaggcgacccagacaattataccctagccaaccccttaaacacccctccccacatcaagcccgaatgatatttcctattcgcctacacaattctccgatccgtccctaacaaactaggaggcgtccttgccctattactatccatcctcatcctagcaataatccccatcctccatatatccaaacaacaaagcataatatttcgcccactaagccaatcactttattgactcctagccgcagacctcctcattctaacctgaatcggaggacaaccagtaagctacccttttaccatcattggacaagtagcatccgtactatacttcacaacaatcctaatcctaataccaactatctccctaattgaaaacaaaatactcaaatgggcctgtccttgtagtataaactaatacaccagtcttgtaaaccggagatgaaaacctttttccaaggacaaatcagagaaaaagtctttaactccaccattagcacccaaagctaagattctaatttaaactattctctgttctttcatggggaagcagatttgggtaccacccaagtattgacttacccatcaacaaccgctatgtatttcgtacattactgccagccaccatgaatattgcacggtaccataaatacttgaccacctgtagtacataaaaacccaatccacatcaaaaccccctccccatgcttacaagcaagtacagcaatcaaccctcaactatcacgcatcaactgcaactccaaagccacccctcacccactaggataccaacaaacctacccacccttaacagtacatagtacataaagccatttaccgtacatagcacattacagtcaaatcccttctcgtccccatggatgacccccctcagataggggtcccttgaccaccatcctccgtgaaatcaatatcccgcacaagagtgctactctcctcgctccgggcccataacacttgggggtagctaaagtgaactgtatccgacatctggttcctacttcagggccataaagcctaaatagcccacacgttccccttaaataagacatcacgatg

SEQ ID NO: 63 - DNA, 16571 bp, Homo sapiens mitochondrial
  3109: "n" refers to a nucleotide at position 3107 of the Cambridge Reference Sequence (CRS, Anderson et al. 1981 Nature 290:457-465), later determined to be absent from the human mtDNA sequence according to the revised CRS (rCRS, Andrews et al. 1999 Nature Genetics 23:147); "n" therefore represents a single nucleotide deletion at a position corresponding to nucleotide 3107 of SEQ ID NO:1 as provided herein.
gatcacaggtctatcaccctattaaccactcacgggagctctccatgcatttggtattttcgtctggggggtatgcacgcgatagcattgcgagacgctggagccggagcaccctatgtcgcagtatctgtctttgattcctgccccatcctattatttatcgcacctacgttcaatattacaggcgaacatacttactaaagtgtgttaattaattaatgcttgtaggacataataataacaattgaatgtctgcacagccgctttccacacagacatcataacaaaaaatttccaccaaaccccccctcccccccgcttctggccacagcacttaaacacatctctgccaaaccccaaaaacaaagaaccctaacaccagcctaaccagatttcaaattttatcttttggcggtatgcacttttaacagtcaccccccaactaacacattattttcccctcccactcccatactactaatctcatcaatacaacccccggccatcctacccagcacacacacaccgctgctaaccccataccccgaaccaaccaaaccccaaagacaccccccacagtttatgtagcttacctcctcaaagcaatacactgaaaatgtttagacgggctcacatcaccccataaacaaataggtttggtcctagcctttctattagctcttagtaagattacacatgcaagcatccccgttccagtgagttcaccctctaaatcaccacgatcaaaagggacaagcatcaagcacgcagcaatgcagctcaaaacgcttagcctagccacacccccacgggaaacagcagtgattaacctttagcaataaacgaaagtttaactaagctatactaaccccagggttggtcaatttcgtgccagccaccgcggtcacacgattaacccaagtcaatagaagccggcgtaaagagtgttttagatcaccccctccccaataaagctaaaactcacctgagttgtaaaaaactccagttgacacaaaatagactacgaaagtggctttaacatatctgaacacacaatagctaagacccaaactgggattagataccccactatgcttagccctaaacctcaacagttaaatcaacaaaactgctcgccagaacactacgagccacagcttaaaactcaaaggacctggcggtgcttcatatccctctagaggagcctgttctgtaatcgataaaccccgatcaacctcaccacctcttgctcagcctatataccgccatcttcagcaaaccctgatgaaggctacaaagtaagcgcaagtacccacgtaaagacgttaggtcaaggtgtagcccatgaggtggcaagaaatgggctacattttctaccccagaaaactacgatagcccttatgaaacttaagggtcgaaggtggatttagcagtaaactgagagtagagtgcttagttgaacagggccctgaagcgcgtacacaccgcccgtcaccctcctcaagtatacttcaaaggacatttaactaaaacccctacgcatttatatagaggagacaagtcgtaacatggtaagtgtactggaaagtgcacttggacgaaccagagtgtagcttaacacaaagcacccaacttacacttaggagatttcaacttaacttgaccgctctgagctaaacctagccccaaacccactccaccttactaccagacaaccttagccaaaccatttacccaaataaagtataggcgatagaaattgaaacctggcgcaatagatatagtaccgcaagggaaagatgaaaaattataaccaagcataatatagcaaggactaacccctataccttctgcataatgaattaactagaaataactttgcaaggagagccaaagctaagacccccgaaaccagacgagctacctaagaacagctaaaagagcacacccgtctatgtagcaaaatagtgggaagatttataggtagaggcgacaaacctaccgagcctggtgatagctggttgtccaagatagaatcttagttcaactttaaatttgcccacagaaccctctaaatccccttgtaaatttaactgttagtccaaagaggaacagctctttggacactaggaaaaaaccttgtagagagagtaaaaaatttaacacccatagtaggcctaaaagcagccaccaattaagaaagcgttcaagctcaacacccactacctaaaaaatcccaaacatataactgaactcctcacacccaattggaccaatctatcaccctatagaagaactaatgttagtataagtaacatgaaaacattctcctccgcataagcctgcgtcagattaaaacactgaactgacaattaacagcccaatatctacaatcaaccaacaagtcattattaccctcactgtcaacccaacacaggcatgctcataaggaaaggttaaaaaaagtaaaaggaactcggcaaatcttaccccgcctgtttaccaaaaacatcacctctagcatcaccagtattagaggcaccgcctgcccagtgacacatgtttaacggccgcggtaccctaaccgtgcaaaggtagcataatcacttgttccttaaatagggacctgtatgaatggctccacgagggttcagctgtctcttacttttaaccagtgaaattgacctgcccgtgaagaggcgggcataacacagcaagacgagaagaccctatggagctttaatttattaatgcaaacagtacctaacaaacccacaggtcctaaactaccaaacctgcattaaaaatttcggttggggcgacctcggagcagaacccaacctccgagcagtacatgctaagacttcaccagtcaaagcgaactactatactcaattgatccaataacttgaccaacggaacaagttaccctagggataacagcgcaatcctattctagagtccatatcaacaatagggtttacgacctcgatgttggatcaggacatcccaatggtgcagccgctattaaaggttcgtttgttcaacgattaaagtcctacgtgatctgagttcagaccggagtaatccaggtcggtttctatctacnttcaaattcctccctgtacgaaaggacaagagaaataaggcctacttcacaaagcgccttcccccgtaaatgatatcatctcaacttagtattatacccacacccacccaagaacagggtttgttaagatggcagagcccggtaatcgcataaaacttaaaactttacagtcagaggttcaattcctcttcttaacaacatacccatggccaacctcctactcctcattgtacccattctaatcgcaatggcattcctaatgcttaccgaacgaaaaattctaggctatatacaactacgcaaaggccccaacgttgtaggcccctacgggctactacaacccttcgctgacgccataaaactcttcaccaaagagcccctaaaacccgccacatctaccatcaccctctacatcaccgccccgaccttagctctcaccatcgctcttctactatgaacccccctccccatacccaaccccctggtcaacctcaacctaggcctcctatttattctagccacctctagcctagccgtttactcaatcctctgatcagggtgagcatcaaactcaaactacgccctgatcggcgcactgcgagcagtagcccaaacaatctcatatgaagtcaccctagccatcattctactatcaacattactaataagtggctcctttaacctctccacccttatcacaacacaagaacacctctgattactcctgccatcatgacccttggccataatatgatttatctccacactagcagagaccaaccgaacccccttcgaccttgccgaaggggagtccgaactagtctcaggcttcaacatcgaatacgccgcaggccccttcgccctattcttcatagccgaatacacaaacattattataataaacaccctcaccactacaatcttcctaggaacaacatatgacgcactctcccctgaactctacacaacatattttgtcaccaagaccctacttctaacctccctgttcttatgaattcgaacagcatacccccgattccgctacgaccaactcatacacctcctatgaaaaaacttcctaccactcaccctagcattacttatatgatatgtctccatacccattacaatctccagcattccccctcaaacctaagaaatatgtctgataaaagagttactttgatagagtaaataataggagcttaaacccccttatttctaggactatgagaatcgaacccatccctgagaatccaaaattctccgtgccacctatcacaccccatcctaaagtaaggtcagctaaataagctatcgggcccataccccgaaaatgttggttatacccttcccgtactaattaatcccctggcccaacccgtcatctactctaccatctttgcaggcacactcatcacagcgctaagctcgcactgattttttacctgagtaggcctagaaataaacatgctagcttttattccagttctaaccaaaaaaataaaccctcgttccacagaagctgccatcaagtatttcctcacgcaagcaaccgcatccataatccttctaatagctatcctcttcaacaatatactctccggacaatgaaccataaccaatactaccaatcaatactcatcattaataatcataatggctatagcaataaaactaggaatagccccctttcacttctgagtcccagaggttacccaaggcacccctctgacatccggcctgcttcttctcacatgacaaaaactagcccccatctcaatcatataccaaatctctccctcactaaacgtaagccttctcctcactctctcaatcttatccatcatagcaggcagttgaggtggattaaaccaaacccagctacgcaaaatcttagcatactcctcaattacccacataggatgaataatagcagttctaccgtacaaccctaacataaccattcttaatttaactatttatattatcctaactactaccgcattcctactactcaacttaaactccagcaccacgaccctactactatctcgcacctgaaacaagctaacatgactaacacccttaattccatccaccctcctctccctaggaggcctgcccccgctaaccggctttttgcccaaatgggccattatcgaagaattcacaaaaaacaatagcctcatcatccccaccatcatagccaccatcaccctccttaacctctacttctacctacgcctaatctactccacctcaatcacactactccccatatctaacaacgtaaaaataaaatgacagtttgaacatacaaaacccaccccattcctccccacactcatcacccttaccacgctactcctacctatctccccttttatactaataatcttatagaaatttaggttaaatacagaccaagagccttcaaagccctcagtaagttgcaatacttaatttctgtaacagctaaggactgcaaaaccccactctgcatcaactgaacgcaaatcagccactttaattaagctaagcccttactagaccaatgggacttaaacccacaaacacttagttaacagctaagcaccctaatcaactggcttcaatctacttctcccgccgccgggaaaaaaggcgggagaagccccggcaggtttgaagctgcttcttcgaatttgcaattcaatatgaaaatcacctcggagctggtaaaaagaggcctaacccctgtctttagatttacagtccaatgcttcactcagccattttacctcacccccactgatgttcgccgaccgttgactattctctacaaaccacaaagacattggaacactatacctattattcggcgcatgagctggagtcctaggcacagctctaagcctccttattcgagccgagctgggccagccaggcaaccttctaggtaacgaccacatctacaacgttatcgtcacagcccatgcatttgtaataatcttcttcatagtaatacccatcataatcggaggctttggcaactgactagttcccctaataatcggtgcccccgatatggcgtttccccgcataaacaacataagcttctgactcttacctccctctctcctactcctgctcgcatctgctatagtggaggccggagcaggaacaggttgaacagtctaccctcccttagcagggaactactcccaccctggagcctccgtagacctaaccatcttctccttacacctagcaggtgtctcctctatcttaggggccatcaatttcatcacaacaattatcaatataaaaccccctgccataacccaataccaaacgcccctcttcgtctgatccgtcctaatcacagcagtcctacttctcctatctctcccagtcctagctgctggcatcactatactactaacagaccgcaacctcaacaccaccttcttcgaccccgccggaggaggagaccccattctataccaacacctattctgatttttcggtcaccctgaagtttatattcttatcctaccaggcttcggaataatctcccatattgtaacttactactccggaaaaaaagaaccatttggatacataggtatggtctgagctatgatatcaattggcttcctagggtttatcgtgtgagcacaccatatatttacagtaggaatagacgtagacacacgagcatatttcacctccgctaccataatcatcgctatccccaccggcgtcaaagtatttagctgactcgccacactccacggaagcaatatgaaatgatctgctgcagtgctctgagccctaggattcatctttcttttcaccgtaggtggcctgactggcattgtattagcaaactcatcactagacatcgtactacacgacacgtactacgttgtagcccacttccactatgtcctatcaataggagctgtatttgccatcataggaggcttcattcactgatttcccctattctcaggctacaccctagaccaaacctacgccaaaatccatttcactatcatattcatcggcgtaaatctaactttcttcccacaacactttctcggcctatccggaatgccccgacgttactcggactaccccgatgcatacaccacatgaaacatcctatcatctgtaggctcattcatttctctaacagcagtaatattaataattttcatgatttgagaagccttcgcttcgaagcgaaaagtcctaatagtagaagaaccctccataaacctggagtgactatatggatgccccccaccctaccacacattcgaagaacccgtatacataaaatctagacaaaaaaggaaggaatcgaaccccccaaagctggtttcaagccaaccccatggcctccatgactttttcaaaaaggtattagaaaaaccatttcataactttgtcaaagttaaattataggctaaatcctatatatcttaatggcacatgcagcgcaagtaggtctacaagacgctacttcccctatcatagaagagcttatcacctttcatgatcacgccctcataatcattttccttatctgcttcctagtcctgtatgcccttttcctaacactcacaacaaaactaactaatactaacatctcagacgctcaggaaatagaaaccgtctgaactatcctgcccgccatcatcctagtcctcatcgccctcccatccctacgcatcctttacataacagacgaggtcaacgatccctcccttaccatcaaatcaattggccaccaatggtactgaacctacgagtacaccgactacggcggactaatcttcaactcctacatacttcccccattattcctagaaccaggcgacctgcgactccttgacgttgacaatcgagtagtactcccgattgaagcccccattcgtataataattacatcacaagacgtcttgcactcatgagctgtccccacattaggcttaaaaacagatgcaattcccggacgtctaaaccaaaccactttcaccgctacacgaccgggggtatactacggtcaatgctctgaaatctgtggagcaaaccacagtttcatgcccatcgtcctagaattaattcccctaaaaatctttgaaatagggcccgtatttaccctatagcaccccctctaccccctctagagcccactgtaaagctaacttagcattaaccttttaagttaaagattaagagaaccaacacctctttacagtgaaatgccccaactaaatactaccgtatggcccaccataattacccccatactccttacactattcctcatcacccaactaaaaatattaaacacaaactaccacctacctccctcaccaaagcccataaaaataaaaaattataacaaaccctgagaaccaaaatgaacgaaaatctgttcgcttcattcattgcccccacaatcctaggcctacccgccgcagtactgatcattctatttccccctctattgatccccacctccaaatatctcatcaacaaccgactaatcaccacccaacaatgactaatcaaactaacctcaaaacaaatgataaccatacacaacactaaaggacgaacctgatctcttatactagtatccttaatcatttttattgccacaactaacctcctcggactcctgcctcactcatttacaccaaccacccaactatctataaacctagccatggccatccccttatgagcgggcgcagtgattataggctttcgctctaagattaaaaatgccctagcccacttcttaccacaaggcacacctacaccccttatccccatactagttattatcgaaaccatcagcctactcattcaaccaatagccctggccgtacgcctaaccgctaacattactgcaggccacctactcatgcacctaattggaagcgccaccctagcaatatcaaccattaaccttccctctacacttatcatcttcacaattctaattctactgactatcctagaaatcgctgtcgccttaatccaagcctacgttttcacacttctagtaagcctctacctgcacgacaacacataatgacccaccaatcacatgcctatcatatagtaaaacccagcccatgacccctaacaggggccctctcagccctcctaatgacctccggcctagccatgtgatttcacttccactccataacgctcctcatactaggcctactaaccaacacactaaccatataccaatgatggcgcgatgtaacacgagaaagcacataccaaggccaccacacaccacctgtccaaaaaggccttcgatacgggataatcctatttattacctcagaagtttttttcttcgcaggatttttctgagccttttaccactccagcctagcccctaccccccaattaggagggcactgacccccaacaggcatcaccccgctaaatcccctagaagtcccactcctaaacacatccgtattactcgcatcaggagtatcaatcacctgagctcaccatagtctaatagaaaacaaccgaaaccaaataattcaagcactgcttattacaattttactgggtctctattttaccctcctacaagcctcagagtacttcgagtctcccttcaccatttccgacggcatctacggctcaacattttttgtagccacaggcttccacggacttcacgtcattattggctcaactttcctcactatctgcttcatccgccaactaatatttcactttacatccaaacatcactttggcttcgaagccgccgcctgatactggcattttgtagatgtggtttgactatttctgtatgtctccatctattgatgagggtcttactcttttagtataaatagtaccgttaacttccaattaactagttttgacaacattcaaaaaagagtaataaacttcgccttaattttaataatcaacaccctcctagccttactactaataattattacattttgactaccacaactcaacggctacatagaaaaatccaccccttacgagtgcggcttcgaccctatatcccccgcccgcgtccctttctccataaaattcttcttagtagctattaccttcttattatttgatctagaaattgccctccttttacccctaccatgagccctacaaacaactaacctgccactaatagttatgtcatccctcttattaatcatcatcctagccctaagtctggcctatgagtgactacaaaaaggattagactgaaccgaattggtatatagtttaaacaaaacgaatgatttcgactcattaaattatgataatcatatttaccaaatgcccctcatttacataaatattatactagcatttaccatctcacttctaggaatactagtatatcgctcacacctcatatcctccctactatgcctagaaggaataatactatcgctgttcattatagctactctcataaccctcaacacccactccctcttagccaatattgtgcctattgccatactagtctttgccgcctgcgaagcagcggtgggcctagccctactagtctcaatctccaacacatatggcctagactacgtacataacctaaacctactccaatgctaaaactaatcgtcccaacaattatattactaccactgacatgactttccaaaaaacacataatttgaatcaacacaaccacccacagcctaattattagcatcatccctctactattttttaaccaaatcaacaacaacctatttagctgttccccaaccttttcctccgaccccctaacaacccccctcctaatactaactacctgactcctacccctcacaatcatggcaagccaacgccacttatccagtgaaccactatcacgaaaaaaactctacctctctatactaatctccctacaaatctccttaattataacattcacagccacagaactaatcatattttatatcttcttcgaaaccacacttatccccaccttggctatcatcacccgatgaggcaaccagccagaacgcctgaacgcaggcacatacttcctattctacaccctagtaggctcccttcccctactcatcgcactaatttacactcacaacaccctaggctcactaaacattctactactcactctcactgcccaagaactatcaaactcctgagccaacaacttaatatgactagcttacacaatagcttttatagtaaagatacctctttacggactccacttatgactccctaaagcccatgtcgaagcccccatcgctgggtcaatagtacttgccgcagtactcttaaaactaggcggctatggtataatacgcctcacactcattctcaaccccctgacaaaacacatagcctaccccttccttgtactatccctatgaggcataattataacaagctccatctgcctacgacaaacagacctaaaatcgctcattgcatactcttcaatcagccacatagccctcgtagtaacagccattctcatccaaaccccctgaagcttcaccggcgcagtcattctcataatcgcccacgggcttacatcctcattactattctgcctagcaaactcaaactacgaacgcactcacagtcgcatcataatcctctctcaaggacttcaaactctactcccactaatagctttttgatgacttctagcaagcctcgctaacctcgccttaccccccactattaacctactgggagaactctctgtgctagtaaccacgttctcctgatcaaatatcactctcctacttacaggactcaacatactagtcacagccctatactccctctacatatttaccacaacacaatggggctcactcacccaccacattaacaacataaaaccctcattcacacgagaaaacaccctcatgttcatacacctatcccccattctcctcctatccctcaaccccgacatcattaccgggttttcctcttgtaaatatagtttaaccaaaacatcagattgtgaatctgacaacagaggcttacgaccccttatttaccgagaaagctcacaagaactgctaactcatgcccccatgtctaacaacatggctttctcaacttttaaaggataacagctatccattggtcttaggccccaaaaattttggtgcaactccaaataaaagtaataaccatgcacactactataaccaccctaaccctgacttccctaattccccccatccttaccaccctcgttaaccctaacaaaaaaaactcatacccccattatgtaaaatccattgtcgcatccacctttattatcagtctcttccccacaacaatattcatgtgcctagaccaagaagttattatctcgaactgacactgagccacaacccaaacaacccagctctccctaagcttcaaactagactacttctccataatattcatccctgtagcattgttcgttacatggtccatcatagaattctcactgtgatatataaactcagacccaaacattaatcagttcttcaaatatctactcatcttcctaattaccatactaatcttagttaccgctaacaacctattccaactgttcatcggctgagagggcgtaggaattatatccttcttgctcatcagttgatgatacgcccgagcagatgccaacacagcagccattcaagcaatcctatacaaccgtatcggcgatatcggtttcatcctcgccttagcatgatttatcctacactccaactcatgagacccacaacaaatagcccttctaaacgctaatccaagcctcaccccactactaggcctcctcctagcagcagcaggcaaatcagcccaattaggtctccacccctgactcccctcagccatagaaggccccaccccagtctcagccctactccactcaagcactatagttgtagcaggaatcttcttactcatccgcttccaccccctagcagaaaatagcccactaatccaaactctaacactatgcttaggcgctatcaccactctgttcgcagcagtctgcgcccttacacaaaatgacatcaaaaaaatcgtagccttctccacttcaagtcaactaggactcataatagttacaatcggcatcaaccaaccacacctagcattcctgcacatctgtacccacgccttcttcaaagccatactatttatgtgctccgggtccatcatccacaaccttaacaatgaacaagatattcgaaaaataggaggactactcaaaaccatacctctcacttcaacctccctcaccattggcagcctagcattagcaggaatacctttcctcacaggtttctactccaaagaccacatcatcgaaaccgcaaacatatcatacacaaacgcctgagccctatctattactctcatcgctacctccctgacaagcgcctatagcactcgaataattcttctcaccctaacaggtcaacctcgcttccccacccttactaacattaacgaaaataaccccaccctactaaaccccattaaacgcctggcagccggaagcctattcgcaggatttctcattactaacaacatttcccccgcatcccccttccaaacaacaatccccctctacctaaaactcacagccctcgctgtcactttcctaggacttctaacagccctagacctcaactacctaaccaacaaacttaaaataaaatccccactatgcacattttatttctccaacatactcggattctaccctagcatcacacaccgcacaatcccctatctaggccttcttacgagccaaaacctgcccctactcctcctagacctaacctgactagaaaagctattacctaaaacaatttcacagcaccaaatctccacctccatcatcacctcaacccaaaaaggcataattaaactttacttcctctctttcttcttcccactcatcctaaccctactcctaatcacataacctattcccccgagcaatctcaattacaatatatacaccaacaaacaatgttcaaccagtaactactactaatcaacgcccataatcatacaaagcccccgcaccaataggatcctcccgaatcaaccctgacccctctccttcataaattattcagcttcctacactattaaagtttaccacaaccaccaccccatcatactctttcacccacagcaccaatcctacctccatcgctaaccccactaaaacactcaccaagacctcaacccctgacccccatgcctcaggatactcctcaatagccatcgctgtagtatatccaaagacaaccatcattccccctaaataaattaaaaaaactattaaacccatataacctcccccaaaattcagaataataacacacccgaccacaccgctaacaatcaatactaaacccccataaataggagaaggcttagaagaaaaccccacaaaccccattactaaacccacactcaacagaaacaaagcatacatcattattctcgcacggactacaaccacgaccaatgatatgaaaaaccatcgttgtatttcaactacaagaacaccaatgaccccaatacgcaaaactaaccccctaataaaattaattaaccactcattcatcgacctccccaccccatccaacatctccgcatgatgaaacttcggctcactccttggcgcctgcctgatcctccaaatcaccacaggactattcctagccatgcactactcaccagacgcctcaaccgccttttcatcaatcgcccacatcactcgagacgtaaattatggctgaatcatccgctaccttcacgccaatggcgcctcaatattctttatctgcctcttcctacacatcgggcgaggcctatattacggatcatttctctactcagaaacctgaaacatcggcattatcctcctgcttgcaactatagcaacagccttcataggctatgtcctcccgtgaggccaaatatcattctgaggggccacagtaattacaaacttactatccgccatcccatacattgggacagacctagttcaatgaatctgaggaggctactcagtagacagtcccaccctcacacgattctttacctttcacttcatcttgcccttcattattgcagccctagcagcactccacctcctattcttgcacgaaacgggatcaaacaaccccctaggaatcacctcccattccgataaaatcaccttccacccttactacacaatcaaagacgccctcggcttacttctcttccttctctccttaatgacattaacactattctcaccagacctcctaggcgacccagacaattataccctagccaaccccttaaacacccctccccacatcaagcccgaatgatatttcctattcgcctacacaattctccgatccgtccctaacaaactaggaggcgtccttgccctattactatccatcctcatcctagcaataatccccatcctccatatatccaaacaacaaagcataatatttcgcccactaagccaatcactttattgactcctagccgcagacctcctcattctaacctgaatcggaggacaaccagtaagctacccttttaccatcattggacaagtagcatccgtactatacttcacaacaatcctaatcctaataccaactatctccctaattgaaaacaaaatactcaaatgggcctgtccttgtagtataaactaatacaccagtcttgtaaaccggagatgaaaacctttttccaaggacaaatcagagaaaaagtctttaactccaccattagcacccaaagctaagattctaatttaaactattctctgttctttcatggggaagcagatttgggtaccacccaagtattgactcacccatcaacaaccgctatgtatttcgtacattactgccagccaccatgaatattgtacggtaccataaatacttgaccacctgtagtacataaaaacccaatccacatcaaaaccccctccccatgcttacaagcaagtacagcaatcaaccctcaactatcacacatcaactgcaactccaaagccacccctcacccactaggataccaacaaacctatccacccttaacagtacatagtacataaagccatttaccgtacatagcacattacagtcaaatcccttctcgtccccatggatgacccccctcagataggggtcccttgaccaccatcctccgtgaaatcaatatcccgcacaagagtgctactctcctcgctccgggcccataacacttgggggtagctaaagtgaactgtatccgacatctggttcctacttcagggccataaagcctaaatagcccacacgttccccttaaataagacatcacgatg

SEQ ID NO: 64 - DNA, 16570 bp, Homo sapiens mitochondrial
  3108: "n" refers to a nucleotide at position 3107 of the Cambridge Reference Sequence (CRS, Anderson et al. 1981 Nature 290:457-465), later determined to be absent from the human mtDNA sequence according to the revised CRS (rCRS, Andrews et al. 1999 Nature Genetics 23:147); "n" therefore represents a single nucleotide deletion at a position corresponding to nucleotide 3107 of SEQ ID NO:1 as provided herein.
gatcacaggtctatcaccctattaaccactcacgggagctctccatgcatttggtattttcgtctggggggtgtgcacgcgatagcattgcgagacgctggagccggagcaccctatgtcgcagtatctgtctttgattcctgcctcatcctattatttatcgcacctacgttcaatattacaggcgaacatacctactaaagtgtgttaattaattaatgcttgtaggacataataataacaattgaatgtctgcacagccgctttccacacagacatcataacaaaaaatttccaccaaaccccccctcccccgccttctggccacagcacttaaacacatctctgccaaaccccaaaaacaaagaaccctaacaccagcctaaccagatttcaaattttatcttttggcggtatgcacttttaacagtcaccccccaactaacacattattttcccctcccactcccatactactaatctcatcaatacaaccctcgcccatcctacccagcacacacacaccgctgctaaccccataccccgaaccaaccaaaccccaaagacaccccccacagtttatgtagcttacctcctcaaagcaatacactgaaaatgtttagacgggctcacatcaccccataaacaaataggtttggtcctagcctttctattagctcttagtaagattacacatgcaagcatccccgttccagtgagttcaccctctaaatcaccacgatcaaaagggacaagcatcaagcacgcagcaatgcagctcaaaacgcttagcctagccacacccccacgggaaacagcagtgattaacctttagcaataaacgaaagtttaactaagctatactaaccccagggttggtcaatttcgtgccagccaccgcggtcacacgattaacccaagtcaatagaagccggcgtaaagagtgttttagatcaccccctccccaataaagctaaaactcacctgagttgtaaaaaactccagttgacacaaaatagactacgaaagtggctttaacatatctgaacacacaatagctaagacccaaactgggattagataccccactatgcttagccctaaacctcaacagttaaatcaacaaaactgctcgccagaacactacgagccacagcttaaaactcaaaggacctggcggtgcttcatacccctctagaggagcctgttctgtaatcgataaaccccgatcaacctcaccacctcttgctcagcctatataccgccatcttcagcaaaccctgatgaaggctacaaagtaagcgcaagtacccacgtaaagacgttaggtcaaggtgtagcccatgaggtggcaagaaatgggctacattttctaccccagaaaactacgatagcccttatgaaacttaagggtcgaaggtggatttagcagtaaactgagagtagagtgcttagttgaacagggccctgaagcgcgtacacaccgcccgtcaccctcctcaagtatacttcaaaggacatttaactaaaacccctacgcatttatatagaggagacaagtcgtaacatggtaagtgtactggaaagtgcacttggacgaaccagagtgtagcttaacacaaagcacccaacttacacttaggagatttcaacttaacttgaccgctctgagctaaacctagccccaaacccactccaccttactaccagacaaccttagccaaaccatttacccaaataaagtataggcgatagaaattgaaacctggcgcaatagatatagtaccgcaagggaaagatgaaaaattatagccaagcataatatagcaaggactaacccctataccttctgcataatgaattaactagaaataactttgcaaggagagccaaagctaagacccccgaaaccagacgagctacctaagaacagctaaaagagcacacccgtctatgtagcaaaatagtgggaagatttataggtagaggcgacaaacctaccgagcctggtgatagctggttgtccaagatagaatcttagttcaactttaaatttgcccacagaaccctctaaatccccttgtaaatttaactgttagtccaaagaggaacagctctttggacactaggaaaaaaccttgtagagagagtaaaaaatttaacacccatagtaggcctaaaagcagccaccaattaagaaagcgttcaagctcaacacccactacctaaaaaatcccaaacatataactgaactcctcacacccaattggaccaatctatcaccctatagaagaactaatgttagtataagtaacatgaaaacattctcctccgcataagcctgcgtcagattaaaacactgaactgacaattaacagcccaatatctacaatcaaccaacaagtcattattaccctcactgtcaacccaacacaggcatgctcataaggaaaggttaaaaaaagtaaaaggaactcggcaaatcttaccccgcctgtttaccaaaaacatcacctctagcatcaccagtattagaggcaccgcctgcccagtgacacatgtttaacggccgcggtaccctaaccgtgcaaaggtagcataatcacttgttccttaaatagggacctgtatgaatggctccacgagggttcagctgtctcttacttttaaccagtgaaattgacctgcccgtgaagaggcgggcatgacacagcaagacgagaagaccctatggagctttaatttattaatgcaaacagtacctaacaaacccacaggtcctaaactaccaaacctgcattaaaaatttcggttggggcgacctcggagcagaacccaacctccgagcagtacatgctaagacttcaccagtcaaagcgaactactatactcaattgatccaataacttgaccaacggaacaagttaccctagggataacagcgcaatcctattctagagtccatatcaacaatagggtttacgacctcgatgttggatcaggacatcccgatggtgcagccgctattaaaggttcgtttgttcaacgattaaagtcctacgtgatctgagttcagaccggagtaatccaggtcggtttctatctacnttcaaattcctccctgtacgaaaggacaagagaaataaggcctacttcacaaagcgccttcccccgtaaatgatatcatctcaacttagtattatacccacacccacccaagaacagggtttgttaagatggcagagcccggtaatcgcataaaacttaaaactttacagtcagaggttcaattcctcttcttaacaacatacccatggccaacctcctactcctcattgtacccattctaatcgcaatggcattcctaatgcttaccgaacgaaaaattctaggctatatacaactacgcaaaggccccaacgttgtaggcccctacgggctactacaacccttcgctgacgccataaaactcttcaccaaggagcccctaaaacccgccacatctaccatcaccctctacatcaccgccccgaccttagctctcaccatcgctcttctactatgaacccccctccccatacccaaccccctggtcaacctcaacctaggcctcctatttattctagccacctctagcctagccgtttactcaatcctctgatcagggtgagcatcaaactcaaactacgccctgatcggcgcactgcgagcagtagcccaaacaatctcatatgaagtcaccctagccatcattctactatcaacattactaataagtggctcctttaacctctccacccttatcacaacacaagaacacctctgattactcctgccatcatgacccttggccataatatgatttatctccacactagcagagaccaaccgaacccccttcgaccttgccgaaggggagtccgaactagtctcaggcttcaacatcgaatacgccgcaggccccttcgccctattcttcatagccgaatacacaaacattattataataaacaccctcaccactacaatcttcctaggaacaacatatgacgcactctcccctgaactctacacaacatattttgtcaccaagaccctacttctaacctccctgttcttatgaattcgaacagcatacccccgattccgctacgaccaactcatacacctcctatgaaaaaacttcctaccactcaccctagcattacttatatgatatgtctccatacccattacaatctccagcattccccctcaaacctaagaaatatgtctgataaaagagttactttgatagagtaaataataggagcttaaacccccttatttctaggactatgagaatcgaacccatccctgagaatccaaaattctccgtgccacctatcacaccccatcctaaagtaaggtcagctaaataagctatcgggcccataccccgaaaatgttggttatacccttcccgtactaattaatcccctggcccaacccgtcatctactctaccatctttgcaggcacactcatcacagcgctaagctcgcactgattttttacctgagtaggcctagaaataaacatgctagcttttattccagttctaaccaaaaaaataaaccctcgttccacagaagctgccatcaagtatttcctcacgcaagcaaccgcatccataatccttctaatagctatcctcttcaacaatatactctccggacaatgaaccataaccaatactaccaatcaatactcatcattaataatcataatggctatagcaataaaactaggaatagccccctttcacttctgagtcccagaggttacccaaggcacccctctgacatccggcctgcttcttctcacatgacaaaaactagcccccatctcaatcatataccaaatctctccctcactaaacgtaagccttctcctcactctctcaatcttatccatcatagcaggcagttgaggtggattaaaccaaacccagctacgcaaaatcttagcatactcctcaattacccacataggatgaataatagcagttctaccgtacaaccctaacataaccattcttaatttaactatttatattatcctaactactaccgcattcctactactcaacttaaactccagcaccacgaccctactactatctcgcacctgaaacaagctaacatgactaacacccttaattccatccaccctcctctccctaggaggcctgcccccgctaaccggctttttgcccaaatgggccattatcgaagaattcacaaaaaacaatagcctcatcatccccaccatcatagccaccatcaccctccttaacctctacttctacctacgcctaatctactccacctcaatcacactactccccatatctaacaacgtaaaaataaaatgacagtttgaacatacaaaacccaccccattcctccccacactcatcgcccttaccacgctactcctacctatctccccttttatactaataatcttatagaaatttaggttaaatacagaccaagagccttcaaagccctcagtaagttgcaatacttaatttctgtaacagctaaggactgcaaaaccccactctgcatcaactgaacgcaaatcagccactttaattaagctaagcccttactagaccaatgggacttaaacccacaaacacttagttaacagctaagcaccctaatcaactggcttcaatctacttctcccgccgccgggaaaaaaggcgggagaagccccggcaggtttgaagctgcttcttcgaatttgcaattcaatatgaaaatcacctcggagctggtaaaaagaggcctaacccctgtctttagatttacagtccaatgcttcactcagccattttacctcacccccactgatgttcgccgaccgttgactattctctacaaaccacaaagacattggaacactatacctattattcggcgcatgagctggagtcctaggcacagctctaagcctccttattcgagccgagctgggccagccaggcaaccttctaggtaacgaccacatctacaacgttatcgtcacagcccatgcatttgtaataatcttcttcatagtaatacccatcataatcggaggctttggcaactgactagttcccctaataatcggtgcccccgatatggcgtttccccgcataaacaacataagcttctgactcttacctccctctctcctactcctgctcgcatctgctatagtggaggccggagcaggaacaggttgaacagtctaccctcccttagcagggaactactcccaccctggagcctccgtagacctaaccatcttctccttacacctagcaggtgtctcctctatcttaggggccatcaatttcatcacaacaattatcaatataaaaccccctgccataacccaataccaaacgcccctcttcgtctgatccgtcctaatcacagcagtcctacttctcctatctctcccagtcctagctgctggcatcactatactactaacagaccgcaacctcaacaccaccttcttcgaccccgccggaggaggagaccccattctataccaacacctattctgatttttcggtcaccctgaagtttatattcttatcctaccaggcttcggaataatctcccatattgtaacttactactccggaaaaaaagaaccatttggatacataggtatggtctgagctatgatatcaattggcttcctagggtttatcgtgtgagcacaccatatatttacagtaggaatagacgtagacacacgagcatatttcacctccgctaccataatcatcgctatccccaccggcgtcaaagtatttagctgactcgccacactccacggaagcaatatgaaatgatctgctgcagtgctctgagccctaggattcatctttcttttcaccgtaggtggcctgactggcattgtattagcaaactcatcactagacatcgtactacacgacacgtactacgttgtagctcacttccactatgtcctatcaataggagctgtatttgccatcataggaggcttcattcactgatttcccctattctcaggctacaccctagaccaaacctacgccaaaatccatttcactatcatattcatcggcgtaaatctaactttcttcccacaacactttctcggcctatccggaatgccccgacgttactcggactaccccgatgcatacaccacatgaaacatcctatcatctgtaggctcattcatttctctaacagcagtaatattaataattttcatgatttgagaagccttcgcttcgaagcgaaaagtcctaatagtagaagaaccctccataaacctggagtgactatatggatgccccccaccctaccacacattcgaagaacccgtatacataaaatctagacaaaaaaggaaggaatcgaaccccccaaagctggtttcaagccaaccccatggcctccatgactttttcaaaaaggtattagaaaaaccatttcataactttgtcaaagttaaattataggctaaatcctatatatcttaatggcacatgcagcgcaagtaggtctacaagacgctacttcccctatcatagaagagcttatcacctttcatgatcacgccctcataatcattttccttatctgcttcctagtcctgtatgcccttttcctaacactcacaacaaaactaactaatactaacatctcagacgctcaggaaatagaaaccgtctgaactatcctgcccgccatcatcctagtcctcatcgccctcccatccctacgcatcctttacataacagacgaggtcaacgatccctcccttaccatcaaatcaattggccaccaatggtactgaacctacgagtacaccgactacggcggactaatcttcaactcctacatacttcccccattattcctagaaccaggcgacctgcgactccttgacgttgacaatcgagtagtactcccgattgaagcccccattcgtataataattacatcacaagacgtcttgcactcatgagctgtccccacattaggcttaaaaacagatgcaattcccggacgtctaaaccaaaccactttcaccgctacacgaccgggggtatactacggtcaatgctctgaaatctgtggagcaaaccacagtttcatgcccatcgtcctagaattaattcccctaaaaatctttgaaatagggcccgtatttaccctatagcaccccctctaccccctctagagcccactgtaaagctaacttagcattaaccttttaagttaaagattaagagaaccaacacctctttacagtgaaatgccccaactaaatactaccgtatggcccaccataattacccccatactccttacactattcctcatcacccaactaaaaatattaaacacaaactaccacctacctccctcaccaaagcccataaaaataaaaaattataacaaaccctgagaaccaaaatgaacgaaaatctgttcgcttcattcattgcccccacaatcctaggcctacccgccgcagtactgatcattctatttccccctctattgatccccacctccaaatatctcatcaacaaccgactaatcaccacccaacaatgactaatcaaactaacctcaaaacaaatgataaccatacacaacactaaaggacgaacctgatctcttatactagtatccttaatcatttttattgccacaactaacctcctcggactcctgcctcactcatttacaccaaccacccaactatctataaacctagccatggccatccccttatgagcgggcgcagtgattataggctttcgctctaagattaaaaatgccctagcccacttcttaccacaaggcacacctacaccccttatccccatactagttattatcgaaaccatcagcctactcattcaaccaatagccctggccgtacgcctaaccgctaacattactgcaggccacctactcatgcacctaattggaagcaccaccctagcaatatcaaccattaaccttccctctacacttatcatcttcacaattctaattctactgactatcctagaaatcgctgtcgccttaatccaagcctacgttttcacacttctagtaagcctctacctgcacgacaacacataatgacccaccaatcacatgcctatcatatagtaaaacccagcccatgacccctaacaggggccctctcagccctcctaatgacctccggcctagccatgtgatttcacttccactccataacgctcctcatactaggcctactaaccaacacactaaccatataccaatgatggcgcgatgtaacacgagaaagcacataccaaggccaccacacaccacctgtccaaaaaggccttcgatacgggataatcctatttattacctcagaagtttttttcttcgcaggatttttctgagccttttaccactccagcctagcccctaccccccaattaggagggcactggcccccaacaggcatcaccccgctaaatcccctagaagtcccactcctaaacacatccgtattactcgcatcaggagtatcaatcacctgagctcaccatagtctaatagaaaacaaccgaaaccaaataattcaagcactgctcattacaattttactgggtctctattttaccctcctacaagcctcagagtacttcgagtctcccttcaccatttccgacggcatctacggctcaacattttttgtagccacaggcttccacggacttcacgtcattattggctcaactttcctcactatctgcttcatccgccaactaatatttcactttacatccaaacatcactttggcttcgaagccgccgcctgatactggcattttgtagatgtggtttgactatttctgtatgtctccatctattgatgagggtcttactcttttagtataaatagtaccgttaacttccaattaactagttttgacaacattcaaaaaagagtaataaacttcgccttaattttaataatcaacaccctcctagccttactactaataattattacattttgactaccacaactcaacggctacatagaaaaatccaccccttacgagtgcggcttcgaccctatatcccccgcccgcgtccctttctccataaaattcttcttagtagctattaccttcttattatttgatctagaaattgccctccttttacccctaccatgagccctacaaacaactaacctgccactaatagttatgtcatccctcttattaatcatcatcctagccctaagtctggcctatgagtgactacaaaaaggattagactgagccgaattggtatatagtttaaacaaaacgaatgatttcgactcattaaattatgataatcatatttaccaaatgcccctcatttacataaatattatactagcatttaccatctcacttctaggaatactagtatatcgctcacacctcatgtcctccctactatgcctagaaggaataatactatcgctgttcattatagctactctcataaccctcaacacccactccctcttagccaatattgtgcctattgccatactagtctttgccgcctgcgaagcagcggtgggcctagccctactagtctcaatctccaacacatatggcctagactacgtacataacctaaacctactccaatgctaaaactaatcgtcccaacaattatattactaccactgacatgactttccaaaaaacacataatttgaatcaacacaaccacccacagcctaattattagcatcatccctctactattttttaaccaaatcaacaacaacctatttagctgttccccaaccttttcctccgaccccctaacaacccccctcctaatactaactacctgactcctacccctcacaatcatggcaagccaacgccacttatccagtgaaccactatcacgaaaaaaactctacctctctatactaatctccctacaaatctccttaattataacattcacagccacagaactaatcatattttatatcttcttcgaaaccacacttatccccaccttggctatcatcacccgatgaggcaaccagccagaacgcctgaacgcaggcacatacttcctattctacaccctagtaggctcccttcccctactcatcgcactaatttacactcacaacaccctaggctcactaaacattctactactcaccctcactgcccaagaactatcaaactcctgagccaacaacttaatatgactagcttacacaatagcttttatagtaaagatacctctttacggactccacttatgactccctaaagcccatgtcgaagcccccatcgctgggtcaatagtacttgccgcagtactcttgaaactaggcggctatggtataatacgcctcacactcattctcaaccccctgacaaaacacatagcctaccccttccttgtactatccctatgaggcataattataacaagctccatctgcctacgacaaacagacctaaaatcgctcattgcatactcttcaatcagccacatagccctcgtagtaacagccattctcatccaaaccccctgaagcttcaccggcgcagtcattctcataatcgcccacggacttacatcctcattactattctgcctagcaaactcaaactacgaacgcactcacagtcgcatcataatcctctctcaaggacttcaaactctactcccactaatagctttttgatgacttctagcaagcctcgctaacctcgccttaccccccactattaacctactgggagaactctctgtgctagtaaccacgttctcctgatcaaatatcactctcctacttacaggactcaacatactagtcacagccctatactccctctacatatttaccacaacacaatggggctcactcacccaccacattaacaacataaaaccctcattcacacgagaaaacaccctcatgttcatacacctatcccccattctcctcctatccctcaaccccgacatcattaccgggttttcctcttgtaaatatagtttaaccaaaacatcagattgtgaatctgacaacagaggcttacgaccccttatttaccgagaaagctcacaagaactgctaactcatgcccccatgtctaacaacatggctttctcaacttttaaaggataacagctatccattggtcttaggccccaagaattttggtgcaactccaaataaaagtaataaccatgcacactactataaccaccctaaccctaacttccctaattccccccatccttaccaccctcgttaaccctaacaaaaaaaactcatacccccattatgtaaaatccattgtcgcatccacctttattatcagtctcttccccacaacaatattcatgtgcctagaccaagaagttattatctcgaactgacactgagccacaacccaaacaacccagctctccctaagcttcaaactagactacttctccataatattcatccctgtagcattgttcgttacatggtccatcatagaattctcactgtgatatataaactcagacccaaacattaatcagttcttcaaatatctactcatcttcctaattaccatactaatcttagttaccgctaacaacctattccaactgttcatcggctgagagggcgtaggaattatatccttcttgctcatcagttgatgatacgcccgagcagatgccaacacagcagccattcaagcaatcctatacaaccgtatcggcgatatcggtttcatcctcgccttagcatgatttatcctacactccaactcatgagacccacaacaaatagcccttctaaacgctaatccaagcctcaccccactactaggcctcctcctagcagcagcaggcaaatcagcccaattaggtctccacccctgactcccctcagccatagaaggccccaccccagtctcagccctactccactcaagcactatagttgtagcaggaatcttcttactcatccgcttccaccccctagcagaaaatagcccactaatccaaactctaacactatgcttaggcgctatcaccactctgttcgcagcagtctgcgcccttacacaaaatgacatcaaaaaaatcgtagccttctccacttcaagtcaactaggactcataatagttacaatcggcatcaaccaaccacacctagcattcctgcacatctgtacccacgccttcttcaaagccatactatttatgtgctccgggtccatcatccacaaccttaacaatgaacaagatattcgaaaaataggaggactactcaaaaccatacctctcacttcaacctccctcaccattggcagcctagcattagcaggaatacctttcctcacaggtttctactccaaagaccacatcatcgaaaccgcaaacatatcatacacaaacgcctgagccctatctattactctcatcgctacctccctgacaagcgcctatagcactcgaataattcttctcaccctaacaggtcaacctcgcttccccacccttactaacattaacgaaaataaccccaccctactaaaccccattaaacgcctggcagccggaagcctattcgcaggatttctcattactaacaacatttcccccgcatcccccttccaaacaacaatccccctctacctaaaactcacagccctcgctgtcactttcctaggacttctaacagccctagacctcaactacctaaccaacaaacttaaaataaaatccccactatgcacattttatttctccaacatactcggattctaccctagcatcacacaccgcacaatcccctatctaggccttcttacgagccaaaacctgcccctactcctcctagacctaacctgactagaaaagctattacctaaaacaatttcacagcaccaaatctccacctccatcatcacctcaacccaaaaaggcataattaaactttacttcctctctttcttcttcccactcatcctaaccctactcctaatcacataacctattcccccgagcaatttcaattacaatatatacaccaacaaacaatgttcaaccagtaactactactaatcaacgcccataatcatacaaagcccccgcaccaataggatcctcccgaatcaaccctgacccctctccttcataaattattcagcttcctacactattaaagtttaccacaaccaccaccccatcatactctttcacccacagcaccaatcctacctccatcgctaaccccactaaaacactcaccaagacctcaacccctgacccccatgcctcaggatactcctcaatagccatcgctgtagtatatccaaagacaaccatcattccccctaaataaattaaaaaaactattaaacccatataacctcccccaaaattcagaataataacacacccgaccacaccgctaacaatcaatactaaacccccataaataggagaaggcttagaagaaaaccccacaaaccccattactaaacccacactcaacagaaacaaagcatacatcattattctcgcacggactacaaccacgaccaatgatatgaaaaaccatcgttgtatttcaactacaagaacaccaatgaccccaatacgcaaaattaaccccctaataaaattaattaaccactcactcatcgacctccccaccccatccaacatctccgcatgatgaaacttcggctcactccttggcgcctgcctgatcctccaaatcaccacaggactattcctagccatgcactactcaccagacgcctcaaccgccttttcatcaatcgcccacatcactcgagacgtaaattatggctgaatcatccgctaccttcacgccaatggcgcctcaatattctttatctgcctcttcctacacatcgggcgaggcctatattacggatcatttctctactcagaaacctgaaacatcggcattatcctcctgcttgcaactatagcaacagccttcataggctatgtcctcccgtgaggccaaatatcattctgaggggccacagtaattacaaacttactatccgccatcccatacattgggacagacctagttcaatgaatctgaggaggctactcagtagacagtcccaccctcacacgattctttacctttcacttcatcttgcccttcattattgcagccctagcagcactccacctcctattcttgcacgaaacgggatcaaacaaccccctaggaatcacctcccattccgataaaatcaccttccacccttactacacaatcaaagacgccctcggcttacttctcttccttctctccttaatgacattaacactattctcaccagacctcctaggcgacccagacaattataccctagccaaccccttaaacacccctccccacatcaagcccgaatgatatttcctattcgcctacacaattctccgatccgtccctaacaaactaggaggcgtccttgccctattactatccatcctcatcctagcaataatccccatcctccatatatccaaacaacaaagcataatatttcgcccactaagccaatcactttattgactcctagccgcagacctcctcattctaacctgaatcggaggacaaccagtaagctacccttttaccatcattggacaagtagcatccgtactatacttcacaacaatcctaatcctaataccaactatctccctaattgaaaacaaaatactcaaatgggcctgtccttgtagtataaactaatacaccagtcttgtaaaccggagatgaaaacctttttccaaggacaaatcagagaaaaagtctttaactccaccattagcacccaaagctaagattctaatttaaactattctctgttctttcatggggaagcagatttgggtaccacccaagtattgactcacccatcaacaaccgctatgtatctcgtacattactgccagccaccatgaatattgtacggtaccataaatacttgaccacctgtagtacataaaaacccaatccacatcaaaaccccctccccatgcttacaagcaagtacagcaatcaacccccaactatcacacatcaactgcaactccaaagccacccctcacccactaggataccaacaaacctacccacccttaacagtacatagcacataaagccatttaccgtacatagcacattacagtcaaatcccttctcgtccccatggatgacccccctcagataggggtcccttgaccaccatcctccgtgaaatcaatatcccgcacaagagtgctactctcctcgctccgggcccataacacttgggggtagctaaagtgaactgtatccgacatctggttcctacttcagggccatagagcctaaatagcccacacgttccccttaaataagacatcacgatg

SEQ ID NO: 65 - DNA, 16570 bp, Homo sapiens mitochondrial
  3108: "n" refers to a nucleotide at position 3107 of the Cambridge Reference Sequence (CRS, Anderson et al. 1981 Nature 290:457-465), later determined to be absent from the human mtDNA sequence according to the revised CRS (rCRS, Andrews et al. 1999 Nature Genetics 23:147); "n" therefore represents a single nucleotide deletion at a position corresponding to nucleotide 3107 of SEQ ID NO:1 as provided herein.
gatcacaggtctatcaccctattaaccactcacgggagctctccatgcatttggtattttcgtctggggggtgtgcacgcgatagcattgcgagacgctggagccggagcaccctatgtcgcagtatctgtctttgattcctgcctcatcccattatttatcgcacctacgttcaatattacaggcgaacatacttaccaaagcgtattaattaattaatgcttgtaggacataataataacaattgaacgtctgcacagccgctttccacacagacatcataacaaaaaatttccaccaaaccccccctcccccgccttctggccacagcacttaaacacatctctgccaaaccccaaaaacaaagaaccctaacaccagcctaaccagatttcaaattttatcttttggcggtatgcacttttaacagtcaccccccaactaacacattattttcccctcccactcccatactactaatctcatcaatacaacccccgcccatcctacccagcacacacacaccgctgctagccccataccccgaaccaaccaaaccccaaagacaccccccacagtttatgtagcttacctcctcaaagcaatacactgaaaatgtttagacgggctcacatcaccccataaacaaataggtttggtcctagcctttctattagctcttagtaagattacacatgcaagcatccccgttccagtgagttcaccctctaaatcaccacgatcaaaaggaacaagcatcaagcacgcagcaatgcagctcaaaacgcttagcctagccacacccccacgggaaacagcagtgattaacctttagcaataaacgaaagtttaactaagctatactaaccccagggttggtcaatttcgtgccagccaccgcggtcacacgattaacccaagtcaatagaagccggcgtaaagagtgttttagatcaccccctccccaataaagctaaaactcacctgagttgtaaaaaactccagttgacacaaaatagactacgaaagtggctttaacatatctgaacacacaatagctaagacccaaactgggattagataccccactatgcttagccctaaacctcaacagttaaatcaacaaaactgctcgccagaacactacgagccacagcttaaaactcaaaggacctggcggtgcttcatatccctctagaggagcctgttctgtaatcgataaaccccgatcaacctcaccacctcttgctcagcctatataccgccatcttcagcaaaccctgatgaaggctacaaagtaagcgcaagtacccacgtaaagacgttaggtcaaggtgtagcccatgaggtggcaagaaatgggctacattttctaccccagaaaactacgatagcccttatgaaacttaagggtcgaaggtggatttagcagtaaactgagagtagagtgcttagttgaacagggccctgaagcgcgtacacaccgcccgtcaccctcctcaagtatacttcaaaggacatttaactaaaacccctacgcatttatatagaggagacaagtcgtaacatggtaagtgtactggaaagtgcacttggacgaaccagagtgtagcttaacacaaagcacccaacttacacttaggagatttcaacttaacttgaccgctctgagctaaacctagccccaaacccactccaccttactaccagacaaccttaaccaaaccatttacccaaataaagtataggcgatagaaattgaaacctggcgcaatagatatagtaccgcaagggaaagatgaaaaattataaccaagcataatatagcaaggactaacccctataccttctgcataatgaattaactagaaataactttgcaaggagagccaaagctaagacccccgaaaccagacgagctacctaagaacagctaaaagagcacacccgtctatgtagcaaaatagtgggaagatttataggtagaggcgacaaacctaccgagcctggtgatagctggttgtccaagatagaatcttagttcaactttaaatttgcccacagaaccctctaaatccccttgtaaatttaactgttagtccaaagaggaacagctctttggacactaggaaaaaaccttgtagagagagtaaaaaatttaacacccatagtaggcctaaaagcagccaccaattaagaaagcgttcaagctcaacacccactacctaaaaaatcccaaacatataactgaactcctcacacccaattggaccaatctatcaccctatagaagaactaatgttagtataagtaacatgaaaacattctcctccgcataagcctgcgtcagattaaaacactgaactgacaattaacagcccaatatctacaatcaaccaacaagtcattattaccctcactgtcaacccaacacaggcatgctcataaggaaaggttaaaaaaagtaaaaggaactcggcaaatcttaccccgcctgtttaccaaaaacatcacctctagcatcaccagtattagaggcaccgcctgcccagtgacacatgtttaacggccgcggtaccctaaccgtgcaaaggtagcataatcacttgttccttaaatagggacctgtatgaatggctccacgagggttcagctgtctcttacttttaaccagtgaaattgacctgcccgtgaagaggcgggcatgacacagcaagacgagaagaccctatggagctttaatttattaatgcaaacagtacctaacaaacccacaggtcctaaactaccaaacctgcattaaaaatttcggttggggcgacctcggagcagaacccaacctccgagcagtacatgctaagacttcaccagtcaaagcgaactactatactcaattgatccaataacttgaccaacggaacaagttaccctagggataacagcgcaatcctattctagagtccatatcaacaatagggtttacgacctcgatgttggatcaggacatcccgatggtgcagccgctattaaaggttcgtttgttcaacgattaaagtcctacgtgatctgagttcagaccggagtaatccaggtcggtttctatctacnttcaaattcctccctgtacgaaaggacaagagaaataaggcctacttcacaaagcgccttcccccgtaaatgatatcatctcaacttagtattatacccacacccacccaagaacagggtttgttaagatggcagagcccggtaatcgcataaaacttaaaactttacagtcagaggttcaattcctcttcttaacaacatacccatggccaacctcctactcctcattgtacccattctaatcgcaatggcattcctaatgcttaccgaacgaaaaattctaggctatacacaactacgcaaaggccccaacgttgtaggcccctacgggctactacaacccttcgctgacgccataaaactcttcaccaaagagcccctaaaacccgccacatctaccatcaccctctacatcaccgccccgaccttagctctcaccatcgctcttctactatgaacccccctccccatacccaaccccctggtcaacctcaacctaggcctcctatttattctagccacctctagcctagccgtttactcaatcctctgatcagggtgagcatcaaactcaaactacgccctgatcggcgcactgcgagcagtagcccaaacaatctcatatgaagtcaccctagccatcattctactatcaacattactaataagtggctcctttaacctctccacccttatcacaacacaagaacacctctgattactcctgccatcatgacccttggccataatatgatttatctccacactagcagagaccaaccgaacccccttcgaccttgccgaaggggagtccgaactagtctcaggcttcaacatcgaatacgccgcaggccccttcgccctattcttcatagccgaatacacaaacattattataataaacaccctcaccactacaatcttcctaggaacaacatatgacgcactctcccctgaactctacacaacatattttgtcaccaagaccctacttctaacctccctgttcttatgaattcgaacagcatacccccgattccgctacgaccaactcatacacctcctatgaaaaaacttcctaccactcaccctagcattacttatatgatatgtctccatacccattacaatctccagcattccccctcaaacctaagaaatatgtctgataaaagagttactttgatagagtaaataataggagcttaaacccccttatttctaggactatgagaatcgaacccatccctgagaatccaaaattctccgtgccacctatcacaccccatcctaaagtaaggtcagctaaataagctatcgggcccataccccgaaaatgttggttatacccttcccgtactaattaatcccctggcccaacccgtcatctactctaccatctttgcaggcacactcatcactgcgctaagctcgcactgattttttacctgagtaggcctagaaataaacatgctagcttttattccagttctaaccaaaaaaataaaccctcgttccacagaagctgccatcaagtatttcctcacgcaagcaaccgcatccataatccttctaatagctatcctcttcaacaatatactctccggacaatgaaccataaccaatactaccaatcaatactcatcattaataatcataatggctatagcaataaaactaggaatagccccctttcacttctgagtcccagaggttacccaaggcacccctctgacatccggcctgcttcttctcacatgacaaaaactagcccccatctcaatcatataccaaatctctccctcactaaacgtaagccttctcctcactctctcaatcttatccatcatagcaggcagttgaggtggattaaaccaaacccagctacgcaaaatcttagcatactcctcaattacccacataggatgaataatagcagttctaccgtacaaccctaacataaccattcttaatttaactatttatattatcctaactactaccgcattcctactactcaacttaaactccagcaccacgaccctactactatctcgcacctgaaacaagctaacatgactaacacccttaattccatccaccctcctctccctaggaggcctgcccccgctaaccggctttttgcccaaatgggccattatcgaagaattcacaaaaaacaatagcctcatcatccccaccatcatagccaccatcaccctccttaacctctacttctacctacgcctaatctactccacctcaatcacactactccccatatctaacaacgtaaaaataaaatgacagtttgaacatacaaaacccaccccattcctccccacactcatcgcccttaccacgctactcctacctatctccccttttatactaataatcttatagaaatttaggttaaatacagaccaagagccttcaaagccctcagtaagttgcaatacttaatttctgtaacagctaaggactgcaaaaccccactctgcatcaactgaacgcaaatcagccactttaattaagctaagcccttactagaccaatgggacttaaacccacaaacacttagttaacagctaagcaccctaatcaactggcttcaatctacttctcccgccgccgggaaaaaaggcgggagaagccccggcaggtttgaagctgcttcttcgaatttgcaattcaatatgaaaatcacctcggagctggtaaaaagaggcctaacccctgtctttagatttacagtccaatgcttcactcagccattttacctcacccccactgatgttcgccgaccgttgactattctctacaaaccacaaagacattggaacactatacctattattcggcgcatgagctggagtcctaggcacagctctaagcctccttattcgagccgagctgggccagccaggcaaccttctaggtaacgaccacatctacaacgttatcgtcacagcccatgcatttgtaataatcttcttcatagtaatacccatcataatcggaggctttggcaactgactagttcccctaataatcggtgcccccgatatggcgtttccccgcataaacaacataagcttctgactcttacctccctctctcctactcctgctcgcatctgctatagtggaggccggagcaggaacaggttgaacagtctaccctcccttagcagggaactactcccaccctggagcctccgtagacctaaccatcttctccttacacctagcaggtgtctcctctatcttaggggccatcaatttcatcacaacaattatcaatataaaaccccctgccataacccaataccaaacgcccctcttcgtctgatccgtcctaatcacagcagtcctacttctcctatctctcccagtcctagctgctggcatcactatactactaacagaccgcaacctcaacaccaccttcttcgaccccgccggaggaggagaccccattctataccaacacctattctgatttttcggtcaccctgaagtttatattcttatcctaccaggcttcggaataatctcccatattgtaacttactactccggaaaaaaagaaccatttggatacataggtatggtctgagctatgatatcaattggcttcctagggtttatcgtgtgagcacaccatatatttacagtaggaatagacgtagacacacgagcatatttcacctccgctaccataatcatcgctatccccaccggcgtcaaagtatttagctgactcgccacactccacggaagcaatatgaaatgatctgctgcagtgctctgagccctaggattcatctttcttttcaccgtaggtggcctgactggcattgtattagcaaactcatcactagacatcgtactacacgacacgtactacgttgtagctcacttccactatgtcctatcaataggagctgtatttgccatcataggaggcttcattcactgatttcccctattctcaggctacaccctagaccaaacctacgccaaaatccatttcactatcatattcatcggcgtaaatctaactttcttcccacaacactttctcggcctatccggaatgccccgacgttactcggactaccccgatgcatacaccacatgaaacatcctatcatctgtaggctcattcatttctctaacagcagtaatattaataattttcatgatttgagaagccttcgcttcgaagcgaaaagtcctaatagtagaagaaccctccataaacctggagtgactatatggatgccccccaccctaccacacattcgaagaacccgtatacataaaatctagacaaaaaaggaaggaatcgaaccccccaaagctggtttcaagccaaccccatggcctccatgactttttcaaaaaggtattagaaaaaccatttcataactttgtcaaagttaaattataggctaaatcctatatatcttaatggcacatgcagcgcaagtaggtctacaagacgctacttcccctatcatagaagagcttatcacctttcatgatcacgccctcataatcattttccttatctgcttcctagtcctgtatgcccttttcctaacactcacaacaaaactaactaatactaacatctcagacgctcaggaaatagaaaccgtctgaactatcctgcccgccatcatcctagtcctcatcgccctcccatccctacgcatcctttacataacagacgaggtcaacgatccctcccttaccatcaaatcaattggccaccaatggtactgaacctacgagtacaccgactacggcggactaatcttcaactcctacatacttcccccattattcctagaaccaggcgacctgcgactccttgacgttgacaatcgagtagtactcccgattgaagcccccattcgtataataattacatcacaagacgtcttgcactcatgagctgtccccacattaggcttaaaaacagatgcaattcccggacgtctaaaccaaaccactttcaccgctacacgaccgggggtatactacggtcaatgctctgaaatctgtggagcaaaccacagtttcatgcccatcgtcctagaattaattcccctaaaaatctttgaaataggacccgtatttaccctatagcaccccctctaccccctctagagcccactgtaaagctaacttagcattaaccttttaagttaaagattaagagaaccaacacctctttacagtgaaatgccccaactaaatactaccgtatggcccaccataattacccccatactccttacactattcctcatcacccaactaaaaatattaaacacaaactaccacctacctccctcaccaaagcccataaaaataaaaaattataacaaaccctgagaaccaaaatgaacgaaaatctgttcgcttcattcattgcccccacaatcctaggcctacccgccgcagtactgatcattctatttccccctctattgatccccacctccaaatatctcatcaacaaccgactaatcaccacccaacaatgactaatcaaactaacctcaaaacaaatgataaccatacacaacactaaaggacgaacctgatctcttatactagtatccttaatcatttttattgccacaactaacctcctcggactcctgcctcactcatttacaccaaccacccaactatctataaacctagccatggccatccccttatgagcgggcgcagtgattataggctttcgctctaagattaaaaatgccctagcccacttcttaccacaaggcacacctacaccccttatccccatactagttattatcgaaaccatcagcctactcattcaaccaatagccctggccgtacgcctaaccgctaacattactgcaggccacctactcatgcacctaattggaagcgccaccctagcaatatcaaccattaaccttccctctacacttatcatcttcacaattctaattctactgactatcctagaaatcgctgtcgccttaatccaagcctacgttttcacacttctagtaagcctctacctgcacgacaacacataatgacccaccaatcacatgcctatcatatagtaaaacccagcccatgacccctaacaggggccctctcagccctcctaatgacctccggcctagccatgtgatttcacttccactccataacgctcctcatactaggcctactaaccaacacactaaccatataccaatgatggcgcgatgtaacacgagaaagcacataccaaggccaccacacaccacctgtccaaaaaggccttcgatacgggataatcctatttattacctcagaagtttttttcttcgcaggatttttctgagccttttaccactccagcctagcccctaccccccaattaggagggcactggcccccaacaggcatcaccccgctaaatcccctagaagtcccactcctaaacacatccgtattactcgcatcaggagtatcaatcacctgagctcaccatagtctaatagaaaacaaccgaaaccaaataattcaagcactgcttattacaattttactgggtctctattttaccctcctacaagcctcagagtacttcgagtctcccttcaccatttccgacggcatctacggctcaacattttttgtagccacaggcttccacggacttcacgtcattattggctcaactttcctcactatctgcttcatccgccaactaatatttcactttacatccaaacatcactttggcttcgaagccgccgcctgatactggcattttgtagatgtggtttgactatttctgtatgtctccatctattgatgagggtcttactcttttagtataaatagtaccgttaacttccaattaactagctttgacaacattcaaaaaagagtaataaacttcgccttaattttaataatcaacaccctcctagccttactactaataattattacattttgactaccacaactcaacggctacatagaaaaatccaccccttacgagtgcggcttcgaccctatatcccccgcccgcgtccctttctccataaaattcttcttagtagctatcaccttcttattatttgatctagaaattgccctccttttacccctaccatgagccctacaaacaactaacctgccactaatagttatgtcatccctcttattaatcatcatcctagccctaagtctggcctatgagtgactacaaaaaggattagactgagccgaattggtatatagtttaaacaaaacgaatgatttcgactcattaaattatgataatcatatttaccaaatgcccctcatttacataaatattatactagcatttaccatctcacttctaggaatactagtatatcgctcacacctcatatcctccctactatgcctagaaggaataatactatcgctgttcattatagctactctcataaccctcaacacccactccctcttagccaatattgtgcctattgccatactagtctttgccgcctgcgaagcagcggtgggcctagccctactagtctcaatctccaacacatatggcctagactacgtacataacctaaacctactccaatgctaaaactaatcgtcccaacaattatattactaccactgacatgactttccaaaaaacacataatttgaatcaacacaaccacccacagcctaattattagcatcatccctctactattttttaaccaaatcaacaacaacctatttagctgttccccaaccttttcctccgaccccctaacaacccccctcctaatactaactacctgactcctacccctcacaatcatggcaagccaacgccacttatccagtgaaccactatcacgaaaaaaactctacctctctatactaatctccctgcaaatctccttaattataacattcacagccacagaactaatcatattttatatcttcttcgaaaccacacttatccccaccttggctatcatcacccgatgaggcaaccagccagaacgcctgaacgcaggcacatacttcctattctacaccctagtaggctcccttcccctactcatcgcactaatttacactcacaacaccctaggctcactaaacattctactactcactctcactgcccaagaactatcaaactcctgagccaacaacttaatatgactagcttacacaatagcttttatagtaaagatacctctttacggactccacttatgactccctaaagcccatgtcgaagcccccatcgctgggtcaatagtacttgccgcagtactcttaaaactaggcggctatggtataatacgcctcacactcattctcaaccccctgacaaaacacatagcctaccccttccttgtactatccctatgaggcataattataacaagctccatctgcctacgacaaacagacctaaaatcgctcattgcatactcttcaatcagccacatagccctcgtagtaacagccattctcatccaaaccccctgaagcttcaccggcgcagtcattctcataatcgcccacggacttacatcctcattactattctgcctagcaaactcaaactacgaacgcactcacagtcgcatcataatcctctctcaaggacttcaaactctactcccactaatagctttttgatgacttctagcaagcctcgctaacctcgccttaccccccactattaacctactgggagaactctctgtgctagtaaccacgttctcctgatcaaatatcactctcctacttacaggactcaacatactagtcacagccctatactccctctacatatttaccacaacacaatggggctcactcacccaccacattaacaacataaaaccctcattcacacgagaaaacaccctcatgttcatacacctatcccccattctcctcctatccctcaaccccgacatcattaccgggttttcctcttgtaaatatagtttaaccaaaacatcagattgtgaatctgacaacagaggcttacgaccccttatttaccgagaaagctcacaagaactgctaactcatgcccccatgtctaacaacatggctttctcaacttttaaaggataacagctatccattggtcttaggccccaaaaattttggtgcaactccaaataaaagtaataaccatgcacactactataaccaccctaaccctgacttccctaattccccccatccttaccaccctcgttaaccctaacaaaaaaaactcatacccccattatgtaaaatccattgtcgcatccacctttattatcagtctcttccccacaacaatattcatatgcctagaccaagaagttattatctcgaactgacactgagccacaacccaaacaacccagctctccctaagcttcaaactagactacttctccataatattcatccctgtagcattgttcgttacatggtccatcatagaattctcactgtgatatataaactcagacccaaacattaatcagttcttcaaatatctactcattttcctaattaccatactaatcttagttaccgctaacaacctattccaactgttcatcggctgagagggcgtaggaattatatccttcttgctcatcagttgatgatacgcccgagcagatgccaacacagcagccattcaagcaatcctatacaaccgtatcggcgatatcggtttcatcctcgccttagcatgatttatcctacactccaactcatgagacccacaacaaatagcccttctaaacgctaatccaagcctcaccccactactaggcctcctcctagcagcagcaggcaaatcagcccaattaggtctccacccctgactcccctcagccatagaaggccccaccccagtctcagccctactccactcaagcactatagttgtagcaggaatcttcttactcatccgcttccaccccctagcagaaaatagcccactaatccaaactctaacactatgcttaggcgctatcaccactctgttcgcagcagtctgcgcccttacacaaaatgacatcaaaaaaatcgtagccttctccacttcaagtcaactaggactcataatagttacaatcggcatcaaccaaccacacctagcattcctgcacatctgtacccacgccttcttcaaagccatactatttatgtgctccgggtccatcatccacaaccttaacaatgaacaagatattcgaaaaataggaggactactcaaaaccatacctctcacttcaacctccctcaccattggcagcctagcattagcaggaatacctttcctcacaggtttctactccaaagaccacatcatcgaaaccgcaaacatatcatacacaaacgcctgagccctatctattactctcatcgctacctccctgacaagcgcctatagcactcgaataattcttctcaccctaacaggtcaacctcgcttccccacccttactaacattaacgaaaataaccccaccctactaaaccccattaaacgcctggcagccggaagcctattcgcaggatttctcattactaacaacatttcccccgcatcccccttccaaacaacagtccccctctacctaaaactcacagccctcgctgtcactttcctaggacttctaacagccctagacctcaactacctaaccaacaaacttaaaataaaatccccactatgcacattttatttctccaacatactcggattctaccctagcatcacacaccgcacaatcccctatctaggccttcttacgagccaaaacctgcccctactcctcctagacctaacctgactagaaaagctattacctaaaacaatttcacagcaccaaatctccacctccatcatcacctcaacccaaaaaggcataattaaactttacttcctctctttcttcttcccactcatcctaaccctactcctaatcacataacctattcccccgagcaatctcaattacaatatatacaccaacaaacaatgttcaaccagtaactactactaatcaacgcccataatcatacaaagcccccgcaccaataggatcctcccgaatcaaccctgacccctctccttcataaattattcagcttcctacactattaaagtttaccacaaccaccaccccatcatactctttcacccacagcaccaatcctacctccatcgctaaccccactaaaacactcaccaagacctcaacccctgacccccatgcctcaggatactcctcaatagccatcgctgtagtatatccaaagacaaccatcattccccctaaataaattaaaaaaactattaaacccatataacctcccccaaaattcagaataataacacacccgaccacaccgctaacaatcaatactaaacccccataaataggagaaggcttagaagaaaaccccacaaaccccattactaaacccacactcaacagaaacaaagcatacatcattattctcgcacggactacaaccacgaccaatgatatgaaaaaccatcgttgtatttcaactacaagaacaccaatgaccccaatacgcaaaattaaccccctaataaaattaattaaccactcattcatcgacctccccaccccatccaacatctccgcatgatgaaacttcggctcactccttggcgcctgcctgatcctccaaatcaccacaggactattcctagccatgcactactcaccagacgcctcaaccgccttttcatcaatcgcccacatcactcgagacgtaaattatggctgaatcatccgctaccttcacgccaatggcgcctcaatattctttatctgcctcttcctacacatcggacgaggcctatattacggatcatttctctactcagaaacctgaaacatcggcattatcctcctgcttgcaactatagcaacagccttcataggctatgtcctcccgtgaggccaaatatcattctgaggggccacagtaattacaaacttactatccgccatcccatacattgggacagacctagttcaatgaatctgaggaggctactcagtagacagtcccaccctcacacgattctttacctttcacttcatcttgcccttcattattgcagccctagcagcactccacctcctattcttgcacgaaacgggatcaaacaaccccctaggaatcacctcccattccgataaaatcaccttccacccttactacacaatcaaagacgccctcggcttacttctcttccttctctccttaatgacattaacactattctcaccagacctcctaggcgacccagacaattataccctagccaaccccttaaacacccctccccacatcaagcccgaatgatatttcctattcgcctacacaattctccgatccgtccctaacaaactaggaggcgtccttgccctattactatccatcctcatcctagcaataatccccatcctccatatatccaaacaacaaagcataatatttcgcccactaagccaatcactttattgactcctagccgcagacctcctcattctaacctgagtcggaggacaaccagtaagctacccttttaccatcattggacaagtagcatccgtactatacttcacaacaatcctaatcctaataccaactatctccctaattgaaaacaaaatactcaaatgggcctgtccttgtagtataaactaatacaccagtcttgtaagccggagatgaaaacctttttccaaggacaaatcagagaaaaagtctttaactccaccattagcacccaaagctaagattctaatttaaactattctctgttctttcatggggaagcagatttgggtaccacccaagtattgactcacccatcaacaaccgctatgtatttcgtacattactgccagccaccatgaatattgtacagtaccataaatacttaaccacctgtagtacataaaaacccaatccacatcaaaaccccctccccatgcttacaagcaagtacagcaatcaaccttcaactatcacacatcaactgcaactccaaagccacccctcacccactaggataccaacaaacctacccacccttaacagtacatagtacataaagccatttaccgtacatagcacattacagtcaaatcccttctcgtccccatggatgacccccctcagatagggatcccttgaccaccatcctccgtgaaatcaatatcccgcacaagagtgctactctcctcgctccgggcccataacacttgggggtagctaaagtgaactgtatccgacatctggttcctacttcagggccataaagcctaaatagcccacacgttccccttaaataagacatcacgatg

SEQ ID NO: 66 - DNA, 16570 bp, Homo sapiens mitochondrial
  3108: "n" refers to a nucleotide at position 3107 of the Cambridge Reference Sequence (CRS, Anderson et al. 1981 Nature 290:457-465), later determined to be absent from the human mtDNA sequence according to the revised CRS (rCRS, Andrews et al. 1999 Nature Genetics 23:147); "n" therefore represents a single nucleotide deletion at a position corresponding to nucleotide 3107 of SEQ ID NO:1 as provided herein.
gatcacaggtctatcaccctattaaccactcacgggagctctccatgcatttggtattttcgtctggggggtgtgcacgcgatagcattgcgagacgctggagccggagcaccctatgtcgcagtatctgtctttgattcctgcctcatcccattatttatcgcacctacgttcaatattacaggcgaacatacttaccaaagtgtattaattaattaatgcttgtaggacataataataacaattgaatgtctgcacagccgctttccacacagacatcataacaaaaaatttccaccaaaccccccctcccccgccttctggccacagcacttaaacacatctctgccaaaccccaaaaacaaagaaccctaacaccagcctaaccagatttcaaattttatcttttggcggtatgcacttttaacagtcaccccccaactaacacattattttcccctcccactcccatactactaatctcatcaatacaacccccgcccatcctacccagcacacacacaccgctgctaaccccataccccgatccaaccaaaccccaaagacaccccccacagtttatgtagcttacctcctcaaagcaatacactgaaaatgtttagacgggctcacatcaccccataaacaaataggtttggtcctagccttcctattagctcttagtaagattacacatgcaagcatccccgttccagtgagttcaccctctaaatcaccacgatcaaaagggacaagcatcaagcacgcagcaatgcagctcaaaacgcttagcctagccacacccccacgggaaacagcagtgattaacctttagcaataaacgaaagtttaactaagctatactaaccccagggttggtcaatttcgtgccagccaccgcggtcacacgattaacccaagtcaatagaagccggcgtaaagagtgttttagatcaccccctccccaataaagctaaaactcacctgagttgtaaaaaactccagttgacacaaaatagactacgaaagtggctttaacatatctgaacacacaatagctaagacccaaactgggattagataccccactatgcttagccctaaacctcaacagttaaatcaacaaaactgctcgccagaacactacgagccacagcttaaaactcaaaggacctggcggtgcttcatatccctctagaggagcctgttctgtaatcgataaaccccgatcaacctcaccacctcttgctcagcctatataccgccatcttcagcaaaccctgatgaaggctacaaagtaagcgcaagtacccacgtaaagacgttaggtcaaggtgtagcccatgaggtggcaagaaatgggctacattttctaccccagaaaactacgatagcccttatgaaacttaagggtcgaaggtggatttagcagtaaactgagagtagagtgcttagttgaacagggccctgaagcgcgtacacaccgcccgtcaccctcctcaagtatacttcaaaggacatttaactaaaacccctacgcatttatatagaggagacaagtcgtaacatggtaagtgtactggaaagtgcacttggacgaaccagagtgtagcttaacacaaagcacccaacttacacttaggagatttcaacttaacttgaccgctctgagctaaacctagccccaaacccactccaccttactaccagacaaccttaaccaaaccatttacccaaataaagtataggcgatagaaattgaaacctggcgcaatagatatagtaccgcaagggaaagatgaaaaattataaccaagcataatatagcaaggactaacccctataccttctgcataatgaattaactagaaataactttgcaaggagagccaaagctaagacccccgaaaccagacgagctacctaagaacagctaaaagagcacacccgtctatgtagcaaaatagtgggaagatttataggtagaggcgacaaacctaccgagcctggtgatagctggttgtccaagatagaatcttagttcaactttaaatttgcccacagaaccctctaaatccccttgtaaatttaactgttagtccaaagaggaacagctctttggacactaggaaaaaaccttgtagagagagtaaaaaatttaacacccatagtaggcctaaaagcagccaccaattaagaaagcgttcaagctcaacacccactacctaaaaaatcccaaacatataactgaactcctcacacccaattggaccaatctatcaccctatagaagaactaatgttagtataagtaacatgaaaacattctcctccgcataagcctgcgtcagattaaaacactgaactgacaattaacagcccaatatctacaatcaaccaacaagtcattattaccctcactgtcaacccaacacaggcatgctcataaggaaaggttaaaaaaagtaaaaggaactcggcaaatcttaccccgcctgtttaccaaaaacatcacctctagcatcaccagtattagaggcaccgcctgcccagtgacacatgtttaacggccgcggtaccctaaccgtgcaaaggtagcataatcacttgttccttaaatagggacctgtatgaatggctccacgagggttcagctgtctcttacttttaaccagtgaaattgacctgcccgtgaagaggcggacatgacacagcaagacgagaagaccctatggagctttaatttattaatgcaaacagtacctaacaaacccacaggtcctaaactaccaaacctgcattaaaaatttcggttggggcgacctcggagcagaacccaacctccgagcagtacatgctaagacttcaccagtcaaagcgaactactatactcaattgatccaataacttgaccaacggaacaagttaccctagggataacagcgcaatcctattctagagtccatatcaacaatagggtttacgacctcgatgttggatcaggacatcccgatggtgcagccgctattaaaggttcgtttgttcaacgattaaagtcctacgtgatctgagttcagaccggagtaatccaggtcggtttctatctacnttcaaattcctccctgtacgaaaggacaagagaaataaggcctacttcacaaagcgccttcccccgtaaatgatatcatctcaacttagtattatacccacacccacccaagaacagggtttgttaagatggcagagcccggtaatcgcataaaacttaaaactttacagtcagaggttcaattcctcttcttaacaacatacccatggccaacctcctactcctcatcgtacccattctaatcgcaatggcattcctaatgcttaccgaacgaaaaattctaggctatatacaactacgcaaaggccccaacgttgtaggcccctacgggctactacaacccttcgctgacgccataaaactcttcaccaaagagcccctaaaacccgccacatctaccatcaccctctacatcaccgccccgaccttagctctcaccatcgctcttctactatgaacccccctccccatacccaaccccctggtcaacctcaacctaggcctcctatttattctagccacctctagcctagccgtttactcaatcctctgatcagggtgagcatcaaactcaaactacgccctgatcggcgcactgcgagcagtagcccaaacaatctcatatgaagtcaccctagccatcattctactatcaacattactaataagtggctcctttaacctctccacccttatcacaacacaagaacacctctgattactcctgccatcatgacccttggccataatatgatttatctccacactagcagagaccaaccgaacccccttcgaccttgccgaaggggagtccgaactagtctcaggcttcaacatcgaatacgccgcaggccccttcgccctattcttcatagccgaatacacaaacattattataataaacaccctcaccactacaatcttcctaggaacaacatatgacgcactctcccctgaactctacacaacatattttgtcaccaagaccctacttctaacctccctgttcttatgaattcgaacagcatacccccgattccgctacgaccaactcatacacctcctatgaaaaaacttcctaccactcaccctagcattacttatatgatatgtctccatacccattacaatctccagcattccccctcaaacctaagaaatatgtctgataaaagagttactttgatagagtaaataataggagcttaaacccccttatttctaggactatgagaatcgaacccatccctgagaatccaaaattctccgtgccacctatcacaccccatcctaaagtaaggtcagctaaataagctatcgggcccataccccgaaaatgttggttatacccttcccgtactaattaatcccctggcccaacccgtcatctactctaccatctttgcaggcacactcatcacagcgctaagctcgcactgattttttacctgagtaggcctagaaataaacatgctagcttttattccagttctaaccaaaaaaataaaccctcgttccacagaagctgccatcaagtatttcctcacgcaagcaaccgcatccataatccttctaatagctatcctcttcaacaatatactctccggacaatgaaccataaccaatactaccaatcaatactcatcattaataatcataatggctatagcaataaaactaggaatagccccctttcacttctgagtcccagaggttacccaaggcacccctctgacatccggcctgcttcttctcacatgacaaaaactagcccccatctcaatcatataccaaatctctccctcactaaacgtaagccttctcctcactctctcaatcttatccatcatagcaggcagttgaggtggattaaaccaaacccagctacgcaaaatcttagcatactcctcaattacccacataggatgaataatagcagttctaccgtacaaccctaacataaccattcttaatttaactatttatattatcctaactactaccgcattcctactactcaacttaaactccagcaccacgaccctactactatctcgcacctgaaacaagctaacatgactaacacccttaattccatccaccctcctctccctaggaggcctgcccccgctaaccggctttttgcccaaatgggccattatcgaagaattcacaaaaaacaatagcctcatcatccccaccatcatggccaccatcaccctccttaacctctacttctacctacgcctaatctactccacctcaatcacactactccccatatctaacaacgtaaaaataaaatgacagtttgaacatacaaaacccaccccattcctccccacactcatcgcccttaccacgctactcctacctatctccccttttatactaataatcttatagaaatttaggttaaatacagaccaagagccttcaaagccctcagtaagttgcaatacttaatttctgtaacagctaaggactgcaaaaccccactctgcatcaactgaacgcaaatcagccactttaattaagctaagcccttactagaccaatgggacttaaacccacaaacacttagttaacagctaagcaccctaatcaactggcttcaatctacttctcccgccgccgggaaaaaaggcgggagaagccccggcaggtttgaagctgcttcttcgaatttgcaattcaatatgaaaatcacctcggagctggtaaaaagaggcctaacccctgtctttagatttacagtccaatgcttcactcagccattttacctcacccccactgatgttcgccgaccgttgactattctctacaaaccacaaagacattggaacactatacctattattcggcgcatgagctggagtcctaggcacagctctaagcctccttattcgagccgagctgggccagccaggcaaccttctaggtaacgaccacatctacaacgttatcgtcacagcccatgcatttgtaataatcttcttcatagtaatacccatcataatcggaggctttggcaactgactagttcccctaataatcggtgcccccgatatggcgtttccccgcataaacaacataagcttctgactcttacctccctctctcctactcctgctcgcatctgctatagtggaggccggagcaggaacaggttgaacagtctaccctcccttagcagggaactactcccaccctggagcctccgtagacctaaccatcttctccttacacctagcaggtgtctcctctatcttaggggccatcaatttcatcacaacaattatcaatataaaaccccctgccataacccaataccaaacgcccctcttcgtctgatccgtcctaatcacagcagtcctacttctcctatctctcccagtcctagctgctggcatcactatactactaacagaccgcaacctcaacaccaccttcttcgaccccgccggaggaggagaccccattctataccaacacctattctgatttttcggtcaccctgaagtttatattcttatcctaccaggcttcggaataatctcccatattgtaacttactactccggaaaaaaagaaccatttggatacataggtatggtctgagctatgatatcaattggcttcctagggtttatcgtgtgagcacaccatatatttacagtaggaatagacgtagacacacgagcatatttcacctccgctaccataatcatcgctatccccaccggcgtcaaagtatttagctgactcgccacactccacggaagcaatatgaaatgatctgctgcagtgctctgagccctaggattcatctttcttttcaccgtaggtggcctgactggcattgtattagcaaactcatcactagacatcgtactacacgacacgtactacgttgtagctcacttccactatgtcctatcaataggagctgtatttgccatcataggaggcttcattcactgatttcccctattctcaggctacaccctagaccaaacctacgccaaaatccatttcactatcatattcatcggcgtaaatctaactttcttcccacaacactttctcggcctatccggaatgccccgacgttactcggactaccccgatgcatacaccacatgaaacatcctatcatctgtaggctcattcatttctctaacagcagtaatattaataattttcatgatttgagaagccttcgcttcgaagcgaaaagtcctaatagtagaagaaccctccataaacctggagtgactatatggatgccccccaccctaccacacattcgaagaacccgtatacataaaatctagacaaaaaaggaaggaatcgaaccccccaaagctggtttcaagccaaccccatggcctccatgactttttcaaaaaggtattagaaaaaccatttcataactttgtcaaagttaaattataggctaaatcctatatatcttaatggcacatgcagcgcaagtaggtctacaagacgctacttcccctatcatagaagagcttatcacctttcatgatcacgccctcataatcattttccttatctgcttcctagtcctgtatgcccttttcctaacactcacaacaaaactaactaatactaacatctcagacgctcaggaaatagaaaccgtctgaactatcctgcccgccatcatcctagtcctcatcgccctcccatccctacgcatcctttacataacagacgaggtcaacgatccctcccttaccatcaaatcaattggccaccaatggtactgaacctacgagtacaccgactacggcggactaatcttcaactcctacatacttcccccattattcctagaaccaggcgacctgcgactccttgacgttgacaatcgagtagtactcccgattgaagcccccattcgtataataattacatcacaagacgtcttgcactcatgagctgtccccacattaggcttaaaaacagatgcaattcccggacgtctaaaccaaaccactttcaccgctacacgaccgggggtatactacggtcaatgctctgaaatctgtggagcaaaccacagtttcatgcccatcgtcctagaattaattcccctaaaaatctttgaaatagggcccgtatttaccctatagcaccccctctaccccctctagagcccactgtaaagctaacttagcattaaccttttaagttaaagattaagagaaccaacacctctttacagtgaaatgccccaactaaatactaccgtatggcccaccataattacccccatactccttacactattcctcatcacccaactaaaaatattaaacacaaactaccacctacctccctcaccaaaacccataaaaataaaaaattatagcaaaccctgagaaccaaaatgaacgaaaatctgttcgcttcattcattgcccccacaatcctaggcctacccgccgcagtactgatcattctatttccccctctattgatccccacctccaaatatctcatcaacaaccgactaatcaccacccaacaatgactaatcaaactaacctcaaaacaaatgataaccatacacaacactaaaggacgaacctgatctcttatactagtatccttaatcatttttattgccacaactaacctcctcggactcctgcctcactcatttacaccaaccacccaactatctataaacctagccatggccatccccttatgagcgggcgcagtgattataggctttcgctctaagattaaaaatgccctggcccacttcttaccacaaggcacacctacaccccttatccccatactagttattatcgaaaccatcagcctactcattcaaccaatagccctggccgtacgcctaaccgctaacattactgcaggccacctactcatgcacctaattggaagcgccaccctagcaatatcaaccattaaccttccctctacacttatcatcttcacaattctaattctactgactatcctagaaatcgctgtcgccttaatccaagcctacgttttcacacttctagtaagcctctacctgcacgacaacacataatgacccaccaatcacatgcctatcatatagtaaaacccagcccatgacccctaacaggggccctctcagccctcctaatgacctccggcctagccatgtgatttcacttccactccataacgctcctcatactaggcctactaaccaacacactaaccatataccaatgatggcgcgatgtaacacgagaaagcacataccaaggccaccacacaccacctgtccaaaaaggccttcgatacgggataatcctatttattacctcagaagtttttttcttcgcaggatttttctgagccttttaccactccagcctagcccctaccccccaattaggagggcactggcccccaacaggcatcaccccgctaaatcccctagaagtcccactcctaaacacatccgtattactcgcatcaggagtatcaatcacctgagctcaccatagtctaatagaaaacaaccgaaaccaaataattcaagcactgcttattacaattttactgggtctctattttaccctcctacaagcctcagagtacttcgagtctcccttcaccatttccgacggcatctacggctcaacattttttgtagccacaggcttccacggacttcacgtcattattggctcaactttcctcactatctgcttcatccgccaactaatatttcactttacatccaaacatcactttggcttcgaagccgccgcctgatactggcattttgtagatgtggtttgactatttctgtatgtctccatctattgatgagggtcttactcttttagtataaatagtaccgttaacttccaattaactagttttgacaacattcaaaaaagagtaataaacttcgccttaattttaataatcaacaccctcctagccttactactaataattattacattttgactaccacaactcaacggctacatagaaaaatccaccccttacgagtgcggcttcgaccctatatcccccgcccgcgtccctttctccataaaattcttcttagtagctatcaccttcttattatttgatctagaaattgccctccttttacccctaccatgagccctacaaacaactaacctgccactaatagttatgtcatccctcttattaatcatcatcctagccctaagtctggcctatgagtgactacaaaaaggattagactgagccgaattggtatatagtttaaacaaaacgaatgatttcgactcattaaattatgataatcatatttaccaaatgcccctcatttacataaatattatactagcatttaccatctcacttctaggaatactagtatatcgctcacacctcatatcctccctactatgcctagaaggaataatactatcgctgttcattatagctactctcataaccctcaacacccactccctcttagccaatattgtgcctattgccatactagtctttgccgcctgcgaagcagcggtgggcctagccctactagtctcaatctccaacacatatggcctagactacgtacataacctaaacctactccaatgctaaaactaatcgtcccaacaattatattactaccactgacatgactttccaaaaaacacataatttgaatcaacacaaccacccacagcctaattattagcatcatccctctactattttttaaccaaatcaacaacaacctatttagctgttccccaaccttttcctccgaccccctaacaacccccctcctaatactaactacctgactcctacccctcacaatcatggcaagccaacgccacttatccagtgaaccactatcacgaaaaaaactctacctctctatactaatctccctacaaatctccttaattataacattcacagccacagaactaatcatattttatatcttcttcgaaaccacacttatccccaccttggctatcatcacccgatgaggcaaccagccagaacgcctgaacgcaggcacatacttcctattctacaccctagtaggctcccttcccctactcatcgcactaatttacactcacaacaccctaggctcactaaacattctactactcactctcactgcccaagaactatcaaactcctgagccaacaacttaatatgactagcttacacaatagcttttatagtaaagatacctctttacggactccacttatgactccctaaagcccatgtcgaagcccccatcgctgggtcaatagtacttgccgcagtactcttaaaactaggcggctatggtataatacgcctcacactcattctcaaccccctgacaaaacacatagcctaccccttccttgtactatccctatgaggcataattataacaagctccatctgcctacgacaaacagacctaaaatcgctcattgcatactcttcaatcagccacatagccctcgtagtaacagccattctcatccaaaccccctgaagcttcaccggcgcagtcattctcataatcgcccacggacttacatcctcattactattctgcctagcaaactcaaactacgaacgcactcacagtcgcatcataatcctctctcaaggacttcaaactctactcccactaatagctttttgatgacttctagcaagcctcgctaacctcgccttaccccccactattaacctactgggagaactctctgtgctagtaaccacgttctcctgatcaaatatcactctcctacttacaggactcaacatactagtcacagccctatactccctctacatatttaccacaacacaatggggctcactcacccaccacattaacaacataaaaccctcattcacacgagaaaacaccctcatgttcatacacctatcccccattctcctcctatccctcaaccccgacatcattaccgggttttcctcttgtaaatatagtttaaccaaaacatcagattgtgaatctgacaacagaggcttacgaccccttatttaccgagaaagctcacaagaactgctaactcatgcccccatgtctaacaacatggctttctcaacttttaaaggataacagctatccattggtcttaggccccaaaaattttggtgcaactccaaataaaagtaataaccatgcacactactataaccaccctaaccctgacttccctaattccccccatccttaccaccctcgttaaccctaacaaaaaaaactcatacccccattatgtaaaatccattgtcgcatccacctttattatcagtctcttccccacaacaatattcatatgcctagaccaagaagttattatctcgaactgacactgagccacaacccaaacaacccagctctccctaagcttcaaactagactacttctccataatattcatccctgtagcattgttcgttacatggtccatcatagaattctcactgtgatatataaactcagacccaaacattaatcagttcttcaaatatctactcattttcctaattaccatactaatcttagttaccgctaacaacctattccaactgttcatcggctgagagggcgtaggaattatatccttcttgctcatcagttgatgatacgcccgagcagatgccaacacagcagccattcaagcaatcctatacaaccgtatcggcgatatcggtttcatcctcgccttagcatgatttatcctacactccaactcatgagacccacaacaaatagcccttctaaacgctaatccaagcctcaccccactactaggcctcctcctagcagcagcaggcaaatcagcccaattaggtctccacccctgactcccctcagccatagaaggccccaccccagtctcagccctactccactcaagcactatagttgtagcaggaatcttcttactcatccgcttccaccccctagcagaaaatagcccactaatccaaactctaacactatgcttaggcgctatcaccactctgttcgcagcagtctgcgcccttacacaaaatgacatcaaaaaaatcgtagccttctccacttcaagtcaactaggactcataatagttacaatcggcatcaaccaaccacacctagcattcctgcacatctgtacccacgccttcttcaaagccatactatttatgtgctccgggtccatcatccacaaccttaacaatgaacaagatattcgaaaaataggaggactactcaaaaccatacctctcacttcaacctccctcaccattggcagcctagcattagcaggaatacctttcctcacaggtttctactccaaagaccacatcatcgaaaccgcaaacatatcatacacaaacgcctgagccctatctattactctcatcgctacctccctgacaagcgcctatagcactcgaataattcttctcaccctaacaggtcaacctcgcttccccacccttactaacattaacgaaaataaccccaccctactaaaccccattaaacgcctggcagccggaagcctattcgcaggatttctcattactaacaacatttcccccgcatcccccttccaaacaacagtccccctctacctaaaactcacagccctcgctgtcactttcctaggacttctaacagccctagacctcaactacctaaccaacaaacttaaaataaaatccccactatgcacattttatttctccaacatactcggattctaccctagcatcacacaccgcacaatcccctatctaggccttcttacgagccaaaacctgcccctactcctcctagacctaacctgactagaaaagctattacctaaaacaatttcacagcaccaaatctccacctccatcatcacctcaacccaaaaaggcataattaaactttacttcctctctttcttcttcccactcatcctaaccctactcctaatcacataacctattcccccgagcaatctcaattacaacatatacaccaacaaacaatgttcaaccagtaactactactaatcaacgcccataatcatacaaagcccccgcaccaataggatcctcccgaatcaaccctgacccctctccttcataaattattcagcttcctacactattaaagtttaccacaaccaccaccccatcatactctttcacccacagcaccaatcctacctccatcgctaaccccactaaaacactcaccaagacctcaacccctgacccccatgcctcaggatactcctcaatagccatcgctgtagtatatccaaagacaaccatcattccccctaaataaattaaaaaaactattaaacccatataacctcccccaaaattcagaataataacacacccgaccacaccgctaacaatcaatactaaacccccataaataggagaaggcttagaagaaaaccccacaaaccccattactaaacccacactcaacagaaacaaagcatacatcattattctcgcacggactacaaccacgaccaatgatatgaaaaaccatcgttgtatttcaactacaagaacaccaatgaccccaatacgcaaaattaaccccctaataaaattaattaaccactcattcatcgacctccccaccccatccaacatctccgcatgatgaaacttcggctcactccttggcgcctgcctgatcctccaaatcaccacaggactattcctagccatgcactactcaccagacgcctcaaccgccttttcatcaatcgcccacatcactcgagacgtaaattatggctgaatcatccgctaccttcacgccaatggcgcctcaatattctttatctgcctcttcctacacatcggacgaggcctatattacggatcatttctctactcagaaacctgaaacatcggcattatcctcctgcttgcaactatagcaacagccttcataggctatgtcctcccgtgaggccaaatatcattctgaggggccacagtaattacaaacttactatccgccatcccatacattgggacagacctagttcaatgaatctgaggaggctactcagtagacagtcccaccctcacacgattctttacctttcacttcatcctgcccttcattattgcagccctagcagcactccacctcctattcttgcacgaaacgggatcaaacaaccccctaggaatcacctcccattccgataaaatcaccttccacccttactacacaatcaaagacgccctcggcttacttctcttccttctctccttaatgacattaacactattctcaccagacctcctaggcgacccagacaattataccctagccaaccccttaaacacccctccccacatcaagcccgaatgatatttcctattcgcctacacaattctccgatccgtccctaacaaactaggaggcgtccttgccctattactatccatcctcatcctagcaataatccccatcctccatatatccaaacaacaaagcataatatttcgcccactaagccaatcactttattgactcctagccgcagacctcctcattctaacctgaatcggaggacaaccagtaagctacccttttaccatcattggacaagtagcatccgtactatacttcacaacaatcctaatcctaataccaactatctccctaattgaaaacaaaatactcaaatgggcctgtccttgtagtataaactaatacaccagtcttgtaaaccggagatgaaaacctttttccaaggacaaatcagagaaaaagtctttaactccaccattagcacccaaagctaagattctaatttaaactattctctgttctttcatggggaagcagatttgggtaccacccaagtattgactcacccatcaacaaccgccatgtatttcgtacattactgccagccaccatgaatattgtacggtaccataaatacttgaacacctgtagtacataaaaacccaatccacatcaaaaccccctccccatgcttacaagcaagtacagcaatcaaccttcaactatcacacatcaactgcaattccaaagccacccctcacccactaggataccaacaaacctacccacccttaacagtacatagtacataaagtcatttaccgtacatagcacattacagtcaaatcctttctcgtccccatggatgacccccctcagataggggtcccttgaccaccatcctccgtgaaatcaatatcccgcacaagagtgctactctcctcgctccgggcccataacacttgggggtagctaaagtgaactgtatccgacatctggttcctacttcagggccataaagcctaaatagcccacacgttccccttaaataagacatcacgatg

SEQ ID NO: 67 - DNA, 16570 bp, Homo sapiens mitochondrial
  3108: "n" refers to a nucleotide at position 3107 of the Cambridge Reference Sequence (CRS, Anderson et al. 1981 Nature 290:457-465), later determined to be absent from the human mtDNA sequence according to the revised CRS (rCRS, Andrews et al. 1999 Nature Genetics 23:147); "n" therefore represents a single nucleotide deletion at a position corresponding to nucleotide 3107 of SEQ ID NO:1 as provided herein.
gatcacaggtctatcaccctattaaccactcacgggagctctccatgcatttggtattttcgtctggggggtgtgcacgcgatagcattgcgagacgctggagccggagcaccttatgtcgcagtatctgtctttgattcctgcctcatcctattatttatcgcacctacgttcaatattacaggcgaacatacttactaaagtgtgttaattaattaatgcttgtaggacataataataacaattgaatgtctgcacagccgctttccacacagacatcataacaaaaaatttccaccaaaccccccctcccccgccttctggccacagcacttaaacacatctctgccaaaccccaaaaacaaagaaccctaacaccagcctaaccagatttcaaattttatcttttggcggtatgcacttttaacagtcaccccccaactaacacattattttcccctcccactcccatactactaatctcatcaatacaaccctcgcccatcctacccagcacacacacaccgctgctaaccccataccccgaaccaaccaaaccccaaagacaccccccacagtttatgtagcttacctcctcaaagcaatacactgaaaatgtttagacgggctcacatcaccccataaacaaataggtttggtcctagcctttctattagctcttagtaagattacacatgcaagcatccccgttccagtgagttcaccctctaaatcaccacgatcaaaagggacaagcatcaagcacgcagcaatgcagctcaaaacgcttagcctagccacacccccacgggaaacagcagtgattaacctttagcaataaacgaaagtttaactaagctatactaaccccagggttggtcaatttcgtgccagccaccgcggtcacacgattaacccaagtcaatagaagccggcgtaaagagtgttttagatcaccccctccccaataaagctaaaactcacctgagttgtaaaaaactccagttgacacaaaatagactacgaaagtggctttaacatatctgaacacacaatagctaagacccaaactgggattagataccccactatgcttagccctaaacctcaacagttaaatcaacaaaactgctcgccagaacactacgagccacagcttaaaactcaaaggacctggcggtgcttcatacccctctagaggagcctgttctgtaatcgataaaccccgatcaacctcaccacctcttgctcagcctatataccgccatcttcagcaaaccctgatgaaggctacaaagtaagcgcaagtacccacgtaaagacgttaggtcaaggtgtagcccatgaggtggcaagaaatgggctacattttctaccccagaaaactacgatagcccttatgaaacttaagggtcgaaggtggatttagcagtaaactgagagtagagtgcttagttgaacagggccctgaagcgcgtacacaccgcccgtcaccctcctcaagtatacttcaaaggacatttaactaaaacccctacgcatttatatagaggagacaagtcgtaacatggtaagtgtactggaaagtgcacttggacgaaccagagtgtagcttaacacaaagcacccaacttacacttaggagatttcaacttaacttgaccgctctgagctaaacctagccccaaacccactccaccttactaccagacaaccttagccaaaccatttacccaaataaagtataggcgatagaaattgaaacctggcgcaatagatatagtaccgcaagggaaagatgaaaaattatagccaagcataatatagcaaggactaacccctataccttctgcataatgaattaactagaaataactttgcaaggagagccaaagctaagacccccgaaaccagacgagctacctaagaacagctaaaagagcacacccgtctatgtagcaaaatagtgggaagatttataggtagaggcgacaaacctaccgagcctggtgatagctggttgtccaagatagaatcttagttcaactttaaatttgcccacagaaccctctaaatccccttgtaaatttaactgttagtccaaagaggaacagctctttggacactaggaaaaaaccttgtagagagagtaaaaaatttaacacccatagtaggcctaaaagcagccaccaattaagaaagcgttcaagctcaacacccactacctaaaaaatcccaaacatataactgaactcctcacacccaattggaccaatctatcaccctatagaagaactaatgttagtataagtaacatgaaaacattctcctccgcataagcctgcgtcagattaaaacactgaactgacaattaacagcccaatatctacaatcaaccaacaagtcattattaccctcactgtcaacccaacacaggcatgctcataaggaaaggttaaaaaaagtaaaaggaactcggcaaatcttaccccgcctgtttaccaaaaacatcacctctagcatcaccagtattagaggcaccgcctgcccagtgacacatgtttaacggccgcggtaccctaaccgtgcaaaggtagcataatcacttgttccttaaatagggacctgtatgaatggctccacgagggttcagctgtctcttacttttaaccagtgaaattgacctgcccgtgaagaggcgggcatgacacagcaagacgagaagaccctatggagctttaatttattaatgcaaacagtacctaacaaacccacaggtcctaaactaccaaacctgcattaaaaatttcggttggggcgacctcggagcagaacccaacctccgagcagtacatgctaagacttcaccagtcaaagcgaactactatactcaattgatccaataacttgaccaacggaacaagttaccctagggataacagcgcaatcctattctagagtccatatcaacaatagggtttacgacctcgatgttggatcaggacatcccgatggtgcagccgctattaaaggttcgtttgttcaacgattaaagtcctacgtgatctgagttcagaccggagtaatccaggtcggtttctatctacnttcaaattcctccctgtacgaaaggacaagagaaataaggcctacttcacaaagcgccttcccccgtaaatgatatcatctcaacttagtattatacccacacccacccaagaacagggtttgttaagatggcagagcccggtaatcgcataaaacttaaaactttacagtcagaggttcaattcctcttcttaacaacatacccatggccaacctcctactcctcattgtacccattctaatcgcaatggcattcctaatgcttaccgaacgaaaaattctaggctatatacaactacgcaaaggccccaacgttgtaggcccctacgggctactacaacccttcgctgacgccataaaactcttcaccaaggagcccctaaaacccgccacatctaccatcaccctctacatcaccgccccgaccttagctctcaccatcgcccttctactatgaacccccctccccatacccaaccccctggtcaacctcaacctaggcctcctatttattctagccacctctagcctagccgtttactcaatcctctgatcagggtgagcatcaaactcaaactacgccctgatcggcgcactgcgagcagtagcccaaacaatctcatatgaagtcaccctagccatcattctactatcaacattactaataagtggctcctttaacctctccacccttatcacaacacaagaacacctctgattactcctgccatcatgacccttggccataatatgatttatctccacactagcagagaccaaccgaacccccttcgaccttgccgaaggggagtccgaactagtctcaggcttcaacatcgaatacgccgcaggccccttcgccctattcttcatagccgaatacacaaacattattataataaacaccctcaccactacaatcttcctaggaacaacatatgacgcactctcccctgaactctacacaacatattttgtcaccaagaccctacttctaacctccctgttcttatgaattcgaacagcatacccccgattccgctacgaccaactcatacacctcctatgaaaaaacttcctaccactcaccctagcattacttatatgatatgtctccatacccattacaatctccagcattccccctcaaacctaagaaatatgtctgataaaagagttactttgatagagtaaataataggagcttaaacccccttatttctaggactatgagaatcgaacccatccctgagaatccaaaattctccgtgccacctatcacaccccatcctaaagtaaggtcagctaaataagctatcgggcccataccccgaaaatgttggttatacccttcccgtactaattaatcccctggcccaacccgtcatctactctaccatctttgcaggcacactcatcacagcgctaagctcgcactgattttttacctgagtaggcctagaaataaacatgctagcttttattccagttctaaccaaaaaaataaaccctcgttccacagaagctgccatcaagtatttcctcacgcaagcaaccgcatccataatccttctaatagctatcctcttcaacaatatactctccggacaatgaaccataaccaatactaccaatcaatactcatcattaataatcataatggctatagcaataaaactaggaatagccccctttcacttctgagtcccagaggttacccaaggcacccctctgacatccggcctgcttcttctcacatgacaaaaactagcccccatctcaatcatataccaaatctctccctcactaaacgtaagccttctcctcactctctcaatcttatccatcatagcaggcagttgaggtggattaaaccaaacccagctacgcaaaatcttagcatactcctcaattacccacataggatgaataatagcagttctaccgtacaaccctaacataaccattcttaatttaactatttatattatcctaactactaccgcattcctactactcaacttaaactccagcaccacgaccctactactatctcgcacctgaaacaagctaacatgactaacacccttaattccatccaccctcctctccctaggaggcctgcccccgctaaccggctttttgcccaaatgggccattatcgaagaattcacaaaaaacaatagcctcatcatccccaccatcatagccaccatcaccctccttaacctctacttctacctacgcctaatctactccacctcaatcacactactccccatatctaacaacgtaaaaataaaatgacagtttgaacatacaaaacccaccccattcctccccacactcatcgcccttaccacgctactcctacctatctccccttttatactaataatcttatagaaatttaggttaaatacagaccaagagccttcaaagccctcagtaagttgcaatacttaatttctgtaacagctaaggactgcaaaaccccactctgcatcaactgaacgcaaatcagccactttaattaagctaagcccttactagaccaatgggacttaaacccacaaacacttagttaacagctaagcaccctaatcaactggcttcaatctacttctcccgccgccgggaaaaaaggcgggagaagccccggcaggtttgaagctgcttcttcgaatttgcaattcaatatgaaaatcacctcggagctggtaaaaagaggcctaacccctgtctttagatttacagtccaatgcttcactcagccattttacctcacccccactgatgttcgccgaccgttgactattctctacaaaccacaaagacattggaacactatacctattattcggcgcatgagctggagtcctaggcacagctctaagcctccttattcgagccgagctgggccagccaggcaaccttctaggtaacgaccacatctacaacgttatcgtcacagcccatgcatttgtaataatcttcttcatagtaatacccatcataatcggaggctttggcaactgactagttcccctaataatcggtgcccccgatatggcgtttccccgcataaacaacataagcttctgactcttacctccctctctcctactcctgctcgcatctgctatagtggaggccggagcaggaacaggttgaacagtctaccctcccttagcagggaactactcccaccctggagcctccgtagacctaaccatcttctccttacacctagcaggtgtctcctctatcttaggggccatcaatttcatcacaacaattatcaatataaaaccccctgccataacccaataccaaacgcccctcttcgtctgatccgtcctaatcacagcagtcctacttctcctatctctcccagtcctagctgctggcatcactatactactaacagaccgcaacctcaacaccaccttcttcgaccccgccggaggaggagaccccattctataccaacacctattctgatttttcggtcaccctgaagtttatattcttatcctaccaggcttcggaataatctcccatattgtaacttactactccggaaaaaaagaaccatttggatacataggtatggtctgagctatgatatcaattggcttcctagggtttatcgtgtgagcacaccatatatttacagtaggaatagacgtagacacacgagcatatttcacctccgctaccataatcatcgctatccccaccggcgtcaaagtatttagctgactcgccacactccacggaagcaatatgaaatgatctgctgcagtgctctgagccctaggattcatctttcttttcaccgtaggtggcctgactggcattgtattagcaaactcatcactagacatcgtactacacgacacgtactacgttgtagctcacttccactatgtcctatcaataggagctgtatttgccatcataggaggcttcattcactgatttcccctattctcaggctacaccctagaccaaacctacgccaaaatccatttcactatcatattcatcggcgtaaatctaactttcttcccacaacactttctcggcctatccggaatgccccgacgttactcggactaccccgatgcatacaccacatgaaacatcctatcatctgtaggctcattcatttctctaacagcagtaatattaataattttcatgatttgagaagccttcgcttcgaagcgaaaagtcctaatagtagaagaaccctccataaacctggagtgactatatggatgccccccaccctaccacacattcgaagaacccgtatacataaaatctagacaaaaaaggaaggaatcgaaccccccaaagctggtttcaagccaaccccatggcctccatgactttttcaaaaaggtattagaaaaaccatttcataactttgtcaaagttaaattataggctaaatcctatatatcttaatggcacatgcagcgcaagtaggtctacaagacgctacttcccctatcatagaagagcttatcacctttcatgatcacgccctcataatcattttccttatctgcttcctagtcctgtatgcccttttcctaacactcacaacaaaactaactaatactaacatctcagacgctcaggaaatagaaaccgtctgaactatcctgcccgccatcatcctagtcctcatcgccctcccatccctacgcatcctttacataacagacgaggtcaacgatccctcccttaccatcaaatcaattggccaccaatggtactgaacctacgagtacaccgactacgggggactaatcttcaactcctacatacttcccccattattcctagaaccaggcgacctgggactccttgacgttgacaatcgagtagtactcccgattgaagcccccattcgtataataattacatcacaagacgtcttgcactcatgagctgtccccacattaggcttaaaaacagatgcaattcccggacgtctaaaccaaaccactttcaccgctacacgaccgggggtatactacggtcaatgctctgaaatctgtggagcaaaccacagtttcatgcccatcgtcctagaattaattcccctaaaaatctttgaaatagggcccgtatttaccctatagcaccccctctaccccctctagagcccactgtaaagctaacttagcattaaccttttaagttaaagattaagagaaccaacacctctttacagtgaaatgccccaactaaatactaccgtatggcccaccataattacccccatactccttacactattcctcatcacccaactaaaaatattaaacacaaactaccacctacctccctcaccaaagcccataaaaataaaaaattataacaaaccctgagaaccaaaatgaacgaaaatctgttcgcttcattcattgcccccacaatcctaggcctacccgccgcagtactgatcattctatttccccctctattgatccccacctccaaatatctcatcaacaaccgactaatcaccacccaacaatgactaatcaaactaacctcaaaacaaatgataaccatacacaacactaaaggacgaacctgatctcttatactagtatccttaatcatttttattgccacaactaacctcctcggactcctgcctcactcatttacaccaaccacccaactatctataaacctagccatggccatccccttatgagcgggcgcagtgattataggctttcgctctaagattaaaaatgccctagcccacttcttaccacaaggcacacctacaccccttatccccatactagttattatcgaaaccatcagcctactcattcaaccaatagccctggccgtacgcctaaccgctaacattactgcaggccacctactcatgcacctaattggaagcaccaccctagcaatatcaaccattaaccttccctctacacttatcatcttcacaattctaattctactgactatcctagaaatcgctgtcgccttaatccaagcctacgttttcacacttctagtaagcctctacctgcacgacaacacataatgacccaccaatcacatgcctatcatatagtaaaacccagcccatgacccctaacaggggccctctcagccctcctaatgacctccggcctagccatgtgatttcacttccactccataacgctcctcatactaggcctactaaccaacacactaaccatataccaatgatggcgcgatgtaacacgagaaagcacataccaaggccaccacacaccacctgtccaaaaaggccttcgatacgggataatcctatttattacctcagaagtttttttcttcgcaggatttttctgagccttttaccactccagcctagcccctaccccccaattaggagggcactggcccccaacaggcatcaccccgctaaatcccctagaagtcccactcctaaacacatccgtattactcgcatcaggagtatcaatcacctgagctcaccatagtctaatagaaaacaaccgaaaccaaataattcaagcactgctcattacaattttactgggtctctattttaccctcctacaagcctcagagtacttcgagtctcccttcaccatttccgacggcatctacggctcaacattttttatagccacaggcttccacggacttcacgtcattattggctcaactttcctcactatctgcttcatccgccaactaatatttcactttacatccaaacatcactttggcttcgaagccgccgcctgatactggcattttgtagatgtggtttgactatttctgtatgtctccatctattgatgagggtcttactcttttagtataaatagtaccgttaacttccaattaactagttttgacaacattcaaaaaagagtaataaacttcgccttaattttaataatcaacaccctcctagccttactactaataattattacattttgactaccacaactcaacggctacatagaaaaatccaccccttacgagtgcggcttcgaccctatatcccccgcccgcgtccctttctccataaaattcttcttagtagctattaccttcttattatttgatctagaaattgccctccttttacccctaccatgagccctacaaacaactaacctgccactaatagttatgtcatccctcttattaatcatcatcctagccctaagtctggcctatgagtgactacaaaaaggattagactgagccgaattggtatatagtttaaacaaaacgaatgatttcgactcattaaattatgataatcatatttaccaaatgcccctcatttacataaatattatactagcatttaccatctcacttctaggaatactagtatatcgctcacacctcatgtcctccctactatgcctagaaggaataatactatcgctgttcattatagctactctcataaccctcaacacccactccctcttagccaatattgtgcctattgccatactagtctttgccgcctgcgaagcagcggtgggcctagccctactagtctcaatctccaacacatatggcctagactacgtacataacctaaacctactccaatgctaaaactaatcgtcccaacaattatattactaccactgacatgactttccaaaaaacacataatttgaatcaacacaaccacccacagcctaattattagcatcatccctctactattttttaaccaaatcaacaacaacctatttagctgttccccaaccttttcctccgaccccctaacaacccccctcctaatactaactacctgactcctacccctcacaatcatggcaagccaacgccacttatccagtgaaccactatcacgaaaaaaactctacctctctatactaatctccctacaaatctccttaattataacattcacagccacagaactaatcatattttatatcttcttcgaaaccacacttatccccaccttggctatcatcacccgatgaggcaaccagccagaacgcctgaacgcaggcacatacttcctattctacaccctagtaggctcccttcccctactcatcgcactaatttacactcacaacaccctaggctcactaaacattctactactcaccctcactgcccaagaactatcaaactcctgagccaacaacttaatatgactagcttacacaatagcttttatagtaaagatacctctttacggactccacttatgactccctaaagcccatgtcgaagcccccatcgctgggtcaatagtacttgccgcagtactcttgaaactaggcggctatggtataatacgcctcacactcattctcaaccccctgacaaaacacatagcctaccccttccttgtactatccctatgaggcataattataacaagctccatctgcctacgacaaacagacctaaaatcgctcattgcatactcttcaatcagccacatagccctcgtagtaacagccattctcatccaaaccccctgaagcttcaccggcgcagtcattctcataatcgcccacggacttacatcctcattactattctgcctagcaaactcaaactacgaacgcactcacagtcgcatcataatcctctctcaaggacttcaaactctactcccactaatagctttttgatgacttctagcaagcctcgctaacctcgccttaccccccactattaacctactgggagaactctctgtgctagtaaccacattctcctgatcaaatatcactctcctacttacaggactcaacatactagtcacagccctatactccctctacatatttaccacaacacaatggggctcactcacccaccacattaacaacataaaaccctcattcacacgagaaaacaccctcatgttcatacacctatcccccattctcctcctatccctcaaccccgacatcattaccgggttttcctcttgtaaatatagtttaaccaaaacatcagattgtgaatctgacaacagaggcttacgaccccttatttaccgagaaagctcacaagaactgctaactcatgcccccatgtctaacaacatggctttctcaacttttaaaggataacagctatccattggtcttaggccccaagaattttggtgcaactccaaataaaagtaataaccatgcacactactataaccaccctaaccctaacttccctaattccccccatccttaccaccctcgttaaccctaacaaaaaaaactcatacccccattatgtaaaatccattgtcgcatccacctttattatcagtctcttccccacaacaatattcatgtgcctagaccaagaagttattatctcgaactgacactgagccacaacccaaacaacccagctctccctaagcttcaaactagactacttctccataatattcatccctgtagcattgttcgttacatggtccatcatagaattctcactgtgatatataaactcagacccaaacattaatcagttcttcaaatatctactcatcttcctaattaccatactaatcttagttaccgctaacaacctattccaactgttcatcggctgagagggcgtaggaattatatccttcttgctcatcagttgatgatacgcccgagcagatgccaacacagcagccattcaagcaatcctatacaaccgtatcggcgatatcggtttcatcctcgccttagcatgatttatcctacactccaactcatgagacccacaacaaatagcccttctaaacgctaatccaagcctcaccccactactaggcctcctcctagcagcagcaggcaaatcagcccaattaggtctccacccctgactcccctcagccatagaaggccccaccccagtctcagccctactccactcaagcactatagttgtagcaggaatcttcttactcatccgcttccaccccctagcagaaaatagcccactaatccaaactctaacactatgcttaggcgctatcaccactctgttcgcagcagtctgcgcccttacacaaaatgacatcaaaaaaatcgtagccttctccacttcaagtcaactaggactcataatagttacaatcggcatcaaccaaccacacctagcattcctgcacatctgtacccacgccttcttcaaagccatactatttatgtgctccgggtccatcatccacaaccttaacaatgaacaagatattcgaaaaataggaggactactcaaaaccatacctctcacttcaacctccctcaccattggcagcctagcattagcaggaatacctttcctcacaggtttctactccaaagaccacatcatcgaaaccgcaaacatatcatacacaaacgcctgagccctatctattactctcatcgctacctccctgacaagcgcctatagcactcgaataattcttctcaccctaacaggtcaacctcgcttccccacccttactaacattaacgaaaataaccccaccctactaaaccccattaaacgcctggcagccggaagcctattcgcaggatttctcattactaacaacatttcccccgcatcccccttccaaacaacaatacccctctacctaaaactcacagccctcgctgtcactttcctaggacttctaacagccctagacctcaactacctaaccaacaaacttaaaataaaatccccactatgcacattttatttctccaacatactcggattctaccctagcatcacacaccgcacaatcccctatctaggccttcttacgagccaaaacctgcccctactcctcctagacctaacctgactagaaaagctattacctaaaacaatttcacagcaccaaatctccacctccatcatcacctcaacccaaaaaggcataattaaactttacttcctctctttcttcttcccactcatcctaaccctactcctaatcacataacctattcccccgagcaatttcaattacaatatatacaccaacaaacaatgttcaaccagtaactactactaatcaacgcccataatcatacaaagcccccgcaccaataggatcctcccgaatcaaccctgacccctctccttcataaattattcagcttcctacactattaaagtttaccacaaccaccaccccatcatactctttcacccacagcaccaatcctacctccatcgctaaccccactaaaacactcaccaagacctcaacccctgacccccatgcctcaggatactcctcaatagccatcgctgtagtatatccaaagacaaccatcattccccctaaataaattaaaaaaactattaaacccatataacctcccccaaaattcagaataataacacacccgaccacaccgctaacaatcaatactaaacccccataaataggagaaggcttagaagaaaaccccacaaaccccattactaaacccacactcaacagaaacaaagcatacatcattattctcgcacggactacaaccacgaccaatgatatgaaaaaccatcgttgtatttcaactacaagaacaccaatgaccccaatacgcaaaattaaccccctaataaaattaattaaccactcactcatcgacctccccaccccatccaacatctccgcatgatgaaacttcggctcactccttggcgcctgcctgatcctccaaatcaccacaggactattcctagccatgcactactcaccagacgcctcaaccgccttttcatcaatcgcccacatcactcgagacgtaaattatggctgaatcatccgctaccttcacgccaatggcgcctcaatattctttatctgcctcttcctacacatcgggcgaggcctatattacggatcatttctctactcagaaacctgaaacatcggcattatcctcctgcttgcaactatagcaacagccttcataggctatgtcctcccgtgaggccaaatatcattctgaggggccacagtaattacaaacttactatccgccatcccatacattgggacagacctagttcaatgaatctgaggaggctactcagtagacagtcccaccctcacacgattctttacctttcacttcatcttgcccttcattattgcagccctagcagcactccacctcctattcttgcacgaaacgggatcaaacaaccccctaggaatcacctcccattccgataaaatcaccttccacccttactacacaatcaaagacgccctcggcttacttctcttccttctctccttaatgacattaacactattctcaccagacctcctaggcgacccagacaattataccctagccaaccccttaaacacccctccccacatcaagcccgaatgatatttcctattcgcctacacaattctccgatccgtccctaacaaactaggaggcgtccttgccctattactatccatcctcatcctagcaataatccccatcctccatatatccaaacaacaaagcataatatttcgcccactaagccaatcactttattgactcctagccgcagacctcctcattctaacctgaatcggaggacaaccagtaagctacccttttaccatcattggacaagtagcatccgtactatacttcacaacaatcctaatcctaataccaactatctccctaattgaaaacaaaatactcaaatgggcctgtccttgtagtataaactaatacaccagtcttgtaaaccggagatgaaaacctttttccaaggacaaatcagagaaaaagtctttaactccaccattagcacccaaagctaagattctaatttaaactattctctgttctttcatggggaagcagatttgggtaccacccaagtattgactcacccatcaacaaccgctatgtatctcgtacattactgccagccaccatgaatattgtacggtaccataaatacttgaccacctgtagtacataaaaacccaatccacatcaaaaccccctccccatgcttacaagcaagtacagcaatcaacccccaactatcacacatcaactgcaactccaaagccacccctcacccactaggataccaacaaacctacccacccttaacagtacatagcacataaagccatttaccgtacatagcacattacagtcaaatcccttctcgtccccatggatgacccccctcagataggggtcccttgaccaccatcctccgtgaaatcaatatcccgcacaagagtgctactctcctcgctccgggcccataacacttgggggtagctaaagtgaactgtatccgacatctggttcctacttcagggccataaagcctaaatagcccacacgttccccttaaataagacatcacgatg

SEQ ID NO: 68 - DNA, 16569 bp, Homo sapiens mitochondrial
  3107: "n" refers to a nucleotide at position 3107 of the Cambridge Reference Sequence (CRS, Anderson et al. 1981 Nature 290:457-465), later determined to be absent from the human mtDNA sequence according to the revised CRS (rCRS, Andrews et al. 1999 Nature Genetics 23:147); "n" therefore represents a single nucleotide deletion at a position corresponding to nucleotide 3107 of SEQ ID NO:1 as provided herein.
gatcacaggtctatcaccctattaaccactcacgggagctctccatgcatttggtattttcgtctggggggtgtgcacgcgatagcattgcgagacgctggagccggagcaccctatgtcgcagtatctgtctttgattcctgcctcatcctattatttatcgcacctacgttcaatattacaggcgaacatacttactaaagtgtgttaattaattaatgcttgtaggacataataataacaattgaatgtctgcacagccactttccacacagacatcataacaaaaaatttccaccaaaccccccctcccccgcttctggccacagcacttaaacacatctctgccaaaccccaaaaacaaagaaccctaacaccagcctaaccagatttcaaattttatcttttggcggtatgcacttttaacagtcaccccccaactaacacattattttcccctcccactcccatactactaatctcatcaatacaacccccgcccatcctacccagcacacacacaccgctgctaaccccataccccgaaccaaccaaaccccaaagacaccccccacagtttatgtagcttacctcctcaaagcaatacactgaaaatgtttagacgggctcacatcaccccataaacaaataggtttggtcctagcctttctattagctcttagtaagattacacatgcaagcatccccattccagtgagttcaccctctaaatcaccacgatcaaaagggacaagcatcaagcacgcagcaatgcagctcaaaacgcttagcctagccacacccccacgggaaacagcagtgattaacctttagcaataaacgaaagtttaactaagctatactaaccccagggttggtcaatttcgtgccagccaccgcggtcacacgattaacccaagtcaatagaaaccggcgtaaagagtgttttagatcaccccctccccaataaagctaaaactcacctgagttgtaaaaaactccagttgacacaaaatagactacgaaagtggctttaacatatctgaacacacaatagctaagacccaaactgggattagataccccactatgcttagccctaaacctcaacagttaaatcaacaaaactgctcgccagaacactacgagccacagcttaaaactcaaaggacctggcggtgcttcatatccctctagaggagcctgttctgtaatcgataaaccccgatcaacctcaccacctcttgctcagcctatataccgccatcttcagcaaaccctgatgaaggctacaaagtaagcgcaagtacccacgtaaagacgttaggtcaaggtgtagcccatgaggtggcaagaaatgggctacattttctaccccagaaaactacgatagcccttatgaaacttaagggtcgaaggtggatttagcagtaaactgagagtagagtgcttagttgaacagggccctgaagcgcgtacacaccgcccgtcaccctcctcaagtatacttcaaaggacatttaactaaaacccctacgcatttatatagaggagacaagtcgtaacatggtaagtgtactggaaagtgcacttggacgaaccagagtgtagcttaacacaaagcacccaacttacacttaggagatttcaacttaacttgaccgctctgagctaaacctagccccaaacccactccaccttactaccaaacaaccttagccaaaccatttacccaaataaagtataggcgatagaaattgaaacctggcgcaatagatatagtaccgcaagggaaagatgaaaaattataaccaagcataatatagcaaggactaacccctataccttctgcataatgaattaactagaaataactttgcaaggagaaccaaagctaagacccccgaaaccagacgagctacctaagaacagctaaaagagcacacccgtctatgtagcaaaatagtgggaagatttataggtagaggcgacaaacctaccgagcctggtgatagctggttgtccaagatagaatcttagttcaactttaaatttgcccacagaaccctctaaatccccttgtaaatttaactgttagtccaaagaggaacagctctttggacactaggaaaaaaccttgtagagagagtaaaaaatttaacacccatagtaggcctaaaagcagccaccaattaagaaagcgttcaagctcaacacccactacctaaaaaatcccaaacatataactgaactcctcacacccaattggaccaatctatcaccctatagaagaactaatgttagtataagtaacatgaaaacattctcctccgcataagcctgcgtcagattaaaacactgaactgacaattaacagcccaatatctacaatcaaccaacaagtcattattaccctcactgtcaacccaacacaggcatgctcataaggaaaggttaaaaaaagtaaaaggaactcggcaaatcttaccccgcctgtttaccaaaaacatcacctctagcatcaccagtattagaggcaccgcctgcccagtgacacatgtttaacggccgcggtaccctaaccgtgcaaaggtagcataatcacttgttccttaaatagggacctgtatgaatggctccacgagggttcagctgtctcttacttttaaccagtgaaattgacctgcccgtgaagaggcgggcatgacacagcaagacgagaagaccctatggagctttaatttattaatgcaaacagtacctaacaaacccacaggtcctaaactaccaaacctgcattaaaaatttcggttggggcgacctcggagcagaacccaacctccgagcagtacatgctaagacttcaccagtcaaagcgaactactatactcaattgatccaataacttgaccaacggaacaagttaccctagggataacagcgcaatcctattctagagtccatatcaacaatagggtttacgacctcgatgttggatcaggacatcccgatggtgcagccgctattaaaggttcgtttgttcaacgattaaagtcctacgtgatctgagttcagaccggagtaatccaggtcggtttctatctacnttcaaattcctccctgtacgaaaggacaagagaaataaggcctacttcacaaagcgccttcccccgtaaatgatatcatctcaacttagtattatacccacacccacccaagaacagggtttgttaagatggcagagcccggtaatcgcataaaacttaaaactttacagtcagaggttcaattcctcttcttaacaacatacccatggccaacctcctactcctcattgtacccattctaatcgcaatggcattcctaatgcttaccgaacgaaaaattctaggctatatacaactacgcaaaggccccaacgttgtaggcccctacgggctactacaacccttcgctgacgccataaaactcttcaccaaagagcccctaaaacccgccacatctaccatcaccctctacatcaccgccccgaccttagctctcaccatcgctcttctactatgaacccccctccccatacccaaccccctggtcaacctcaacctaggcctcctatttattctagccacctctagcctagccgtttactcaatcctctgatcagggtgagcatcaaactcaaactacgccctgatcggcgcactgcgagcagtagcccaaacaatctcatatgaagtcaccctagccatcattctactatcaacattactaataagtggctcctttaacctctccacccttatcacaacacaagaacacctctgattactcctgccatcatgacccttggccataatatgatttatctccacactagcagagaccaaccgaacccccttcgaccttgccgaaggggagtccgaactagtctcaggcttcaacatcgaatacgccgcaggccccttcgccctattcttcatagccgaatacacaaacattattataataaacaccctcaccactacaatcttcctaggaacaacatatgacgcactctcccctgaactctacacaacatattttgtcaccaagaccctacttctaacctccctgttcttatgaattcgaacagcatacccccgattccgctacgaccaactcatacacctcctatgaaaaaacttcctaccactcaccctagcattacttatatgacatgtctccatacccattacaatctccagcattccccctcaaacctaagaaatatgtctgataaaagagttactttgatagagtaaataataggagcttaaacccccttatttctaggactatgagaatcgaacccatccctgagaatccaaaattctccgtgccacctatcacaccccatcctaaagtaaggtcagctaaataagctatcgggcccataccccgaaaatgttggttatacccttcccgtactaattaatcccctggcccaacccgtcatctactctaccatctttgcaggcacactcatcacagcgctaagctcgcactgattttttacctgagtaggcctagaaataaacatgctagcttttattccagttctaaccaaaaaaataaaccctcgttccacagaagctgccatcaagtatttcctcacgcaagcaaccgcatccataatccttctaatagctatcctcttcaacaatatactctccggacaatgaaccataaccaatactaccaatcaatactcatcattaataatcataatggctatagcaataaaactaggaatagccccctttcacttctgagtcccagaggttacccaaggcacccctctgacatccggcctgcttcttctcacatgacaaaaactagcccccatctcaatcatataccaaatctctccctcactagacgtaagccttctcctcactctctcaatcttatccatcatagcaggcagttgaggtggattaaaccaaacccagctacgcaaaatcttagcatactcctcaattacccacataggatgaataatagcagttctaccgtacaaccctaacataaccattcttaatttaactatttatattatcctaactactaccgcattcctactactcaacttaaactccagcaccacaaccctactactatctcgcacctgaaacaagctaacatgactaacacccttaattccatccaccctcctctccctaggaggcctgcccccgctaaccggctttttgcccaaatgggccattatcgaagaattcacaaaaaacaatagcctcatcatccccaccatcatagccaccatcaccctccttaacctctacttctacctacgcctaatctactccacctcaatcacactactccccatatctaacaacgtaaaaataaaatgacagtttgaacatacaaaacccaccccattcctccccacactcattgcccttaccacgctactcctacctatctccccttttatactaataatcttatagaaatttaggttaaatacagaccaagagccttcaaagccctcagtaagttgcaatacttaatttctgtaacagctaaggactgcaaaaccccactctgcatcaactgaacgcaaatcagccactttaattaagctaagcccttactagaccaatgggacttaaacccacaaacacttagttaacagctaagcaccctaatcaactggcttcaatctacttctcccgccgccgggaaaaaaggcgggagaagccccggcaggtttgaagctgcttcttcgaatttgcaattcaatatgaaaatcacctcggagctggtaaaaagaggcctaacccctgtctttagatttacagtccaatgcttcactcagccattttacctcacccccactgatgttcgccgaccgttgactattctctacaaaccacaaagacattggaacactatacctattattcggcgcatgagctggagtcctaggcacagctctaagcctccttattcgagccgagctgggccagccaggcaaccttctaggtaacgaccacatctacaacgttatcgtcacagcccatgcatttgtaataatcttcttcatagtaatacccatcataatcggaggctttggcaactgactagttcccctaataatcggtgcccccgatatggcgtttccccgcataaacaacataagcttctgactcttacctccctctctcctactcctgctcgcatctgctatagtggaggccggagcaggaacaggttgaacagtctaccctcccttagcagggaactactcccaccctggagcctccgtagacctaaccatcttctccttacacctagcaggtgtctcctctatcttaggggccatcaatttcatcacaacaattatcaatataaaaccccctgccataacccaataccaaacgcccctcttcgtctgatccgtcctaatcacagcagtcctacttctcctatctctcccagtcctagctgctggcatcactatactactaacagaccgcaacctcaacaccaccttcttcgaccccgccggaggaggagaccccattctataccaacacctattctgatttttcggtcaccctgaagtttatattcttatcctaccaggcttcggaataatctcccatattgtaacttactactccggaaaaaaagaaccatttggatacataggtatggtctgagctatgatatcaattggcttcctagggtttatcgtgtgagcacaccatatatttacagtaggaatagacgtagacacacgagcatatttcacctccgctaccataatcatcgctatccccaccggcgtcaaagtatttagctgactcgccacactccacggaagcaatatgaaatgatctgctgcagtgctctgagccctaggattcatctttcttttcaccgtaggtggcctgactggcattgtattagcaaactcatcactagacatcgtactacacgacacgtactacgttgtagctcacttccactatgtcctatcaataggagctgtatttgccatcataggaggcttcattcactgatttcccctattctcaggctacaccctagaccaaacctacgccaaaatccatttcactatcatattcatcggcgtaaatctaactttcttcccacaacactttctcggcctatccggaatgccccgacgttactcggactaccccgatgcatacaccacatgaaacatcctatcatctgtaggctcattcatttctctaacagcagtaatattaataattttcatgatttgagaagccttcgcttcgaagcgaaaagtcctaatagtagaagaaccctccataaacctggagtgactatatggatgccccccaccctaccacacattcgaagaacccgtatacataaaatctagacaaaaaaggaaggaatcgaaccccccaaagctggtttcaagccaaccccatggcctccatgactttttcaaaaaggtattagaaaaaccatttcataactttgtcaaagttaaattataggctaaatcctatatatcttaatggcacatgcagcgcaagtaggtctacaagacgctacttcccctatcatagaagagcttatcacctttcatgatcacgccctcataatcattttccttatctgcttcctagtcctgtatgcccttttcctaacactcacaacaaaactaactaatactaacatctcagacgctcaggaaatagaaaccgtctgaactatcctgcccgccatcatcctagtcctcatcgccctcccatccctacgcatcctttacataacagacgaggtcaacgatccctcccttaccatcaaatcaattggccaccaatggtactgaacctacgagtacaccgactacggcggactaatcttcaactcctacatacttcccccattattcctagaaccaggcgacctgggactccttgacgttgacaatcgagtagtactcccgattgaagcccccattcgtataataattacatcacaagacgtcttgcactcatgagctgtccccacattaggcttaaaaacagatgcaattcccggacgtctaaaccaaaccactttcaccgctacacgaccgggggtatactacggtcaatgctctgaaatctgtggagcaaaccacagtttcatgcccatcgtcctagaattaattcccctaaaaatctttgaaatagggcccgtatttaccctatagcaccccctctaccccctctagagcccactgtaaagctaacttagcattaaccttttaagttaaagattaagagaaccaacacctctttacagtgaaatgccccaactaaatactaccgtatggcccaccataattacccccatactccttacactattcctcatcacccaactaaaaatattaaacacaaactaccacctacctccctcaccaaagcccataaaaataaaaaattataacaaaccctgagaaccaaaatgaacgaaaatctgttcgcttcattcattgcccccacaatcctaggcctacccgccgcagtactgatcattctatttccccctctattgatccccacctccaaatatctcatcaacaaccgactaatcaccacccaacaatgactaatcaaactaacctcaaaacaaataataaccatacacaacactaaaggacgaacctgatctcttatactagtatccttaatcatttttattgccacaactaacctcctcggactcctgcctcactcatttacaccaaccacccaactatctataaacctagccatggccatccccttatgagcgggcgcagtgattataggctttcgctctaagattaaaaatgccctagcccacttcttaccacaaggcacacctacaccccttatccccatactagttattatcgaaaccatcagcctactcattcaaccaatagccctggccgtacgcctaaccgctaacattactgcaggccacctactcatgcacctaattggaagcgccaccctagcaatatcaaccattaaccttccctctacacttatcatcttcacaattctaattctactgactatcctagaaatcgctgtcgccttaatccaagcctacgttttcacacttctagtaagcctctacctgcacgacaacacataatgacccaccaatcacatgcctatcatatagtaaaacccagcccatgacccctaacaggggccctctcagccctcctaatgacctccggcctaaccatgtgatttcacttccactccataacgctcctcatactaggcctactaaccaacacactaaccatataccaatgatggcgcgatgtaacacgagaaagcacataccaaggccaccacacaccacctgtccaaaaaggccttcgatacgggataatcctatttattacctcagaagtttttttcttcgcaggatttttctgagccttttaccactccagcctagcccctaccccccaattaggagggcactggcccccaacaggcatcaccccgctaaatcccctagaagtcccactcctaaacacatccgtattactcgcatcaggagtatcaatcacctgagctcaccatagtctaatagaaaacaaccgaaaccaaataattcaagcactgcttattacaattttactgggtctctattttaccctcctacaagcctcagagtacttcgagtctcccttcaccatttccgacggcatctacggctcaacattttttgtagccacaggcttccacggacttcacgtcattattggctcaactttcctcactatctgcttcatccgccaactaatatttcactttacatccaaacatcactttggcttcgaagccgccgcctgatactggcattttgtagatgtggtttgactatttctgtatgtctccatctattgatgagggtcttactcttttagtataaatagtaccgttaacttccaattaactagttttgacaacattcaaaaaagagtaataaacttcgccttaattttaataatcaacaccctcctagccttactactaataattattacattttgactaccacaactcaacggctacatagaaaaatccaccccttacgagtgcggcttcgaccctatatcccccgcccgcgtccctttctccataaaattcttcttagtagctattaccttcttattatttgatctagaaattgccctccttttacccctaccatgagccctacaaacaactaacctgccactaatagttatgtcatccctcttattaatcatcatcctagccctaagtctggcctatgagtgactacaaaaaggattagactgaaccgaattggtatatagtttaaacaaaacgaatgatttcgactcattaaattatgataatcatatctaccaaatgcccctcatttacataaatattatactagcatttaccatctcacttctaggaatactagtatatcgctcacacctcatatcctccctactatgcctagaaggaataatactatcgctgttcattatagctactctcataaccctcaacacccactccctcttagccaatattgtgcctattgccatactagtctttgccgcctgcgaagcagcggtgggcctagccctactagtctcaatctccaacacatatggcctagactacgtacataacctaaacctactccaatgctaaaactaatcgtcccaacaattatattactaccactgacatgactttccaaaaaacacataatttgaatcaacacaaccacccacagcctaattattagcatcatccctctactattttttaaccaaatcaacaacaacctatttagctgttccccaaccttttcctccgaccccctaacaacccccctcctaatactaactacctgactcctacccctcacaatcatggcaagccaacgccacttatccagtgaaccactatcacgaaaaaaactctacctctctatactaatctccctacaaatctccttaattataacattcacagccacagaactaatcatattttatatcttcttcgaaaccacacttatccccaccttggctatcatcacccgatgaggcaaccagccagaacgcctgaacgcaggcacatacttcctattctacaccctagtaggctcccttcccctactcatcgcactgatttacactcacaacaccctaggctcactaaacattctactactcactctcactgcccaagaactatcaaactcctgagccaacaacttaatatgactagcttacacaatagcttttatagtaaagatacctctttacggactccacttatgactccctaaagcccatgtcgaagcccccatcgctgggtcaatagtacttgccgcagtactcttaaaactaggcggctatggtataatacgcctcacactcattctcaaccccctgacaaaacacatagcttaccccttccttgtactatccctatgaggcataattataacaagctccatctgcctacgacaaacagacctaaaatcgctcattgcatactcttcaatcagccacatagccctcgtagtaacagccattctcatccaaaccccctgaagcttcaccggcgcagtcattctcataatcgcccacggacttacatcctcattactattctgcctagcaaactcaaactacgaacgcactcacagtcgcatcataatcctctctcaaggacttcaaactctgctcccactaatagctttttgatgacttctagcaagcctcgctaacctcgccttaccccccactattaacctactgggagaactctctgtgctagtaaccacgttctcctgatcaaatatcactctcctacttacaggactcaacatactagtcacagccctatactccctctacatatttaccacaacacaatgaggctcactcacccaccacattaacaacataaaaccctcattcacacgagaaaacaccctcatgttcatacacctatcccccattctcctcctatccctcaaccccgacatcattaccgggttttcctcttgtaaatatagtttaaccaaaacatcagattgtgaatctgacaacagaggcttacgaccccttatttaccgagaaagctcacaagaactgctaactcatgcccccatgtctaacaacatggctttctcaacttttaaaggataacagctatccattggtcttaggccccaaaaattttggtgcaactccaaataaaagtaataaccatgcacactactataaccaccctaaccctgacttccctaattccccccatccttaccaccctcgttaaccctaacaaaaaaaactcatacccccattatgtaaaatccattgtcgcatccacctttattatcagtctcttccccacaacaatattcatgtgcctagaccaagaagttattatctcgaactgacactgagccacaacccaaacaacccagctctccctaagcttcaaactagactacttctccataatattcatccctgtagcattgttcgttacatggtccatcatagaattctcactgtgatatataaactcagacccaaacattaatcagttcttcaaatatctactcatcttcctaattaccatactaatcttagttaccgctaacaacctattccaactgttcatcggctgagagggcgtaggaattatatccttcttgctcatcagttgatgatacgcccgagcagatgccaacacagcagccattcaagcaatcctatacaaccgtatcggcgatatcggtttcatcctcgccttagcatgatttatcctacactccaactcatgagacccacaacaaatagcccttctaaacgctaatccaagcctcaccccactactaggcctcctcctagcagcagcaggcaaatcagcccaattaggtctccacccctgactcccctcagccatagaaggccccaccccagtctcagccctactccactcaagcactatagttgtagcaggaatcttcttactcatccgcttccaccccctagcagaaaatagcccactaatccaaactctaacactatgcttaggcgctatcaccactctgttcgcagcagtctgcgcccttacacaaaatgacatcaaaaaaatcgtagccttctccacttcaagtcaactaggactcataatagttacaatcggcatcaaccaaccacacctagcattcctgcacatctgtacccacgccttcttcaaagccatactatttatgtgctccggatccatcatccacaaccttaacaatgaacaagatattcgaaaaataggaggactactcaaaaccatacctctcacttcaacctccctcaccattggcagcctagcattagcaggaatacctttcctcacaggtttctactccaaagaccacatcatcgaaaccgcaaacatatcatacacaaacgcctgagccctatctattactctcatcgctacctccctgacaagcgcctatagcactcgaataattcttctcaccctaacaggtcaacctcgcttccccacccttactaacattaacgaaaataaccccaccctactaaaccccattaaacgcctggcagccggaagcctattcgcaggatttctcattactaacaacatttcccccgcatcccccttccaaacaacaatccccctctacctaaaactcacagccctcgctgtcactttcctaggacttctaacagccctagacctcaactacctaaccaacaaacttaaaataaaatccccactatgcacattttatttctccaacatactcggattctaccctagcatcacacaccgcacaatcccctatctaggccttcttacgagccaaaacctgcccctactcctcctagacctaacctgactagaaaagctattacctaaaacaatttcacagcaccaaatctccacctccatcatcacctcaacccaaaaaggcataattaaactttacttcctctctttcttcttcccactcatcctaaccctactcctaatcacataacctattcccccgagcaatctcaattacaatatatacaccaacaaacaatgttcaaccagtaactactactaatcaacgcccatagtcatacaaagcccccgcaccaataggatcctcccgaatcaaccctgacccctctccttcataaattattcagcttcctacactattaaagtttaccacaaccaccaccccatcatactctttcacccacagcaccaatcctacctccatcgctaaccccactaaaacactcaccaagacctcaacccctgacccccatgcctcaggatactcctcaatagccatcgctgtagtatatccaaagacaaccatcattccccctaaataaattaaaaaaactattaaacccatataacctcccccaaaattcagaataataacacacccgaccacaccgctaacaatcaatactaaacccccataaataggagaaggcttagaagaaaaccccacaaaccccattactaaacccacactcaacagaaacaaagcatacatcattattctcgcacggactacaaccacgaccaatgatatgaaaaaccatcgttgtatttcaactacaagaacaccaatgaccccaatacgcaaaattaaccccctaataaaattaattaaccactcattcatcgacctccccaccccatccaacatctccgcatgatgaaacttcggctcactccttggcgcctgcctgatcctccaaatcaccacaggactattcctagccatacactactcaccagacgcctcaaccgccttttcatcaatcgcccacatcactcgagacgtaaattatggctgaatcatccgctaccttcacgccaatggcgcctcaatattctttatctgcctcttcctacacatcgggcgaggcctatattacggatcatttctctactcagaaacctgaaacatcggcattatcctcctgcttgcaactatagcaacagccttcataggctatgtcctcccgtgaggccaaatatcattctgaggggccacagtaattacaaacttactatccgccatcccatacattgggacagacctagttcaatgaatctgaggaggctactcagtagacagtcccaccctcacacgattctttacctttcacttcatcttgcccttcattattgcagccctagcagcactccacctcctattcttgcacgaaacgggatcaaacaaccccctaggaatcacctcccattccgataaaatcaccttccacccttactacacaatcaaagacgccctcggcttacttctcttcattctctccttaatgacattaacactattctcaccagacctcctaggcgacccagacaattataccctagccaaccccttaaacacccctccccacatcaagcccgaatgatatttcctattcgcctacacaattctccgatccgtccctaacaagctaggaggcgtccttgccctattactatccatcctcatcctagcaataatccccatcctccatatatccaaacaacaaagcataatatttcgcccactaagccaatcactttattgactcctagccgcagacctcctcattctaacctgaatcggaggacaaccagtaagctacccttttaccatcattggacaagtagcatccgtactatacttcacaacaatcctaatcctaataccaactatctccctaattgaaaacaaaatactcaaatgggcctgtccttgtagtataaactaatacaccagtcttgtaaaccgaagatgaaaacctttttccaaggacaaatcagagaaaaagtctttaactccaccattagcacccaaagctaagattctaatttaaactattctctgttctttcatggggaagcagatttgggtaccacccaagtattgactcacccatcaacaaccgctatgtatttcgtacattactgccagccaccatgaatattgcacggtaccataaatacttgaccacctgtagtacataaaaacccaatccacatcaaaaccccctccccatgcttacaagcaagtacagcaatcaaccctcaactatcacacatcaactgcaactccaaagccacccctcacccactaggataccaacaaacctacccatctttaacagcacatagtacataaagccatttaccgtacatagcacattacagtcaaatcccttctcgtccccatggatgacccccctcagataggggtcccttgaccaccatcctccgtgaaatcaatatcccgcacaagagtgctactctcctcgctccgggcccataacacttgggggtagctaaagtgaactgtatccgacatctggttcctacttcagggccataaagcctaaatagcccacacgttccccttaaataagacatcacgatg

SEQ ID NO: 69 - DNA, 16572 bp, Homo sapiens mitochondrial
  3110: "n" refers to a nucleotide at position 3107 of the Cambridge Reference Sequence (CRS, Anderson et al. 1981 Nature 290:457-465), later determined to be absent from the human mtDNA sequence according to the revised CRS (rCRS, Andrews et al. 1999 Nature Genetics 23:147); "n" therefore represents a single nucleotide deletion at a position corresponding to nucleotide 3107 of SEQ ID NO:1 as provided herein.
gatcacaggtctatcaccctattaaccactcacgggagctctccatgcatttggtattttcgtctggggggtatgcacgcgatagcattgcgagacgctggagccggagcaccctatgtcgcagtatctgtctttgattcctgcctcatcctattatttatcgcacctacgttcaatattacaggcgaacatacttactaaagtgtgttaattaattaatgcttgtaggacataataacaacaattgaatgtctgcacagccgctttccacacagacatcataacaaaaaatttccaccaaaccccccctccccccccgcttctggccacagcacttaaacacatctctgccaaaccccaaaaacaaagaaccctaacaccagcctaaccagatttcaaattttatcttttggcggtatgcacttttaacagtcaccccccaactaacacattattttcccctcccactcccatactactaatctcatcaatacaacccccgcccatcctacccagcacacacacaccgctgctaaccccataccccgaaccaaccaaaccccaaagacaccccccacagtttatgtagcttacctcctcaaagcaatacactgaaaatgtttagacgggctcacatcaccccataaacaaataggtttggtcctagcctttctattagctcttagtaagattacacatgcaagcatccccgttccagtgagttcaccctctaaatcaccacgatcaaaagggacaagcatcaagcacgcagcaatgcagctcaaaacgcttagcctagccacacccccacgggaaacagcagtgattaacctttagcaataaacgaaagtttaactaagctatactaaccccagggttggtcaatttcgtgccagccaccgcggtcacacgattaacccaagtcaatagaagccggcgtaaagagtgttttagatcaccccctccccaataaagctaaaactcacctgagttgtaaaaaactccagttgacacaaaatagactacgaaagtggctttaacatatctgaacacacaatagctaagacccaaactgggattagataccccactatgcttagccctaaacctcaacagttaaatcaacaaaactgctcgccagaacactacgagccacagcttaaaactcaaaggacctggcggtgcttcatatccctctagaggagcctgttctgtaatcgataaaccccgatcaacctcaccacctcttgctcagcctatataccgccatcttcagcaaaccctgatgaaggctacaaagtaagcgcaagtacccacgtaaagacgttaggtcaaggtgtagcccatgaggtggcaagaaatgggctacattttctaccccagaaaactacgatagcccttatgaaacttaagggtcgaaggtggatttagcagtaaactgagagtagagtgcttagttgaacagggccctgaagcgcgtacacaccgcccgtcaccctcctcaagtatacttcaaaggacatttaactaaaacccctacgcatttatatagaggagacaagtcgtaacatggtaagtgtactggaaagtgcacttggacgaaccagagtgtagcttaacacaaagcacccaacttacacttaggagatttcaacttaacttgaccgctctgagctaaacctagccccaaacccactccaccttactaccagacaaccttagccaaaccatttacccaaataaagtataggcgatagaaattgaaacctggcgcaatagatatagtaccgcaagggaaagatgaaaaattataaccaagcataatatagcaaggactaacccctataccttctgcataatgaattaactagaaataactttgcaaggagagccaaagctaagacccccgaaaccagacgagctacctaagaacagctaaaagagcacacccgtctatgtagcaaaatagtgggaagatttataggtagaggcgacaaacctaccgagcctggtgatagctggttgtccaagatagaatcttagttcaactttaaatttgcccacagaaccctctaaatccccttgtaaatttaactgttagtccaaagaggaacagctctttggacactaggaaaaaaccttgtagagagagtaaaaaatttaacacccatagtaggcctaaaagcagccaccaattaagaaagcgttcaagctcaacacccactacctaaaaaatcccaaacatataactgaactcctcacacccaattggaccaatctatcaccctatagaagaactaatgttagtataagtaacatgaaaacattctcctccgcataagcctgcgtcagattaaaacactgaactgacaattaacagcccaatatctacaatcaaccaacaagtcattattaccctcactgtcaacccaacacaggcatgctcataaggaaaggttaaaaaaagtaaaaggaactcggcaaatcttaccccgcctgtttaccaaaaacatcacctctagcatcaccagtattagaggcaccgcctgcccagtgacacatgtttaacggccgcggtaccctaaccgtgcaaaggtagcataatcacttgttccttaaatagggacctgtatgaatggctccacgagggttcagctgtctcttacttttaaccagtgaaattgacctgcccgtgaagaggcgggcataacacagcaagacgagaagaccctatggagctttaatttattaatgcaaacagtacctaacaaacccacaggtcctaaactaccaaacctgcattaaaaatttcggttggggcgacctcggagcagaacccaacctccgagcagtacatgctaagacttcaccagtcaaagcgaactactatactcaattgatccaataacttgaccaacggaacaagttaccctagggataacagcgcaatcctattctagagtccatatcaacaatagggtttacgacctcgatgttggatcaggacatcccgatggtgcagccgctattaaaggttcgtttgttcaacgattaaagtcctacgtgatctgagttcagaccggagtaatccaggtcggtttctatctacnttcaaattcctccctgtacgaaaggacaagagaaataaggcctacttcacaaagcgccttcccccgtaaatgatatcatctcaacttagtattatacccacacccacccaagaacagggtttgttaagatggcagagcccggtaatcgcataaaacttaaaactttacagtcagaggttcaattcctcttcttaacaacatacccatggccaacctcctactcctcattgtacccattctaatcgcaatggcattcctaatgcttaccgaacgaaaaattctaggctatatacaactacgcaaaggccccaacgttgtaggcccctacgggctactacaacccttcgctgacgccataaaactcttcaccaaagagcccctaaaacccgccacatctaccatcaccctctacatcaccgccccgaccttagctctcaccatcgctcttctactatgaacccccctccccatacccaaccccctggtcaacctcaacctaggcctcctatttattctagccacctctagcctagccgtttactcaatcctctgatcagggtgagcatcaaactcaaactacgccctgatcggcgcactgcgagcagtagcccaaacaatctcatatgaagtcaccctagccatcattctactatcaacattactaataagtggctcctttaacctctccacccttatcacaacacaagaacacctctgattactcctgccatcatgacccttggccataatatgatttatctccacactagcagagaccaaccgaacccccttcgaccttgccgaaggagagtccgaactagtctcaggcttcaacatcgaatacgccgcaggccccttcgccctattcttcatagccgaatacacaaacattattataataaacaccctcaccactacaatcttcctaggaacaacatatgacgcactctcccctgaactctacacaacatattttgtcaccaagaccctacttctaacctccctgttcttatgaattcgaacagcatacccccgattccgctacgaccaactcatacacctcctatgaaaaaacttcctaccactcaccctagcattacttatatgatatgtctccatacccattacaatctccagcattccccctcaaacctaagaaatatgtctgataaaagagttactttgatagagtaaataataggagcttaaacccccttatttctaggactatgagaatcgaacccatccctgagaatccaaaattctccgtgccacctatcacaccccatcctaaagtaaggtcagctaaataagctatcgggcccataccccgaaaatgttggttatacccttcccgtactaattaatcccctggcccaacccgtcatctactctaccatctttgcaggcacactcatcacagcgctaagctcgcactgattttttacctgagtaggcctagaaataaacatgctagcttttattccagttctaaccaaaaaaataaaccctcgttccacagaagctgccatcaagtatttcctcacgcaagcaaccgcatccataatccttctaatagctatcctcttcaacaatatactctccggacaatgaaccatgaccaatactaccaatcaatactcatcattaataatcataatggctatagcaataaaactaggaatagccccctttcacttctgagtcccagaggttacccaaggcacccctctgacatccggcctgcttcttctcacatgacaaaaactagcccccatctcaatcatataccaaatctctccctcactaaacgtaagccttctcctcactctctcaatcttatccatcatagcaggcagttgaggtggattaaaccaaacccaactacgcaaaatcttagcatactcctcaattacccacataggatgaataatagcagttctaccgtacaaccctaacataaccattcttaatttaactatttatattatcctaactactaccgcattcctactactcaacttaaactccagcaccacgaccctactactatctcgcacctgaaacaagctaacatgactaacacccttaattccatccaccctcctctccctaggagggctgcccccgctaaccggctttttgcccaaatgggccattatcgaagaattcacaaaaaacaatagcctcatcatccccaccatcatagccaccatcaccctccttaacctctacttctacctacgcctaatctactccacctcaatcacactactccccatatctaacaacgtaaaaataaaatgacagtttgaacatacaaaacccaccccattcctccccacactcatcacccttaccacgctactcctacctatctccccttttatactaataatcttatagaaatttaggttaaatacagaccaagagccttcaaagccctcagtaagttgcaatacttaatttctgtaacagctaaggactgcaaaaccccactctgcatcaactgaacgcaaatcagccactttaattaagctaagcccttactagaccaatgggacttaaacccacaaacacttagttaacagctaagcaccctaatcaactggcttcaatctacttctcccgccgccgggaaaaaaggcgggagaagccccggcaggtttgaagctgcttcttcgaatttgcaattcaatatgaaaatcacctcggagctggtaaaaagaggcctaacccctgtctttagatttacagtccaatgcttcactcagccattttacctcacccccactgatgttcgccgaccgttgactattctctacaaaccacaaagacattggaacactatacctattattcggcgcatgagctggagtcctaggcacagctctaagcctccttattcgagccgagctgggccagccaggcaaccttctaggtaacgaccacatctacaacgttatcgtcacagcccatgcatttgtaataatcttcttcatagtaatacccatcataatcggaggctttggcaactgactagttcccctaataatcggtgcccccgatatggcgtttccccgcataaacaacataagcttctgactcttacctccctctctcctactcctgctcgcatctgctatagtggaggccggagcaggaacaggttgaacagtctaccctcccttagcagggaactactcccaccctggagcctccgtagacctaaccatcttctccttacacctagcaggtgtctcctctatcttaggggccatcaatttcatcacaacaattatcaatataaaaccccctgccataacccaataccaaacgcccctcttcgtctgatccgtcctaatcacagcagtcctacttctcctatctctcccagtcctagctgctggcatcactatactactaacagaccgcaacctcaacaccaccttcttcgaccccgccggaggaggagaccccattctataccaacacctattctgatttttcggtcaccctgaagtttatattcttatcctaccaggcttcggaataatctcccatattgtaacttactactccggaaaaaaagaaccatttggatacataggtatggtctgagctatgatatcaattggcttcctagggtttatcgtgtgagcacaccatatatttacagtaggaatagacgtagacacacgagcatatttcacctccgctaccataatcatcgctatccccaccggcgtcaaagtatttagctgactcgccacactccacggaagcaatatgaaatgatctgctgcagtgctctgagccctaggattcatctttcttttcaccgtaggtggcctgactggcattgtattagcaaactcatcactagacatcgtactacacgacacgtactacgttgtagcccacttccactatgtcctatcaataggagctgtatttgccatcataggaggcttcattcactgatttcccctattctcaggctacaccctagaccaaacctacgccaaaatccatttcactatcatattcatcggcgtaaatctaactttcttcccacaacactttctcggcctatccggaatgccccgacgttactcggactaccccgatgcatacaccacatgaaacatcctatcatctgtaggctcattcatttctctaacagcagtaatattaataattttcatgatttgagaggccttcgcttcgaagcgaaaagtcctaatagtagaagaaccctccataaacctggagtgactatatggatgccccccaccctaccacacattcgaagaacccgtatacataaaatctagacaaaaaaggaaggaatcgaaccccccaaagctggtttcaagccaaccccatggcctccatgactttttcaaaaaggtattagaaaaaccatttcataactttgtcaaagttaaattataggctaaatcctatatatcttaatggcacatgcagcgcaagtaggtctacaagacgctacttcccctatcatagaagagcttatcacctttcatgatcacgccctcataatcattttccttatctgcttcctagtcctgtatgcccttttcctaacactcacaacaaaactaactaatactaacatctcagacgctcaggaaatagaaaccgtctgaactatcctgcccgccatcatcctagtcctcatcgccctcccatccctacgcatcctttacataacagacgaggtcaacgatccctcccttaccatcaaatcaattggccaccaatggtactgaacctacgagtacaccgactacggcggactaatcttcaactcctacatacttcccccattattcctagaaccaggcgacctgcgactccttgacgttgacaatcgagtagtactcccgattgaagcccccattcgtataataattacatcacaagacgtcttgcactcatgagctgtccccacattaggcttaaaaacagatgcaattcccggacgtctaaaccaaaccactttcaccgctacacgaccgggggtatactacggtcaatgctctgaaatctgtggagcaaaccacagtttcatgcccatcgtcctagaattaattcccctaaaaatctttgaaatagggcccgtatttaccctatagcaccccctctaccccctctagagcccactgtaaagctaacttagcattaaccttttaagttaaagattaagagaaccaacacctctttacagtgaaatgccccaactaaatactaccgtatggcccaccataattacccccatactccttacactattcctcatcacccaactaaaaatattaaacacaaactaccacctacctccctcaccaaagcccataaaaataaaaaattataacaaaccctgagaaccaaaatgaacgaaaatctgttcgcttcattcattgcccccacaatcctaggcctacccgccgcagtactgatcattctatttccccctctattgatccccacctccaaatatctcatcaacaaccgactaatcaccacccaacaatgactaatcaaactaacctcaaaacaaatgataaccatacacaacactaaaggacgaacctgatctcttatactagtatccttaatcatttttattgccacaactaacctcctcggactcctgcctcactcatttacaccaaccacccaactatctataaacctagccatggccatccccttatgagcgggcgcagtgattataggctttcgctctaagattaaaaatgccctagcccacttcttaccacaaggcacacctacaccccttatccccatactagttattatcgaaaccatcagcctactcattcaaccaatagccctggccgtacgcctaaccgctaacattactgcaggccacctactcatgcacctaattggaagcgccaccctagcaatatcaaccattaaccttccctctacacttatcatcttcacaattctaattctactgactatcctagaaatcgctgtcgccttaatccaagcctacgttttcacacttctagtaagcctctacctgcacgacaacacataatgacccaccaatcacatgcctatcatatagtaaaacccagcccatgacccctaacaggggccctctcagccctcctaatgacctccggcctagccatgtgatttcacttccactccataacgctcctcatactaggcctactaaccaacacactgaccatataccaatgatgacgcgatgtaacacgagaaagcacataccaaggccaccacacaccacctgtccaaaaaggccttcgatacgggataatcctatttattacctcagaagtttttttcttcgcaggatttttctgagccttttaccactccagcctagcccctaccccccaattaggagggcactggcccccaacaggcatcaccccgctaaatcccctagaagtcccactcctaaacacatccgtattactcgcatcaggagtatcaatcacctgagctcaccatagtctaatagaaaacaaccgaaaccaaataattcaagcactgcttattacaattttactgggtctctattttaccctcctacaagcctcagagtacttcgagtctcccttcaccatttccgacggcatctacggctcaacattttttgtagccacaggcttccacggacttcacgtcattattggctcaactttcctcactatctgcttcatccgccaactaatatttcactttacatccaaacatcactttggcttcgaagccgccgcctgatactggcattttgtagatgtggtttgactatttctgtatgtctccatctattgatgagggtcttactcttttagtataaatagtaccgttaacttccaattaactagttttgacaacattcaaaaaagagtaataaacttcgccttaattttaataatcaacaccctcctagccttactactaataattattacattttgactaccacaactcaacggctacatagaaaaatccaccccttacgagtgcggcttcgaccctatatcccccgcccgcgtccctttctccataaaattcttcttagtagctattaccttcttattatttgatctagaaattgccctccttttacccctaccatgagccctacaaacaactaacctgccactaatagttatgtcatccctcttattaatcatcatcctagccctaagtctggcctatgagtgactacaaaaaggattagactgaaccgaattggtatatagtttaaacaaaacgaatgatttcgactcattaaattatgataatcatatttaccaaatgcccctcatttacataaatattatactagcatttaccatctcacttctaggaatactagtatatcgctcacacctcatatcctccctactatgcctagaaggaataatactatcgctgttcattatagctactctcataaccctcaacacccactccctcttagccaatattgtgcctattgccatactagtctttgccgcctgcgaagcagcggtgggcctagccctactagtctcaatctccaacacatatggcctagactacgtacataacctaaacctactccaatgctaaaactaatcgtcccaacaattatattactaccactgacatgactttccaaaaaacacataatttgaatcaacacaaccacccacagcctaattattagcatcatccctctactattttttaaccaaatcaacaacaacctatttagctgttccccaaccttttcctccgaccccctaacaacccccctcctaatactaactacctgactcctacccctcacaatcatggcaagccaacgccacttatccagtgaaccactatcacgaaaaaaactctacctctctatactaatctccctacaaatctccttaattataacattcacagccacagaactaatcatattttatatcttcttcgaaaccacacttatccccaccttggctatcatcacccgatgaggcaaccagccagaacgcctgaacgcaggcacatacttcctattctacaccctagtaggctcccttcccctactcatcgcactaacttacactcacaacaccctaggctcactaaacattctactactcactctcactgcccaagaactatcaaactcctgagccaacaacttaatatgactagcttacacaatagcttttatagtaaagatacctctttacggactccacttatgactccctaaagcccatgtcgaagcccccatcgctgggtcaatagtacttgccgcagtactcttaaaactaggcggctatggtataatacgcctcacactcattctcaaccccctgacaaaacacatagcctaccccttccttgtactatccctatgaggcataattataacaagctccatctgcctacgacaaacagacctaaaatcactcattgcatactcttcaatcagccacatagccctcgtagtaacagccattctcatccaaaccccctgaagcttcaccggcgcagtcattctcataatcgcccacgggcttacatcctcattactattctgcctagcaaactcaaactacgaacgcactcacagtcgcatcataatcctctctcaaggacttcaaactctactcccactaatagctttttgatgacttctagcaagcctcgctaacctcgccttaccccccactattaacctactgggagaactctctgtgctagtaaccacgttctcctgatcaaatatcactctcctacttacaggactcaacatactagtcacagccctatactccctctacatatttaccacaacacaatggggctcactcacccaccacattaacaacataaaaccctcattcacacgagaaaacaccctcatgttcatacacctatcccccattctcctcctatccctcaaccccgacatcattaccgggttttcctcttgtaaatatagtttaaccaaaacatcagattgtgaatctgacaacagaggcttacgaccccttatttaccgagaaagctcacaagaactgctaactcatgcccccatgtctaacaacatggctttctcaacttttaaaggataacagctatccattggtcttaggccccaaaaattttggtgcaactccaaataaaagtaataaccatgcacactactataaccaccctaaccctgacttccctaattccccccatccttaccaccctcgttaaccctaacaaaaaaaactcatacccccattatgtaaaatccattgtcgcatccacctttattatcagtctcttccccacaacaatattcatgtgcctagaccaagaagttattatctcgaactgacactgagccacaacccaaacaacccagctctccctaagcttcaaactagactacttctccataatattcatccctgtagcattgttcgttacatggtccatcatagaattctcactgtgatatataaactcagacccaaacattaatcagttcttcaaatatctactcatcttcctaattaccatactaatcttagttaccgctaacaacctattccaactgttcatcggctgagagggcgtaggaattatatccttcttgctcatcagttgatgatacgcccgagcagatgccaacacagcagccattcaagcaatcctatacaaccgtatcggcgatatcggtttcatcctcgccttagcatgatttatcctacactccaactcatgagacccacaacaaatagcccttctaaacgctaatccaagcctcaccccactactaggcctcctcctagcagcagcaggcaaatcagcccaattaggtctccacccctgactcccctcagccatagaaggccccaccccagtctcagccctactccactcaagcactatagttgtagcaggaatcttcttactcatccgcttccaccccctagcagaaaatagcccactaatccaaactctaacactatgcttaggcgctatcaccactctgttcgcagcagtctgcgcccttacacaaaatgacatcaaaaaaatcgtagccttctccacttcaagtcaactaggactcataatagttacaatcggcatcaaccaaccacacctagcattcctgcacatctgtacccacgccttcttcaaagccatactatttatgtgctccgggtccatcatccacaaccttaacaatgaacaagatattcgaaaaataggaggactactcaaaaccatacctctcacttcaacctccctcaccattggcagcctagcattagcaggaatacctttcctcacaggtttctactccaaagaccacatcatcgaaaccgcaaacatatcatacacaaacgcctgagccctatctattactctcatcgctacctccctgacaagcgcctatagcactcgaataattcttctcaccctaacaggtcaacctcgcttccccacccttactaacattaacgaaaataaccccaccctactaaaccccattaaacgcctggcagccggaagcctattcgcaggatttctcattactaacaacatttcccccgcatcccccttccaaacaacaatccccctctacctaaaactcacagccctcgctgtcactttcctaggacttctaacagccctagacctcaactacctaaccaacaaacttaaaataaaatccccactatgcacattttatttctccaacatactcggattctaccctagcatcacacaccgcacaatcccctatctaggccttcttacgagccaaaacctgcccctactcctcctagacctaacctgactagaaaagctattacctaaaacaatttcacagcaccaaatctccacctccatcatcacctcaacccaaaaaggcataattaaactttacttcctctctttcttcttcccactcatcctaaccctactcctaatcacataacctattcccccgagcaatctcaattacaatatatacaccaacaaacaatgttcaaccagtaactactactaatcaacgcccataatcatacaaagcccccgcaccaataggatcctcccgaatcaaccctgacccctctccttcataaattattcagcttcctacactattaaagtttaccacaaccaccaccccatcatactctttcacccacagcaccaatcctacctccatcgctaaccccactaaaacactcaccaagacctcaacccctgacccccatgcctcaggatactcctcaatagccatcgctgtagtatatccaaagacaaccatcattccccctaaataaattaaaaaaactattaaacccatataacctcccccaaaattcagaataataacacacccgaccacaccgctaacaatcaatactaaacccccataaataggagaaggcttagaagaaaaccccacaaaccccattactaaacccacactcaacagaaacaaagcatacatcattattctcgcacggactacaaccacgaccaatgatatgaaaaaccatcgttgtatttcaactacaagaacaccaatgaccccaatacgcaaaactaaccccctaataaaattaattaaccactcattcatcgacctccccaccccatccaacatctccgcatgatgaaacttcggctcactccttggcgcctgcctgatcctccaaatcaccacaggactattcctagccatgcactactcaccagacgcctcaaccgccttttcatcaatcgcccacatcactcgagacgtaaattatggctgaatcatccgctaccttcacgccaatggcgcctcaatattctttatctgcctcttcctacacatcgggcgaggcctatattacggatcatttctctactcagaaacctgaaacatcggcattatcctcctgcttgcaactatagcaacagccttcataggctatgtcctcccgtgaggccaaatatcattctgaggggccacagtaattacaaacttactatccgccatcccatacattgggacagacctagttcaatgaatctgaggaggctactcagtagacagtcccaccctcacacgattctttacctttcacttcatcttgcccttcattattgcagccctagcagcactccacctcctattcttgcacgaaacgggatcaaacaaccccctaggaatcacctcccattccgataaaatcaccttccacccttactacacaatcaaagacgccctcggcttacttctcttccttctctccttaatgacattaacactattctcaccagacctcctaggcgacccagacaattataccctagccaaccccttaaacacccctccccacatcaagcccgaatgatatttcctattcgcctacacaattctccgatccgtccctaacaaactaggaggcgtccttgccctattactatccatcctcatcctagcaataatccccatcctccatatatccaaacaacaaagcataatatttcgcccactaagccaatcactttattgactcctagccgcagacctcctcattctaacctgaatcggaggacaaccagtaagctacccttttaccatcattggacaagtagcatccgtactatacttcacaacaatcctaatcctaataccaactatctccctaattgaaaacaaaatactcaaatgggcctgtccttgtagtataaactaatacaccagtcttgtaaaccggagatgaaaacctttttccaaggacaaatcagagaaaaagtctttaactccaccattagcacccaaagctaagattctaatttaaactattctctgttctttcatggggaagcagatttgggtaccacccaagtattgactcacccatcaacaaccgctatgtatttcgtacattactgccagccaccatgaatattgtacggtaccataaatacttgaccacctgtagtacataaaaacccaatccacatcaaaaccccctccccatgcttacaagcaagtacagcaatcaaccctcaactatcacacatcaactgcaactccaaagccacccctcacccactaggataccaacaaacctacccacccttaacagtacatagcacataaagccatttaccgtacatagcacattacagtcaaatcccttctcgcccccatggatgacccccctcagataggggtcccttgaccaccatcctccgtgaaatcaatatcccgcacaagagtgctactctcctcgctccgggcccataacacttgggggtagctaaggtgaactgtatccgacatctggttcctacttcagggtcataaagcctaaatagcccacacgttccccttaaataagacatcacgatg

SEQ ID NO: 70 - DNA, 16571 bp, Homo sapiens mitochondrial
  3109: "n" refers to a nucleotide at position 3107 of the Cambridge Reference Sequence (CRS, Anderson et al. 1981 Nature 290:457-465), later determined to be absent from the human mtDNA sequence according to the revised CRS (rCRS, Andrews et al. 1999 Nature Genetics 23:147); "n" therefore represents a single nucleotide deletion at a position corresponding to nucleotide 3107 of SEQ ID NO:1 as provided herein.
gatcacaggtctatcaccctattaaccactcacgggagctctccatgcatttggtattttcgtctggggggtatgcacgcgatagcattgcgagacgctggagccggagcaccctatgtcgcagtatctgtctttgattcctgcctcatcctattatttatcgcacctacgttcaatattacaggcgaacatacttactaaagtgtgttaattaattaatgcttgtaggacataataacaacaattgaatgtctgcacagccgctttccacacagacatcataacaaaaaatttccaccaaaccccccctcccccccgcttctggccacagcacttaaacacatctctgccaaaccccaaaaacaaagaaccctaacaccagcctaaccagatttcaaattttatcttttggcggtatgcacttttaacagtcaccccccaactaacacattattttcccctcccactcccatactactaatctcatcaatacaacccccgcccatcctacccagcacacacacaccgctgctaaccccataccccgaaccaaccaaaccccaaagacaccccccacagtttatgtagcttacctcctcaaagcaatacactgaaaatgtttagacgggctcacatcaccccataaacaaataggtttggtcctagcctttctattagctcttagtaagattacacatgcaagcatccccgttccagtgagttcaccctctaaatcaccacgatcaaaagggacaagcatcaagcacgcagcaatgcagctcaaaacgcttagcctagccacacccccacgggaaacagcagtgattaacctttagcaataaacgaaagtttaactaagctatactaaccccagggttggtcaatttcgtgccagccaccgcggtcacacgattaacccaagtcaatagaagccggcgtaaagagtgttttagatcaccccctccccaataaagctaaaactcacctgagttgtaaaaaactccagttgacacaaaatagactacgaaagtggctttaacatatctgaacacacaatagctaagacccaaactgggattagataccccactatgcttagccctaaacctcaacagttaaatcaacaaaactgctcgccagaacactacgagccacagcttaaaactcaaaggacctggcggtgcttcatatccctctagaggagcctgttctgtaatcgataaaccccgatcaacctcaccacctcttgctcagcctatataccgccatcttcagcaaaccctgatgaaggctacaaagtaagcgcaagtacccacgtaaagacgttaggtcaaggtgtagcccatgaggtggcaagaaatgggctacattttctaccccagaaaactacgatagcccttatgaaacttaagggtcgaaggtggatttagcagtaaactgagagtagagtgcttagttgaacagggccctgaagcgcgtacacaccgcccgtcaccctcctcaagtatacttcaaaggacatttaactaaaacccctacgcatttatatagaggagacaagtcgtaacatggtaagtgtactggaaagtgcacttggacgaaccagagtgtagcttaacacaaagcacccaacttacacttaggagatttcaacttaacttgaccgctctgagctaaacctagccccaaacccactccaccttactaccagacaaccttagccaaaccatttacccaaataaagtataggcgatagaaattgaaacctggcgcaatagatatagtaccgcaagggaaagatgaaaaattataaccaagcataatatagcaaggactaacccctataccttctgcataatgaattaactagaaataactttgcaaggagagccaaagctaagacccccgaaaccagacgagctacctaagaacagctaaaagagcacacccgtctatgtagcaaaatagtgggaagatttataggtagaggcgacaaacctaccgagcctggtgatagctggttgtccaagatagaatcttagttcaactttaaatttgcccacagaaccctctaaatccccttgtaaatttaactgttagtccaaagaggaacagctctttggacactaggaaaaaaccttgtagagagagtaaaaaatttaacacccatagtaggcctaaaagcagccaccaattaagaaagcgttcaagctcaacacccactacctaaaaaatcccaaacatataactgaactcctcacacccaattggaccaatctatcaccctatagaagaactaatgttagtataagtaacatgaaaacattctcctccgcataagcctgcgtcagattaaaacactgaactgacaattaacagcccaatatctacaatcaaccaacaagtcattattaccctcactgtcaacccaacacaggcatgctcataaggaaaggttaaaaaaagtaaaaggaactcggcaaatcttaccccgcctgtttaccaaaaacatcacctctagcatcaccagtattagaggcaccgcctgcccagtgacacatgtttaacggccgcggtaccctaaccgtgcaaaggtagcataatcacttgttccttaaatagggacctgtatgaatggctccacgagggttcagctgtctcttacttttaaccagtgaaattgacctgcccgtgaagaggcgggcataacacagcaagacgagaagaccctatggagctttaatttattaatgcaaacagtacctaacaaacccacaggtcctaaactaccaaacctgcattaaaaatttcggttggggcgacctcggagcagaacccaacctccgagcagtacatgctaagacttcaccagtcaaagcgaactactatactcaattgatccaataacttgaccaacggaacaagttaccctagggataacagcgcaatcctattctagagtccatatcaacaatagggtttacgacctcgatgttggatcaggacatcccgatggtgcagccgctattaaaggttcgtttgttcaacgattaaagtcctacgtgatctgagttcagaccggagtaatccaggtcggtttctatctacnttcaaattcctccctgtacgaaaggacaagagaaataaggcctacttcacaaagcgccttcccccgtaaatgatatcatctcaacttagtattatacccacacccacccaagaacagggtttgttaagatggcagagcccggtaatcgcataaaacttaaaactttacagtcagaggttcaattcctcttcttaacaacatacccatggccaacctcctactcctcattgtacccattctaatcgcaatggcattcctaatgcttaccgaacgaaaaattctaggctatatacaactacgcaaaggccccaacgttgtaggcccctacgggctactacaacccttcgctgacgccataaaactcttcaccaaagagcccctaaaacccgccacatctaccatcaccctctacatcaccgccccgaccttagctctcaccatcgctcttctactatgaacccccctccccatacccaaccccctggtcaacctcaacctaggcctcctatttattctagccacctctagcctagccgtttactcaatcctctgatcagggtgagcatcaaactcaaactacgccctgatcggcgcactgcgagcagtagcccaaacaatctcatatgaagtcaccctagccatcattctactatcaacattactaataagtggctcctttaacctctccacccttatcacaacacaagaacacctctgattactcctgccatcatgacccttggccataatatgatttatctccacactagcagagaccaaccgaacccccttcgaccttgccgaaggagagtccgaactagtctcaggcttcaacatcgaatacgccgcaggccccttcgccctattcttcatagccgaatacacaaacattattataataaacaccctcaccactacaatcttcctaggaacaacatatgacgcactctcccctgaactctacacaacatattttgtcaccaagaccctacttctaacctccctgttcttatgaattcgaacagcatacccccgattccgctacgaccaactcatacacctcctatgaaaaaacttcctaccactcaccctagcattacttatatgatatgtctccatacccattacaatctccagcattccccctcaaacctaagaaatatgtctgataaaagagttactttgatagagtaaataataggagcttaaacccccttatttctaggactatgagaatcgaacccatccctgagaatccaaaattctccgtgccacctatcacaccccatcctaaagtaaggtcagctaaataagctatcgggcccataccccgaaaatgttggttatacccttcccgtactaattaatcccctggcccaacccgtcatctactctaccatctttgcaggcacactcatcacagcgctaagctcgcactgattttttacctgagtaggcctagaaataaacatgctagcttttattccagttctaaccaaaaaaataaaccctcgttccacagaagctgccatcaagtatttcctcacgcaagcaaccgcatccataatccttctaatagctatcctcttcaacaatatactctccggacaatgaaccatgaccaatactaccaatcaatactcatcattaataatcataatggctatagcaataaaactaggaatagccccctttcacttctgagtcccagaggttacccaaggcacccctctgacatccggcctgcttcttctcacatgacaaaaactagcccccatctcaatcatataccaaatctctccctcactaaacgtaagccttctcctcactctctcaatcttatccatcatagcaggcagttgaggtggattaaaccaaacccagctacgcaaaatcttagcatactcctcaattacccacataggatgaataatagcagttctaccgtacaaccctaacataaccattcttaatttaactatttatattatcctaactactaccgcattcctactactcaacttaaactccagcaccacgaccctactactatctcgcacctgaaacaagctaacatgactaacacccttaattccatccaccctcctctccctaggaggcctgcccccgctaaccggctttttgcccaaatgggccattatcgaagaattcacaaaaaacaatagcctcatcatccccaccatcatagccaccatcaccctccttaacctctacttctacctacgcctaatctactccacctcaatcacactactccccatatctaacaacgtaaaaataaaatgacagtttgaacatacaaaacccaccccattcctccccacactcatcgcccttaccacgctactcctacctatctccccttttatactaataatcttatagaaatttaggttaaatacagaccaagagccttcaaagccctcagtaagttgcaatacttaatttctgtaacagctaaggactgcaaaaccccactctgcatcaactgaacgcaaatcagccgctttaattaagctaagcccttactagaccaatgggacttaaacccacaaacacttagttaacagctaagcaccctaatcaactggcttcaatctacttctcccgccgccgggaaaaaaggcgggagaagccccggcaggtttgaagctgcttcttcgaatttgcaattcaatatgaaaatcacctcggagctggtaaaaagaggcctaacccctgtctttagatttacagtccaatgcttcactcagccattttacctcacccccactgatgttcgccgaccgttgactattctctacaaaccacaaagacattggaacactatacctattattcggcgcatgagctggagtcctaggcacagctctaagcctccttattcgagccgagctgggccagccaggcaaccttctaggtaacgaccacatctacaacgttatcgtcacagcccatgcatttgtaataatcttcttcatagtaatacccatcataatcggaggctttggcaactgactagttcccctaataatcggtgcccccgatatggcgtttccccgcataaacaacataagcttctgactcttacctccctctctcctactcctgctcgcatctgctatagtggaggccggagcaggaacaggttgaacagtctaccctcccttagcagggaactactcccaccctggagcctccgtagacctaaccatcttctccttacacctagcaggtgtctcctctatcttaggggccatcaatttcatcacaacaattatcaatataaaaccccctgccataacccaataccaaacgcccctcttcgtctgatccgtcctaatcacagcagtcctacttctcctatctctcccagtcctagctgctggcatcactatactactaacagaccgcaacctcaacaccaccttcttcgaccccgccggaggaggagaccccattctataccaacacctattctgatttttcggtcaccctgaagtttatattcttatcctaccaggcttcggaataatctcccatattgtaacttactactccggaaaaaaagaaccatttggatacataggtatggtctgagctatgatatcaattggcttcctagggtttatcgtgtgagcacaccatatatttacagtaggaatagacgtagacacacgagcatatttcacctccgctaccataatcatcgctatccccaccggcgtcaaagtatttagctgactcgccacactccacggaagcaatatgaaatgatctgctgcagtgctctgagccctaggattcatctttcttttcaccgtaggtggcctgactggcattgtattagcaaactcatcactagacatcgtactacacgacacgtactacgttgtagcccacttccactatgtcctatcaataggagctgtatttgccatcataggaggcttcattcactgatttcccctattctcaggctacaccctagaccaaacctacgccaaaatccatttcactatcatattcatcggcgtaaatctaactttcttcccacaacactttctcggcctatccggaatgccccgacgttactcggactaccccgatgcatacaccacatgaaacatcctatcatctgtaggctcattcatttctctaacagcagtaatattaataattttcatgatttgagaagccttcgcttcgaagcgaaaagtcctaatagtagaagaaccctccataaacctggagtgactatatggatgccccccaccctaccacacattcgaagaacccgtatacataaaatctagacaaaaaaggaaggaatcgaaccccccaaagctggtttcaagccaaccccatggcctccatgactttttcaaaaaggtattagaaaaaccatttcataactttgtcaaagttaaattataggctaaatcctatatatcttaatggcacatgcagcgcaagtaggtctacaagacgctacttcccctatcatagaagagcttatcacctttcatgatcacgccctcataatcattttccttatctgcttcctagtcctgtatgcccttttcctaacactcacaacaaaactaactaatactaacatctcagacgctcaggaaatagaaaccgtctgaactatcctgcccgccatcatcctagtcctcatcgccctcccatccctacgcatcctttacataacagacgaggtcaacgatccctcccttaccatcaaatcaattggccaccaatggtactgaacctacgagtacaccgactacggcggactaatcttcaactcctacatacttcccccattattcctagaaccaggcgacctgcgactccttgacgttgacaatcgagtagtactcccgattgaagcccccattcgtataataattacatcacaagacgtcttgcactcatgagctgtccccacattaggcttaaaaacagatgcaattcccggacgtctaaaccaaaccactttcaccgctacacgaccgggggtatactacggtcaatgctctgaaatctgtggagcaaaccacagtttcatgcccatcgtcctagaattaattcccctaaaaatctttgaaatagggcccgtatttaccctatagcaccccctctaccccctctagagcccactgtaaagctaacttagcattaaccttttaagttaaagattaagagaaccaacacctctttacagtgaaatgccccaactaaatactaccgtatggcccaccataattacccccatactccttacactattcctcatcacccaactaaaaatattaaacacaaactaccacctacctccctcaccaaagcccataaaaataaaaaattataacaaaccctgagaaccaaaatgaacgaaaatctgttcgcttcattcattgcccccacaatcctaggcctacccgccgcagtactgatcattctatttccccctctattgatccccacctccaaatatctcatcaacaaccgactaatcaccacccaacaatgactaatcaaactaacctcaaaacaaatgataaccatacacaacactaaaggacgaacctgatctcttatactagtatccttaatcatttttattgccacaactaacctcctcggactcctgcctcactcatttacaccaaccacccaactatctataaacctagccatggccatccccttatgagcgggcgcagtgattataggctttcgctctaagattaaaaatgccctagcccacttcttaccacaaggcacacctacaccccttatccccatactagttattatcgaaaccatcagcctactcattcaaccaatagccctggccgtacgcctaaccgctaacattactgcaggccacctactcatgcacctaattggaagcgccaccctagcaatatcaaccattaaccttccctctacacttatcatcttcacaattctaattctactgactatcctagaaatcgctgtcgccttaatccaagcctacgttttcacacttctagtaagcctctacctgcacgacaacacataatgacccaccaatcacatgcctatcatatagtaaaacccagcccatggcccctaacaggggccctctcagccctcctaatgacctccggcctagccatgtgatttcacttccactccataacgctcctcatactaggcctactaaccaacacactaaccatataccaatgatgacgcgatgtaacacgagaaagcacataccaaggccaccacacaccacctgtccaaaaaggccttcgatacgggataatcctatttattacctcagaagtttttttcttcgcaggatttttctgagccttttaccactccagcctagcccctaccccccaattaggagggcactggcccccaacaggcatcaccccgctaaatcccctagaagtcccactcctaaacacatccgtattactcgcatcaggagtatcaatcacctgagctcaccatagtctaatagaaaacaaccgaaaccaaataattcaagcactgcttattacaattttactgggtctctattttaccctcctacaagcctcagagtacttcgagtctcccttcaccatttccgacggcatctacggctcaacattttttgtagccacaggcttccacggacttcacgtcattattggctcaactttcctcactatctgcttcatccgccaactaatatttcactttacatccaaacatcactttggcttcgaagccgccgcctgatactggcattttgtagatgtggtttgactatttctgtatgtctccatctattgatgagggtcttactcttttagtataaatagtaccgttaacttccaattaactagttttgacaacattcaaaaaagagtaataaacttcgccttaattttaataatcaacaccctcctagccttactactaataattattacattttgactaccacaactcaacggctacatagaaaaatccaccccttacgagtgcggcttcgaccctatatcccccgcccgcgtccctttctccataaaattcttcttagtagctattaccttcttattatttgatctagaaattgccctccttttacccctaccatgagccctacaaacaactaacctgccactaatagttatgtcatccctcttattaatcatcatcctagccctaagtctggcctatgagtgactacaaaaaggattagactgaaccgaattggtatatagtttaaacaaaacgaatgatttcgactcattaaattatgataatcatatttaccaaatgcccctcatttacataaatattatactagcatttaccatctcacttctaggaatactagtatatcgctcacacctcatatcctccctactatgcctagaaggaataatactatcgctattcattatagctactctcataaccctcaacacccactccctcttagccaatattgtgcctattgccatactagtctttgccgcctgcgaagcagcggtgggcctagccctactagtctcaatctccaacacatatggcctagactacgtacataacctaaacctactccaatgctaaaactaatcgtcccaacaattatattactaccactgacatgactttccaaaaaacacataatttgaatcaacacaaccacccacagcctaattattagcatcatccctctactattttttaaccaaatcaacaacaacctatttagctgttccccaaccttttcctccgaccccctaacaacccccctcctaatactaactacctgactcctacccctcacaatcatggcaagccaacgccacttatccagtgaaccactatcacgaaaaaaactctacctctctatactaatctccctacaaatctccttaattataacattcacagccacagaactaatcatattttatatcttcttcgaaaccacacttatccccaccttggctatcatcacccgatgaggcaaccagccagaacgcctgaacgcaggcacatacttcctattctacaccctagtaggctcccttcccctactcatcgcactaatttacactcacaacaccctaggctcactaaacattctactactcactctcactgcccaagaactatcaaactcctgagccaacaacttaatatgactagcttacacaatagcttttatagtaaagatacctctttacggactccacttatgactccctaaagcccatgtcgaagcccccatcgctgggtcaatagtacttgccgcagtactcttaaaactaggcggctatggtataatacgcctcacactcattctcaaccccctgacaaaacacatagcctaccccttccttgtactatccctatgaggcataattataacaagctccatctgcctacgacaaacagacctaaaatcgctcattgcatactcttcaatcagccacatagccctcgtagtaacagccattctcatccaaaccccctgaagcttcaccggcgcagtcattctcataatcgcccacgggcttacatcctcattactattctgcctagcaaactcaaactacgaacgcactcacagtcgcatcataatcctctctcaaggacttcaaactctactcccactaatagctttttgatgacttctagcaagcctcgctaacctcgccttaccccccactattaacctactgggagaactctctgtgctagtaaccacgttctcctgatcaaatatcactctcctacttacaggactcaacatactagtcacagccctatactccctctacatatttaccacaacacaatggggctcactcacccaccacattaacaacataaaaccctcattcacacgagaaaacaccctcatgttcatacacctatcccccattctcctcctatccctcaaccccgacatcattaccgggttttcctcttgtaaatatagtttaaccaaaacatcagattgtgaatctgacaacagaggcttacgaccccttatttaccgagaaagctcacaagaactgctaactcatgcccccatgtctaacaacatggctttctcaacttttaaaggataacagctatccattggtcttaggccccaaaaattttggtgcaactccaaataaaagtaataaccatgcacactactataaccaccctaaccctgacttccctaattccccccatccttaccaccctcgttaaccctaacaaaaaaaactcatacccccattatgtaaaatccattgtcgcatccacctttattatcagtctcttccccacaacaatattcatgtgcctagaccaagaagttattatctcgaactgacactgagccacaacccaaacaacccagctctccctaagcttcaaactagactacttctccataatattcatccctgtagcattgttcgttacatggtccatcatagaattctcactgtgatatataaactcagacccaaacattaatcagttcttcaaatatctactcatcttcctaattaccatactaatcttagttaccgctaacaacctattccaactgttcatcggctgagagggcgtaggaattatatccttcttgctcatcagttgatgatacgcccgagcagatgccaacacagcagccattcaagcaatcctatacaaccgtatcggcgatatcggtttcatcctcgccttagcatgatttatcctacactccaactcatgagacccacaacaaatagcccttctaaacgctaatccaagcctcaccccactactaggcctcctcctagcagcagcaggcaaatcagcccaattaggtctccacccctgactcccctcagccatagaaggccccaccccagtctcagccctactccactcaagcactatagttgtagcaggaatcttcttactcatccgcttccaccccctagcagaaaatagcccactaatccaaactctaacactatgcttaggcgctatcaccactctgttcgcagcagtctgcgcccttacacaaaatgacatcaaaaaaatcgtagccttctccacttcaagtcaactaggactcataatagttacaatcggcatcaaccaaccacacctagcattcctgcacatctgtacccacgccttcttcaaagccatactatttatgtgctccgggtccatcatccacaaccttaacaatgaacaagatattcgaaaaataggaggactactcaaaaccatacctctcacttcaacctccctcaccattggcagcctagcattagcaggaatacctttcctcacaggtttctactccaaagaccacatcatcgaaaccgcaaacatatcatacacaaacgcctgagccctatctattactctcatcgctacctccctgacaagcgcctatagcactcgaataattcttctcaccctaacaggtcaacctcgcttccccacccttactaacattaacgaaaataaccccaccctactaaaccccattaaacgcctggcagccggaagcctattcgcaggatttctcattactaacaacatttcccccgcatcccccttccaaacaacaatccccctctacctaaaactcacagccctcgctgtcactttcctaggacttctaacagccctagacctcaactacctaaccaacaaacttaaaataaaatccccactatgcacattttatttctccaacatactcggattctaccctagcatcacacaccgcacaatcccctatctaggccttcttacgagccaaaacctgcccctactcctcctagacctaacctgactagaaaagctattacctaaaacaatttcacagcaccaaatctccacctccatcatcacctcaacccaaaaaggcataattaaactttacttcctctctttcttcttcccactcatcctaaccctactcctaatcacataacctattcccccgagcaatctcaattacaatatatacaccaacaaacaatgttcaaccagtaactactactaatcaacgcccataatcatacaaagcccccgcaccaataggatcctcccgaatcaaccctgacccctctccttcataaattattcagcttcctacactattaaagtttaccacaaccaccaccccatcatactctttcacccacagcaccaatcctacctccatcgctaaccccactaaaacactcaccaagacctcaacccctgacccccatgcctcaggatactcctcaatagccatcgctgtagtatatccaaagacaaccatcattccccctaaataaattaaaaaaactattaaacccatataacctcccccaaaattcagaataataacacacccgaccacaccgctaacaatcaatactaaacccccataaataggagaaggcttagaagaaaaccccacaaaccccattactaaacccacactcaacagaaacaaagcatacatcattattctcgcacggactacaaccacgaccaatgatatgaaaaaccatcgttgtatttcaactacaagaacaccaatgaccccaatacgcaaaactaaccccctaataaaattaattaaccactcattcatcgacctccccaccccatccaacatctccgcatgatgaaacttcggctcactccttggcgcctgcctgatcctccaaatcaccacaggactattcctagccatgcactactcaccagacgcctcaaccgccttttcatcaatcgcccacatcactcgagacgtaaattatggctgaatcatccgctaccttcacgccaatggcgcctcaatattctttatctgcctcttcctacacatcgggcgaggcctatattacggatcatttctctactcagaaacctgaaacatcggcattatcctcctgcttgcaactatagcaacagccttcataggctatgtcctcccgtgaggccaaatatcattctgaggggccacagtaattacaaacttactatccgccatcccatacattgggacagacctagttcaatgaatctgaggaggctactcagtagacagtcccaccctcacacgattctttacctttcacttcatcttgcccttcattattgcagccctagcagcactccacctcctattcttgcacgaaacgggatcaaacaaccccctaggaatcacctcccattccgataaaatcaccttccacccttactacacaatcaaagacgccctcggcttacttctcttccttctctccttaatgacattaacactattctcaccagacctcctaggcgacccagacaattataccctagccaaccccttaaacacccctccccacatcaagcccgaatgatatttcctattcgcctacacaattctccgatccgtccctaacaaactaggaggcgtccttgccctattactatccatcctcatcctagcaataatccccatcctccatatatccaaacaacaaagcataatatttcgcccactaagccaatcactttattgactcctagccgcagacctcctcattctaacctgaatcggaggacaaccagtaagctacccttttaccatcattggacaagtagcatccgtactatacttcacaacaatcctaatcctaataccaactatctccctaattgaaaacaaaatactcaaatgggcctgtccttgtagtataaactaatacaccagtcttgtaaaccggagatgaaaacctttttccaaggacaaatcagagaaaaagtctttaactccaccattagcacccaaagctaagattctaatttaaactattctctgttctttcatggggaagcagatttgggtaccacccaagtattgactcacccatcaacaaccgctatgtatttcgtacattactgccagccaccatgaatattgtacggtaccataaatacttgaccacctgtagtacataaaaacccaatccacatcaaaaccccctccccatgcttacaagcaagtacagcaatcaaccctcaactatcacacatcaactgcaactccaaagccacccctcacccactaggataccaacaaacctacccacccttaacagtacatagtacataaagccatttaccgtacatagcacattacagtcaaatcccttctcgcccccatggatgacccccctcagataggggtcccttgaccaccatcctccgtgaaatcaatatcccgcacaagagtgctactctcctcgctccgggcccataacacttgggggtagctaaggtgaactgtatccgacatctggttcctacttcagggtcataaagcctaaatagcccacacgttccccttaaataagacatcacgatg

SEQ ID NO: 71 - DNA, 16571 bp, Homo sapiens mitochondrial
  3109: "n" refers to a nucleotide at position 3107 of the Cambridge Reference Sequence (CRS, Anderson et al. 1981 Nature 290:457-465), later determined to be absent from the human mtDNA sequence according to the revised CRS (rCRS, Andrews et al. 1999 Nature Genetics 23:147); "n" therefore represents a single nucleotide deletion at a position corresponding to nucleotide 3107 of SEQ ID NO:1 as provided herein.
gatcacaggtctatcaccctattaaccactcacgggagctctccatgcatttggtattttcgtctggggggtatgcacgcgatagcattgcgagacgctggagccggagcaccctatgtcgcagtatctgtctttgattcctgcctcatcccattatttatcgcacctacgttcaatattacaggcgaacatacttactaaagtgtgttaattaattaatgcttgtaggacataataataacaattgaatgtctgcacagccgctttccacacagacatcataacaaaaaatttccaccaaaccccccctcccccccgcttctggccacagcacttaaacacatctctgccaaaccccaaaaacaaagaaccctaacaccagcctaaccagatttcaaattttatcttttggcggtatgcacttttaacagtcaccccccaactaacacattattttcccctcccactcccatactactaatctcatcaatacaacccccggccatcctacccagcacacacacaccgctgctaaccccataccccgaaccaaccaaaccccaaagacaccccccacagtttatgtagcttacctcctcaaagcaatacactgaaaatgtttagacgggctcacatcaccccataaacaaataggtttggtcctagcctttctattagctcttagtaagattacacatgcaagcatccccgttccagtgagttcaccctctaaatcaccacgatcaaaagggacaagcatcaagcacgcagcaatgcagctcaaaacgcttagcctagccacacccccacgggaaacagcagtgattaacctttagcaataaacgaaagtttaactaagctatactaaccccagggttggtcaatttcgtgccagccaccgcggtcacacgattaacccaagtcaatagaagccggcgtaaagagtgttttagatcaccccctccccaataaagctaaaactcacctgagttgtaaaaaactccagttgacacaaaatagactacgaaagtggctttaacatatctgaacacacaatagctaagacccaaactgggattagataccccactatgcttagccctaaacctcaacagttaaatcaacaaaactgctcgccagaacactacgagccacagcttaaaactcaaaggacctggcggtgcttcatatccctctagaggagcctgttctgtaatcgataaaccccgatcaacctcaccacctcttgctcagcctatataccgccatcttcagcaaaccctgatgaaggctacaaagtaagcgcaagtacccacgtaaagacgttaggtcaaggtgtagcccatgaggtggcaagaaatgggctacattttctaccccagaaaactacgataacccttatgaaacttaagggtcgaaggtggatttagcagtaaactgagagtagagtgcttagttgaacagggccctgaagcgcgtacacaccgcccgtcaccctcctcaagtatacttcaaaggacatttaactaaaacccctacgcatttatatagaggagacaagtcgtaacatggtaagtgtactggaaagtgcacttggacgaaccagagtgtagcttaacacaaagcacccaacttacacttaggagatttcaacttaacttgaccgctctgagctaaacctagccccaaacccactccaccttactaccagacaaccttaaccaaaccatttacccaaataaagtataggcgatagaaattgaaacctggcgcaatagatatagtaccgcaagggaaagatgaaaaattataaccaagcataatatagcaaggactaacccctataccttctgcataatgaattaactagaaataactttgcaaggagagccaaagctaagacccccgaaaccagacgagctacctaagaacagctaaaagagcacacccgtctatgtagcaaaatagtgggaagatttataggtagaggcgacaaacctaccgagcctggtgatagctggttgtccaagatagaatcttagttcaactttaaatttgcccacagaaccctctaaatccccttgtaaatttaactgttagtccaaagaggaacagctctttggacactaggaaaaaaccttgtagagagagtaaaaaatttaacacccatagtaggcctaaaagcagccaccaattaagaaagcgttcaagctcaacacccactacctaaaaaatcccaaacatataactgaactcctcacacccaattggaccaatctatcaccctatagaagaactaatgttagtataagtaacatgaaaacattctcctccgcataagcctgcgtcagattaaaacactgaactgacaattaacagcccaatatctacaatcaaccaacaagtcattattaccctcactgtcaacccaacacaggcatgctcataaggaaaggttaaaaaaagtaaaaggaactcggcaaatcttaccccgcctgtttaccaaaaacatcacctctagcatcaccagtattagaggcaccgcctgcccagtgacacatgtttaacggccgcggtaccctaaccgtgcaaaggtagcataatcacttgttccttaaatagggacctgtatgaatggctccacgagggttcagctgtctcttacttttaaccagtgaaattgacctgcccgtgaagaggcgggcataacacagcaagacgagaagaccctatggagctttaatttattaatgcaaacagtacctaacaaacccacaggtcctaaactaccaaacctgcattaaaaatttcggttggggcgacctcggagcagaacccaacctccgagcagtacatgctaagacttcaccagtcaaagcgaactactatactcaattgatccaataacttgaccaacggaacaagttaccctagggataacagcgcaatcctattctagagtccatatcaacaatagggtttacgacctcgatgttggatcaggacatcccgatggtgcagccgctattaaaggttcgtttgttcaacgattaaagtcctacgtgatctgagttcagaccggagtaatccaggtcggtttctatctacnttcaaattcctccctgtacgaaaggacaagagaaataaggcctacttcacaaagcgccttcccccgtaaatgatatcatctcaacttagtattatacccacacccacccaagaacagggtttgttaagatggcagagcccggtaatcgcataaaacttaaaactttacagtcagaggttcaattcctcttcttaacaacatacccatggccaacctcctactcctcattgtacccattctaatcgcaatggcattcctaatgcttaccgaacgaaaaattctaggctatatacaactacgcaaaggccccaacgttgtaggcccctacgggctactacaacccttcgctgacgccataaaactcttcaccaaagagcccctaaaacccgccacatctaccatcaccctctacatcaccgccccgaccttagctctcaccatcgctcttctactatgaacccccctccccatacccaaccccctggtcaacctcaacctaggcctcctatttattctagccacctctagcctagccgtttactcaatcctctgatcagggtgagcatcaaactcaaactacgccctgatcggcgcactgcgagcagtagcccaaacaatctcatatgaagtcaccctagccatcattctactatcaacattactaataagtggctcctttaacctctccacccttatcacaacacaagaacacctctgattactcctgccatcatgacccttggccataatatgatttatctccacactagcagagaccaaccgaacccccttcgaccttgccgaaggggagtccgaactagtctcaggcttcaacatcgaatacgccgcaggccccttcgccctattcttcatagccgaatacacaaacattattataataaacaccctcaccactacaatcttcctaggaacaacatatgacgcactctcccctgaactctacacaacatattttgtcaccaagaccctacttctaacctccctgttcttatgaattcgaacagcatacccccgattccgctacgaccaactcatacacctcctatgaaaaaacttcctaccactcaccctagcattacttatatgatatgtctccatacccattacaatctccagcattccccctcaaacctaagaaatatgtctgataaaagagttactttgatagagtaaataataggagcttaaacccccttatttctaggactatgagaatcgaacccatccctgagaatccaaaattctccgtgccacctatcacaccccatcctaaagtaaggtcagctaaataagctatcgggcccataccccgaaaatgttggttatacccttcccgtactaattaatcccctggcccaacccgtcatctactctaccatctttgcaggcacactcatcacagcgctaagctcgcactgattttttacctgagtaggcctagaaataaacatgctagcttttattccagttctaaccaaaaaaataaaccctcgttccacagaagctgccatcaagtatttcctcacgcaagcaaccgcatccataatccttctaatagctatcctcttcaacaatatactctccggacaatgaaccataaccaatactaccaatcaatactcatcattaataatcataatggctatagcaataaaactaggaatggccccctttcacttctgagtcccagaggttacccaaggcacccctctgacatccggcctgcttcttctcacatgacaaaaactagcccccatctcaatcatataccaaatctctccctcactaaacgtaagccttctcctcactctctcaatcttatccatcatagcaggcagttgaggtggattaaaccaaacccagctacgcaaaatcttagcatactcctcaattacccacataggatgaataatagcagttctaccgtacaaccctaacataaccattcttaatttaactatttatattatcctaactactaccgcattcctactactcaacttaaactccagcaccacgaccctactactatctcgcacctgaaacaagctaacatgactaacacccttaattccatccaccctcctctccctaggaggcctgcccccgctaaccggctttttgcccaaatgggccattatcgaagaattcacaaaaaacaatagcctcatcatccccaccatcatagccaccatcaccctccttaacctctacttctacctacgcctaatctactccacctcaatcacactactccccatatctaacaacgtaaaaataaaatgacagtttgaacatacaaaacccaccccattcctccccacactcatcgcccttaccacgctactcctacctatctccccttttatactaataatcttatagaaatttaggttaaatacagaccaagagccttcaaagccctcagtaagttgcaatacttaatttctgtaacagctaaggactgcaaaaccccactctgcatcaactgaacgcaaatcagccactttaattaagctaagcccttactagaccaatgggacttaaacccacaaacacttagttaacagctaagcaccctaatcaactggcttcaatctacttctcccgccgccgggaaaaaaggcgggagaagccccggcaggtttgaagctgcttcttcgaatttgcaattcaatatgaaaatcacctcggagctggtaaaaagaggcctaacccctgtctttagatttacagtccaatgcttcactcagccattttacctcacccccactgatgttcgccgaccgttgactattctctacaaaccacaaagacattggaacactatacctattattcggcgcatgagctggagtcctaggcacagctctaagcctccttattcgagccgagctgggccagccaggcaaccttctaggtaacgaccacatctacaacgttatcgtcacagcccatgcatttgtaataatcttcttcatagtaatacccatcataatcggaggctttggcaactgactagttcccctaataatcggtgcccccgatatggcgtttccccgcataaacaacataagcttctgactcttacctccctctctcctactcctgctcgcatctgctatagtggaggccggagcaggaacaggttgaacagtctaccctcccttagcagggaactactcccaccctggagcctccgtagacctaaccatcttctccttacacctagcaggtgtctcctctatcttaggggccatcaatttcatcacaacaattatcaatataaaaccccctgccataacccaataccaaacgcccctcttcgtctgatccgtcctaatcacagcagtcctacttctcctatctctcccagtcctagctgctggcatcactatactactaacagaccgcaacctcaacaccaccttcttcgaccccgccggaggaggagaccccattctataccaacacctattctgatttttcggtcaccctgaagtttatattcttatcctaccaggcttcggaataatctcccatattgtaacttactactccggaaaaaaagaaccatttggatacataggtatggtctgagctatgatatcaattggcttcctagggtttatcgtgtgagcacaccatatatttacagtaggaatagacgtagacacacgagcatatttcacctccgctaccataatcatcgctatccccaccggcgtcaaagtatttagctgactcgccacactccacggaagcaatatgaaatgatctgctgcagtgctctgagccctaggattcatctttcttttcaccgtaggtggcctgactggcattgtattagcaaactcatcactagacatcgtactacacgacacgtactacgttgtagcccacttccactatgtcctatcaataggagctgtatttgccatcataggaggcttcattcactgatttcccctattctcaggctacaccctagaccaaacctacgccaaaatccatttcactatcatattcatcggcgtaaatctaactttcttcccacaacactttctcggcctatccggaatgccccgacgttactcggactaccccgatgcatacaccacatgaaacatcctatcatctgtaggctcattcatttctctaacagcagtaatattaataattttcatgatttgagaagccttcgcttcgaagcgaaaagtcctaatagtagaagaaccctccataaacctggagtgactatatggatgccccccaccctaccacacattcgaagaacccgtatacataaaatctagacaaaaaaggaaggaatcgaaccccccaaagctggtttcaagccaaccccatggcctccatgactttttcaaaaaggtattagaaaaaccatttcataactttgtcaaagttaaattataggctaaatcctatatatcttaatggcacatgcagcgcaagtaggtctacaagacgctacttcccctatcatagaagagcttatcacctttcatgatcacgccctcataatcattttccttatctgcttcctagtcctgtatgcccttttcctaacactcacaacaaaactaactaatactaacatctcagacgctcaggaaatagaaaccgtctgaactatcctgcccgccatcatcctagtcctcatcgccctcccatccctacgcatcctttacataacagacgaggtcaacgatccctcccttaccatcaaatcaattggccaccaatggtactgaacctacgagtacaccgactacggcggactaatcttcaactcctacatacttcccccattattcctagaaccaggcgacctgcgactccttgacgttgacaatcgagtagtactcccgattgaagcccccattcgtataataattacatcacaagacgtcttgcactcatgagctgtccccacattaggcttaaaaacagatgcaattcccggacgtctaaaccaaaccactttcaccgctacacgaccgggggtatactacggtcaatgctctgaaatctgtggagcaaaccacagtttcatgcccatcgtcctagaattaattcccctaaaaatctttgaaatagggcccgtatttaccctatagcaccccctctaccccctctagagcccactgtaaagctaacttagcattaaccttttaagttaaagattaagagaaccaacacctctttacagtgaaatgccccaactaaatactaccgtatggcccaccataattacccccatactccttacactattcctcatcacccaactaaaaatattaaacacaaactaccacctacctccctcaccaaagcccataaaaataaaaaattataacaaaccctgagaaccaaaatgaacgaaaatctgttcgcttcattcattgcccccacaatcctaggcctacccgccgcagtactgatcattctatttccccctctattgatccccacctccaaatatctcatcaacaaccgactaatcaccacccaacaatgactaatcaaactaacctcaaaacaaatgataaccatacacaacactaaaggacgaacctgatctcttatactagtatccttagtcatttttattgccacaactaacctcctcggactcctgcctcactcatttacaccaaccacccaactatctataaacctagccatggccatccccttatgagcgggcgcagtgattataggctttcgctctaagattaaaaatgccctagcccacttcttaccacaaggcacacctacaccccttatccccatactagttattatcgaaaccatcagcctactcattcaaccaatagccctggccgtacgcctaaccgctaacattactgcaggccacctactcatgcacctaattggaagcgccaccctagcaatatcaaccattaaccttccctctacacttatcatcttcacaattctaattctactgactatcctagaaatcgctgtcgccttaatccaagcctacgttttcacacttctagtaagcctctacctgcacgacaacacataatgacccaccaatcacatgcctatcatatagtaaaacccagcccatgacccctaacaggggccctctcagccctcctaatgacctccggcctagccatgtgatttcacttccactccataacgctcctcatactaggcctactaaccaacacactaaccatataccaatgatggcgcgatgtaacacgagaaagcacataccaaggccaccacacaccacctgtccaaaaaggccttcgatacgggataatcctatttattacctcagaagtttttttcttcgcaggatttttctgagccttttaccactccagcctagcccctaccccccaattaggagggcactggcccccaacaggcatcaccccgctaaatcccctagaagtcccactcctaaacacatccgtattactcgcatcaggagtatcaatcacctgagctcaccatagtctaatagaaaacaaccgaaaccaaataattcaagcactgcttattacaattttactgggtctctattttaccctcctacaagcctcagagtacttcgagtctcccttcaccatttccgacggcatctacggctcaacattttttgtagccacaggcttccacggacttcacgtcattattggctcaactttcctcactatctgcttcatccgccaactaatatttcactttacatccaaacatcactttggcttcgaagccgccgcctgatactggcattttgtagatgtggtttgactatttctgtatgtctccatctattgatgagggtcttactcttttagtataaatagtaccgttaacttccaattaactagttttgacaacattcaaaaaagagtaataaacttcgccttaattttaataatcaacaccctcctagccttactactaataattattacattttgactaccacaactcaacggctacatagaaaaatccaccccttacgagtgcggcttcgaccctatatcccccgcccgcgtccctttctccataaaattcttcttagtagctattaccttcttattatttgatctagaaattgccctccttttacccctaccatgagccctacaaacaactaacctgccactaatagttatgtcatccctcttattaatcatcatcctagccctaagtctggcctatgagtgactacaaaaaggattagactgaaccgaattggtatatagtttaaacaaaacgaatgatttcgactcattaaattatgataatcatatttaccaaatgcccctcatttacataaatattatactagcatttaccatctcacttctaggaatactagtatatcgctcacacctcatatcctccctactatgcctagaaggaataatactatcgctgttcattatagctactctcataaccctcaacacccactccctcttagccaatattgtgcctattgccatactagtctttgccgcctgcgaagcagcggtgggcctagccctactagtctcaatctccaacacatatggcctagactacgtacataacctaaacctactccaatgctaaaactaatcgtcccaacaattatattactaccactgacatgactttccaaaaaacacataatttgaatcaacacaaccacccacagcctaattattagcatcatccctctactattttttaaccaaatcaacaacaacctatttagctgttccccaaccttttcctccgaccccctaacaacccccctcctaatactaactacctgactcctacccctcacaatcatggcaagccaacgccacttatccagtgaaccactatcacgaaaaaaactctacctctctatactaatctccctacaaatctccttaattataacattcacagccacagaactaatcatattttatatcttcttcgaaaccacacttatccccaccttggctatcatcacccgatgaggcaaccagccagaacgcctgaacgcaggcacatacttcctattctacaccctagtaggctcccttcccctactcatcgcactaatttacactcacaacaccctaggctcactaaacattctactactcactctcactgcccaagaactatcaaactcctgagccaacaacttaatatgactagcttacacaatagcttttatagtaaagatacctctttacggactccacttatgactccctaaagcccatgtcgaagcccccatcgctgggtcaatagtacttgccgcagtactcttaaaactaggcggctatggtataatacgcctcacactcattctcaaccccctgacaaaacacatagcctaccccttccttgtactatccctatgaggcataattataacaagctccatctgcctacgacaaacagacctaaaatcgctcattgcatactcttcaatcagccacatagccctcgtagtaacagccattctcatccaaaccccctgaagcttcaccggcgcagtcattctcataatcgcccacgggcttacatcctcattactattctgcctagcaaactcaaactacgaacgcactcacagtcgcatcataatcctctctcaaggacttcaaactctactcccactaatagctttttgatgacttctagcaagcctcgctaacctcgccttaccccccactattaacctactgggagaactctctgtgctagtaaccacgttctcctgatcaaatatcactctcctacttacaggactcaacatactagtcacagccctatactccctctacatatttaccacaacacaatggggctcactcacccaccacattaacaacataaaaccctcattcacacgagaaaacaccctcatgttcatacacctatcccccattctcctcctatccctcaaccccgacatcattaccgggttttcctcttgtaaatatagtttaaccaaaacatcagattgtgaatctgacaacagaggcttacgaccccttatttaccgagaaagctcacaagaactgctaactcatgcccccatgtctaacaacatggctttctcaacttttaaaggataacagctatccattggtcttaggccccaaaaattttggtgcaactccaaataaaagtaataaccatgcacactactataaccaccctaaccctgacttccctaattccccccatccttaccaccctcgttaaccctaacaaaaaaaactcatacccccattatgtaaaatccattgtcgcatccacctttattatcagtctcttccccacaacaatattcatgtgcctagaccaagaagttattatctcgaactgacactgagccacaacccaaacaacccagctctccctaagcttcaaactagactacttctccataatattcatccctgtagcattgttcgttacatggtccatcatagaattctcactgtgatatataaactcagacccaaacattaatcagttcttcaaatatctactcatcttcctaattaccatactaatcttagttaccgctaacaacctattccaactgttcatcggctgagagggcgtaggaattatatccttcttgctcatcagttgatgatacgcccgagcagatgccaacacagcagccattcaagcaatcctatacaaccgtatcggcgatatcggtttcatcctcgccttagcatgatttatcctacactccaactcatgagacccacaacaaatagcccttctaaacgctaatccaagcctcaccccactactaggcctcctcctagcagcagcaggcaaatcagcccaattaggtctccacccctgactcccctcagccatagaaggccccaccccagtctcagccctactccactcaagcactatagttgtagcaggaatcttcttactcatccgcttccaccccctagcagaaaatagcccactaatccaaactctaacactatgcttaggcgctatcaccactctgttcgcagcagtctgcgcccttacacaaaatgacatcaaaaaaatcgtagccttctccacttcaagtcaactaggactcataatagttacaatcggcatcaaccaaccacacctagcattcctgcacatctgtacccacgccttcttcaaagccatactatttatgtgctccgggtccatcatccacaaccttaacaatgaacaagatattcgaaaaataggaggactactcaaaaccatacctctcacttcaacctccctcaccattggcagcctagcattagcaggaatacctttcctcacaggtttctactccaaagaccacatcatcgaaaccgcaaacatatcatacacaaacgcctgagccctatctattactctcatcgctacctccctgacaagcgcctatagcactcgaataattcttctcaccctaacaggtcaacctcgcttccccacccttactaacattaacgaaaataaccccaccctactaaaccccattaaacgcctggcagccggaagcctattcgcaggatttctcattactaacaacatttcccccgcatcccccttccaaacaacaatccccctctacctaaaactcacagccctcgctgtcactttcctaggacttctaacagccctagacctcaactacctaaccaacaaacttaaaataaaatccccactatgcacattttatttctccaacatactcggattctaccctagcatcacacaccgcacaatcccctatctaggccttcttacgagccaaaacctgcccctactcctcctagacctaacctgactagaaaagctattacctaaaacaatttcacagcaccaaatctccacctccatcatcacctcaacccaaaaaggcataattaaactttacttcctctctttcttcttcccactcatcctaaccctactcctaatcacataacctattcccccgagcaatctcaattacaatatatacaccaacaaacaatgttcaaccagtaactactactaatcaacgcccataatcatacaaagcccccgcaccaataggatcctcccgaatcaaccctgacccctctccttcataaattattcagcttcctacactattaaagtttaccacaaccaccaccccatcatactctttcacccacagcaccaatcctacctccatcgctaaccccactaaaacactcaccaagacctcaacccctgacccccatgcctcaggatactcctcaatagccatcgctgtagtatatccaaagacaaccatcattccccctaaataaattaaaaaaactattaaacccatataacctcccccaaaattcagaataataacacacccgaccacaccgctaacaatcaatactaaacccccataaataggagaaggcttagaagaaaaccccacaaaccccattactaaacccacactcaacagaaacaaagcatacatcattattctcgcacggactacaaccacgaccaatgatatgaaaaaccatcgttgtatttcaactacaagaacaccaatgaccccaatacgcaaaactaaccccctaataaaattaattaaccactcattcatcgacctccccaccccatccaacatctccgcatgatgaaacttcggctcactccttggcgcctgcctgatcctccaaatcaccacaggactattcctagccatgcactactcaccagacgcctcaaccgccttttcatcaatcgcccacatcactcgagacgtaaattatggctgaatcatccgctaccttcacgccaatggcgcctcaatattctttatctgcctcttcctacacatcgggcgaggcctatattacggatcatttctctactcagaaacctgaaacatcggcattatcctcctgcttgcaactatagcaacagccttcataggctatgtcctcccgtgaggccaaatatcattctgaggggccacagtaattacaaacttactatccgccatcccatacattgggacagacctagttcaatgaatctgaggaggctactcagtagacagtcccaccctcacacgattctttacctttcacttcatcttgcccttcattattgcagccctagcagcactccacctcctattcttgcacgaaacgggatcaaacaaccccctaggaatcacctcccattccgataaaatcaccttccacccttactacacaatcaaagacgccctcggcttacttctcttccttctctccttaatgacattaacactattctcaccagacctcctaggcgacccagacaattataccctagccaaccccttaaacacccctccccacatcaagcccgaatgatatttcctattcgcctacacaattctccgatccgtccctaacaaactaggaggcgtccttgccctattactatccatcctcatcctagcaataatccccatcctccatatatccaaacaacaaagcataatatttcgcccactaagccaatcactttattgactcctagccgcagacctcctcattctaacctgaatcggaggacaaccagtaagctacccttttaccatcattggacaagtagcatccgtactatacttcacaacaatcctaatcctaataccaactatctccctaattgaaaacaaaatactcaaatgggcctgtccttgtagtataaactaatacaccagtcttgtaaaccggagatgaaaacctttttccaaggacaaatcagagaaaaagtctttaactccaccattagcacccaaagctaagattctaatttaaactattctctgttctttcatggggaagcagatttgggtaccacccaagtattgactcacccatcaacaaccgctatgtatttcgtacattactgccagccaccatgaatattgtacggtaccataaatacttgaccacctgtagtacataaaaacccaatccacatcaaaaccccctccccatgcttacaagcaagtacagcaatcaaccctcaactatcacacatcaactgcaactccaaagccacctctcacccactaggataccaacaaacctacccacccttaacagtacatagtacataaagccatttaccgtacatagcacattacagtcaaatcccttctcgtccccatggatgacccccctcagataggggtcccttgaccaccatcctccgtgaaatcaatatcccgcacaagagtgctactctcctcgctccgggcccataacacttgggggtagctaaagtgaactgtatccgacatctggttcctacttcagggccataaagcctaaatagcccacacgttccccttaaataagacatcacgatg

SEQ ID NO: 72 - DNA, 16568 bp, Homo sapiens mitochondrial
  3106: "n" refers to a nucleotide at position 3107 of the Cambridge Reference Sequence (CRS, Anderson et al. 1981 Nature 290:457-465), later determined to be absent from the human mtDNA sequence according to the revised CRS (rCRS, Andrews et al. 1999 Nature Genetics 23:147); "n" therefore represents a single nucleotide deletion at a position corresponding to nucleotide 3107 of SEQ ID NO:1 as provided herein.
gatcacaggtctatcaccctattaaccactcacgggagctctccatgcatttggtattttcgtctggggggtatgcacgcgatagcattgcgagacgctggagccggagcaccctatgtcgcagtatctgtctttgattcctgcctcatcctattatttatcgcacctacgttcaatattacaggcgaacatacttactaaagtgtgttaattaattaatgcttgtaggacataataataacaattgaatgtctgcacagccgctttccacacagacatcataacaaaaaatttccaccaaaccccccctcccccgccttctggccacagcacttaaacacatctctgccaaaccccaaaaacaaagaaccctaacaccagcctaaccagatttcaaattttatcttttggcggtatgcacttttaacagtcaccccccaactaacacattatttttccctcccactcccatactactaatctcatcaatacaacccccgcccatcctacccagcacacacaccgctgctaaccccataccccgaaccaaccaaaccccaaagacaccccccacagtttatgtagcttacctcctcaaagcaatacactgaaaatgtttagacgggctcacatcaccccataaacaaataggtttggtcctagcctttctattagctcttagtaagattacacatgcaagcatccccgttccagtgagttcaccctctaaatcaccacgatcaaaagggacaagcatcaagcacgcagcaatgcagctcaaaacgcttagcctagccacacccccacgggaaacagcagtgattaacctttagcaataaacgaaagtttaactaagctatactaaccccagggttggtcaatttcgtgccagccaccgcggtcacacgattaacccaagtcaatagaagccggcgtaaagagtgttttagatcaccccctccccaataaagctaaaactcacctgagttgtaaaaaactccagttgacacaaaatagactacgaaagtggctttaacatatctgaacacacaatagctaagacccaaactgggattagataccccactatgcttagccctaaacctcaacagttaaatcaacaaaactgctcgccagaacactacgagccacagcttaaaactcaaaggacctggcggtgcttcatatccctctagaggagcctgttctgtaatcgataaaccccgatcaacctcaccacctcttgctcagcctatataccgccatcttcagcaaaccctgatgaaggctacaaagtaagcgcaagtacccacgtaaagacgttaggtcaaggtgtagcccatgaggtggcaagaaatgggctacattttctaccccagaaaactacgatagcccttatgaaacttaagggtcgaaggtggatttagcagtaaactgagagtagagtgcttagttgaacagggccctgaagcgcgtacacaccgcccgtcaccctcctcaagtatacttcaaaggacatttaactaaaacccctacgcatttatatagaggagacaagtcgtaacatggtaagtgtactggaaagtgcacttggacgaaccagagtgtagcttaacacaaagcacccaacttacacttaggagatttcaacttaacttgaccgctctgagctaaacctagccccaaacccactccaccttactaccagacaaccttagccaaaccatttacccaaataaagtataggcgatagaaattgaaacctggcgcaatagatatagtaccgcaagggaaagatgaaaaattataaccaagcataatatagcaaggactaacccctataccttctgcataatgaattaactagaaataactttgcaaggagagccaaagctaagacccccgaaaccagacgagctacctaagaacagctaaaagagcacacccgtctatgtagcaaaatagtgggaagatttataggtagaggcgacaaacctaccgagcctggtgatagctggttgtccaagatagaatcttagttcaactttaaatttgcccacagaaccctctaaatccccttgtaaatttaactgttagtccaaagaggaacagctctttggacactaggaaaaaaccttgtagagagagtaaaaaatttaacacccatagtaggcctaaaagcagccaccaattaagaaagcgttcaagctcaacacccactacctaaaaaatcccaaacatataactgaactcctcacacccaattggaccaatctatcaccctatagaagaactaatgttagtataagtaacatgaaaacattctcctccgcataagcctgcgtcagattaaaacactgaactgacaattaacagcccaatatctacaatcaaccaacaagtcattattaccctcactgtcaacccaacacaggcatgctcataaggaaaggttaaaaaaagtaaaaggaactcggcaaatcttaccccgcctgtttaccaaaaacatcacctctagcatcaccagtattagaggcaccgcctgcccagtgacacatgtttaacggccgcggtaccctaaccgtgcaaaggtagcataatcacttgttccttaaatagggacctgtatgaatggctccacgagggttcagctgtctcttacttttaaccagtgaaattgacctgcccgtgaagaggcgggcataacacagcaagacgagaagaccctatggagctttaatttattaatgcaaacagtacctaacaaacccacaggtcctaaactaccaaacctgcattaaaaatttcggttggggcgacctcggagcagaacccaacctccgagcagtgcatgctaagacttcaccagtcaaagcgaactactatactcaattgatccaataacttgaccaacggaacaagttaccctagggataacagcgcaatcctattctagagtccatatcaacaatagggtttacgacctcgatgttggatcaggacatcccgatggtgcagccgctattaaaggttcgtttgttcaacgattaaagtcctacgtgatctgagttcagaccggagtaatccaggtcggtttctatctacnttcaaattcctccctgtacgaaaggacaagagaaataaggcctacttcacaaagcgccttcccccgtaaatgatatcatctcaacttagtattatacccacacccacccaagaacagggtttgttaagatggcagagcccggtaatcgcataaaacttaaaactttacagtcagaggttcaattcctcttcttaacaacatacccatggccaacctcctactcctcattgtacccattctaatcgcaatggcattcctaatgcttaccgaacgaaaaattctaggctatatacaactacgcaaaggccccaacgttgtaggcccctacgggctactacaacccttcgctgacgccataaaactcttcaccaaagagcccctaaaacccgccacatctaccatcaccctctacatcaccgccccgaccttagctctcaccatcgctcttctactatgaacccccctccccatacccaaccccctggtcaacctcaacctaggcctcctatttattctagccacctctagcctagccgtttactcaatcctctgatcagggtgagcatcaaactcaaactacgccctgatcggcgcactgcgagcagtagcccaaacaatctcatatgaagtcaccctagccatcattctactatcaacattactaataagtggctcctttaacctctccacccttatcacaacacaagaacacctctgattactcctgccatcatgacccttggccataatatgatttatctccacactagcagagaccaaccgaacccccttcgaccttgccgaaggggagtccgaactagtctcaggcttcaacatcgaatacgccgcaggccccttcgccctattcttcatagccgaatacacaaacattattataataaacaccctcaccactacaatcttcctaggaacaacatatgacgcactctcccctgaactctacacaacatattttgtcaccaagactctacttctaacctccctgttcttatgaattcgaacagcatacccccgattccgctacgaccaactcatacacctcctatgaaaaaacttcctaccactcaccctagcattacttatatgatatgtctccatacccattacaatctccagcattccccctcaaacctaagaaatatgtctgataaaagagttactttgatagagtaaataataggagcttaaacccccttatttctaggaccatgagaatcgaacccatccctgagaatccaaaattctccgtgccacctatcacaccccatcctaaagtaaggtcagctaaataagctatcgggcccataccccgaaaatgttggttatacccttcccgtactaattaatcccctggcccaacccgtcatctactctaccatctttgcaggcacactcatcacagcgctaagctcgcactgattttttacctgagtaggcctagaaataaacatgctagcttttattccagttctaaccaaaaaaataaaccctcgttccacagaagctgccatcaagtatttcctcacgcaagcaaccgcatccataatccttctaatagctatcctcttcaacaatatactctccggacaatgaaccataaccaatactaccaatcaatactcatcattaataatcataatggctatagcaataaaactaggaatagccccctttcacttctgagtcccagaggttacccaaggcacccctctgacatccggcctgcttcttctcacatgacaaaaactagcccccatctcaatcatataccaaatctctccctcactaaacgtaagccttctcctcactctctcaatcttatccatcatagcaggcagttgaggtggattaaaccaaacccagctacgcaaaatcttagcatactcctcaattacccacataggatgaataatagcagttctaccgtacaaccctaacataaccattcttaatttaactatttatattatcctaactactaccgcattcctactactcaacttaaactccagcaccacgaccctactactatctcgcacctgaaacaagctaacatgactaacacccttaattccatccaccctcctctccctaggaggcctgcccccgctaaccggctttttgcccaaatgggccattatcgaagaattcacaaaaaacaatagcctcatcatccccaccatcatagccaccatcaccctccttaacctctacttctacctacgcctaatctactccacctcaatcacactactccccatatctaacaacgtaaaaataaaatgacagtttgaacatacaaaacccaccccattcctccccacactcatcgcccttaccacgctactcctacctatctccccttttatactaataatcttatagaaatttaggttaaatacagaccaagagccttcaaagccctcagtaagttgcaatacttaatttctgtaacagctaaggactgcaaaaccccactctgcatcaactgaacgcaaatcagccactttaattaagctaagcccttactagaccaatgggacttaaacccacaaacacttagttaacagctaagcaccctaatcaactggcttcaatctacttctcccgccgccgggaaaaaaggcgggagaagccccggcaggtttgaagctgcttcttcgaatttgcaattcaatatgaaaatcacctcggagctggtaaaaagaggcctaacccctgtctttagatttacagtccaatgcttcactcagccattttacctcacccccactgatgttcgccgaccgttgactattctctacaaaccacaaagacattggaacactatacctattattcggcgcatgagctggagtcctaggcacagctctaagcctccttattcgagccgagctgggccagccaggcaaccttctaggtaacgaccacatctacaacgttatcgtcacagcccatgcatttgtaataatcttcttcatagtaatacccatcataatcggaggctttggcaactgactagttcccctaataatcggtgcccccgatatggcgtttccccgcataaacaacataagcttctgactcttacctccctctctcctactcctgctcgcatctgctatagtggaggccggagcaggaacaggttgaacagtctaccctcccttagcagggaactactcccaccctggagcctccgtagacctaaccatcttctccttacacctagcaggtgtctcctctatcttaggggccatcaatttcatcacaacaattatcaatataaaaccccctgccataacccaataccaaacgcccctcttcgtctgatccgtcctaatcacagcagtcctacttctcctatctctcccagtcctagctgctggcatcactatactactaacagaccgcaacctcaacaccaccttcttcgaccccgccggaggaggagaccccattctataccaacacctattctgatttttcggtcaccctgaagtttatattcttatcctaccaggcttcggaataatctcccatattgtaacttactactccggaaaaaaagaaccatttggatacataggtatggtctgagctatgatatcaattggcttcctagggtttatcgtgtgagcacaccatatatttacagtaggaatagacgtagacacacgagcatatttcacctccgctaccataatcatcgctatccccaccggcgtcaaagtatttagctgactcgccacactccacggaagcaatatgaaatgatctgctgcagtgctctgagccctaggattcatctttcttttcaccgtaggtggcctgactggcattgtattagcaaactcatcactagacatcgtactacacgacacgtactacgttgtagcccacttccactatgtcctatcaataggagctgtatttgccatcataggaggcttcattcactgatttcccctattctcaggctacaccctagaccaaacctacgccaaaatccatttcactatcatattcatcggcgtaaatctaactttcttcccacaacactttctcggcctatccggaatgccccgacgttactcggactaccccgatgcatacaccacatgaaacatcctatcatctgtaggctcattcatttctctaacagcagtaatattaataattttcatgatttgagaagccttcgcttcgaagcgaaaagtcctaatagtagaagaaccctccataaacctggagtgactatatggatgccccccaccctaccacacattcgaagaacccgtatacataaaatctagacaaaaaaggaaggaatcgaaccccccaaagctggtttcaagccaaccccatggcctccatgactttttcaaaaaggtattagaaaaaccatttcataactttgtcaaagttaaattataggctaaatcctatatatcttaatggcacatgcagcgcaagtaggtctacaagacgctacttcccctatcatagaagagcttatcacctttcatgatcacgccctcataatcattttccttatctgcttcctagtcctgtatgcccttttcctaacactcacaacaaaactaactaatactaacatctcagacgctcaggaaatagaaaccgtctgaactatcctgcccgccatcatcctagtcctcatcgccctcccatccctacgcatcctttacataacagacgaggtcaacgatccctcccttaccatcaaatcaattggccaccaatggtactgaacctacgagtacaccgactacggcggactaatcttcaactcctacatacttcccccattattcctagaaccaggcgacctgcgactccttgacgttgacaatcgagtagtactcccgattgaagcccccattcgtataataattacatcacaagacgtcttgcactcatgagctgtccccacattaggcttaaaaacagatgcaattcccggacgtctaaaccaaaccactttcaccgctacacgaccgggggtatactacggtcaatgctctgaaatctgtggagcaaaccacagtttcatgcccatcgtcctagaattaattcccctaaaaatctttgaaatagggcccgtatttaccctatagcaccccctctaccccctctagagcccactgtaaagctaacttagcattaaccttttaagttaaagattaagagaaccaacacctctttacagtgaaatgccccaactaaatactaccgtatggcccaccataattacccccatactccttacactattcctcatcacccaactaaaaatattaaacacaaactaccacctacctccctcaccaaagcccataaaaataaaaaattataacaaaccctgagaaccaaaatgaacgaaaatctgttcgcttcattcattgcccccacaatcctaggcctacccgccgcagtactgatcattctatttccccctctattgatccccacctccaaatatctcatcaacaaccgactaatcaccacccaacaatgactaatcaaactaacctcaaaacaaatgataaccatacacaacactaaaggacgaacctgatctcttatactagtatccttaatcatttttattgccacaactaacctcctcggactcctgcctcactcatttacaccaaccacccaactatctataaacctagccatggccatccccttatgagcgggcgcagtgattataggctttcgctctaagattaaaaatgccctagcccacttcttaccacaaggcacacctacaccccttatccccatactagttattatcgaaaccatcagcctactcattcaaccaatagccctggccgtacgcctaaccgctaacattactgcaggccacctactcatgcacctaattggaagcaccaccctagcaatatcaaccattaaccttccctctacacttatcatcttcacaattctaattctactgactatcctagaaatcgctgtcgccttaatccaagcctacgttttcacacttctagtaagcctctacctgcacgacaacacataatgacccaccaatcacatgcctatcatatagtaaaacccagcccatgacccctaacaggggccctctcagccctcctaatgacctccggcctagccatgtgatttcacttccactccataacgctcctcatactaggcctactaaccaacacactaaccatataccaatgatggcgcgatgtaacacgagaaagcacataccaaggccaccacacaccacctgtccaaaaaggccttcgatacgggataatcctatttattacctcagaagtttttttcttcgcaggatttttctgagccttttaccactccagcctagcccctaccccccaattaggagggcactggcccccaacaggcatcaccccgctaaatcccctagaagtcccactcctaaacacatccgtattactcgcatcaggagtatcaatcacctgagctcaccatagtctaatagaaaacaaccgaaaccaaataattcaagcactgcttattacaattttactgggtctctattttaccctcctacaagcctcagagtacttcgagtctcccttcaccatttccgacggcatctacggctcaacattttttgtagccacaggcttccacggacttcacgtcattattggctcaactttcctcactatctgcttcatccgccaactaatatttcactttacatccaaacatcactttggcttcgaagccgccgcctgatactggcattttgtagatgtggtttgactatttctgtatgtctccatctattgatgagggtcttactcttttagtataaatagtaccgttaacttccaattaactagttttgacaacattcaaaaaagagtaataaacttcgccttaattttaataatcaacaccctcctagccttactactaataattattacattttgactaccacaactcaacggctacatagaaaaatccaccccttacgagtgcggcttcgaccctatatcccccgcccgcgtccctttctccataaaattcttcttagtagctattaccttcttattatttgatctagaaattgccctccttttacccctaccatgagccctacaaacaactaacctgccactaatagttatgtcatccctcttattaatcatcatcctagccctaagtctggcctatgagtgactacaaaaaggattagactgaaccgaattggtatatagtttaaacaaaacgaatgatttcgactcattaaattatgataatcatatttaccaaatgcccctcatttacataaatattatactagcatttaccatctcacttctaggaatactagtatatcgctcacacctcatatcctccctactatgcctagaaggaataatactatcgctgttcattatagctactctcataaccctcaacacccactccctcttagccaatattgtgcctattgccatactagtctttgccgcctgcgaagcagcggtgggcctagccctactagtctcaatctccaacacatatggcctagactacgtacataacctaaacctactccaatgctaaaactaatcgtcccaacaattatattactaccactgacatgactttccaaaaaacacataatttgaatcaacacaaccacccacagcctaattattagcatcatccctctactattttttaaccaaatcaacaacaacctatttagctgttccccaaccttttcctccgaccccctaacaacccccctcctaatactaactacctgactcctacccctcacaatcatggcaagccaacgccacttatccagtgaaccactatcacgaaaaaaactctacctctctatactaatctccctacaaatctccttaattataacattcacagccacagaactaatcatattttatatcttcttcgaaaccacacttatccccaccttggctatcatcacccgatgaggcaaccagccagaacgcctgaacgcaggcacatacttcctattctacaccctagtaggctcccttcccctactcatcgcactaatttacactcacaacaccctaggctcactaaacattctactactcactctcactgcccaagaactatcaaactcctgagccaacaacttaatatgactagcttacacaatagcttttatagtaaagatacctctttacggactccacttatgactccctaaagcccatgtcgaagcccccatcgctgggtcaatagtacttgccgcagtactcttaaaactaggcggctatggtataatacgcctcacactcattctcaaccccctgacaaaacacatagcctaccccttccttgtactatccctatgaggcataattataacaagctccatctgcctacgacaaacagacctaaaatcgctcattgcatactcttcaatcagccacatagccctcgtagtaacagccattctcatccaaaccccctgaagcttcaccggcgcagtcattctcataatcgcccacgggcttacatcctcattactattctgcctagcaaactcaaactacgaacgcactcacagtcgcatcataatcctctctcaaggacttcaaactctactcccactaatagctttttgatgacttctagcaagcctcgctaacctcgccttaccccccactattaacctactgggagaactctctgtgctagtaaccacgttctcctgatcaaatatcactctcctacttacaggactcaacatactagtcacagccctatactccctctacatatttaccacaacacaatggggctcactcacccaccacattaacaacataaaaccctcattcacacgagaaaacaccctcatgttcatacacctatcccccattctcctcctatccctcaaccccgacatcattaccgggttttcctcttgtaaatatagtttaaccaaaacatcagattgtgaatctgacaacagaggcttacgaccccttatttaccgagaaagctcacaagaactgctaactcatgcccccatgtctaacaacatggctttctcaacttttaaaggataacagctatccattggtcttaggccccaaaaattttggtgcaactccaaataaaagtaataaccatgcacactactataaccaccctaaccctgacttccctaattccccccatccttaccaccctcgttaaccctaacaaaaaaaactcatacccccattatgtaaaatccattgtcgcatccacctttattatcagtctcttccccacaacaatattcatgtgcctagaccaagaagttattatctcgaactgacactgagccacaacccaaacaacccagctctccctaagcttcaaactagactacttctccataatattcatccctgtagcattgttcgttacatggtccatcatagaattctcactgtgatatataaactcagacccaaacattaatcagttcttcaaatatctactcatcttcctaattaccatactaatcttagttaccgctaacaacctattccaactgttcatcggctgagagggcgtaggaattatatccttcttgctcatcagttgatgatacgcccgagcagatgccaacacagcagccattcaagcaatcctatacaaccgtatcggcgatatcggtttcatcctcgccttagcatgatttatcctacactccaactcatgagacccacaacaaatagcccttctaaacgctaatccaagcctcaccccactactaggcctcctcctagcagcagcaggcaaatcagcccaattaggtctccacccctgactcccctcagccatagaaggccccaccccagtctcagccctactccactcaagcactatagttgtagcaggaatcttcttactcatccgcttccaccccctagcagaaaatagcccactaatccaaactctaacactatgcttaggcgctatcaccactctattcgcagcagtctgcgcccttacacaaaatgacatcaaaaaaatcgtagccttctccacttcaagtcaactaggactcataatagttacaatcggcatcaaccaaccacacctagcattcctgcacatctgtacccacgccttcttcaaagccatactatttatgtgctccgggtccatcatccacaaccttaacaatgaacaagatattcgaaaaataggaggactactcaaaaccatacctctcacttcaacctccctcaccattggcagcctagcattagcaggaatacctttcctcacaggtttctactccaaagaccacatcatcgaaaccgcaaacatatcatacacaaacgcctgagccctatctattactctcatcgctacctccctgacaagcgcctatagcactcgaataattcttctcaccctaacaggtcaacctcgcttccccacccttactaacattaacgaaaataaccccaccctactaaaccccattaaacgcctggcagccggaagcctattcgcaggatttctcattactaacaacatttcccccgcatcccccttccaaacaacaatccccctctacctaaaactcacagccctcgctgtcactttcctaggacttctaacagccctagacctcaactacctaaccaacaaacttaaaataaaatccccactatgcacattttatttctccaacatactcggattctaccctagcatcacacaccgcacaatcccctatctaggccttcttacgagccaaaacctgcccctactcctcctagacctaacctgactagaaaagctattacctaaaacaatttcacagcaccaaatctccacctccatcatcacctcaacccaaaaaggcataattaaactttacttcctctctttcttcttcccactcatcctaaccctactcctaatcacataacctattcccccgagcaatctcaattacaatatatacaccaacaaacaatgttcaaccagtaactactactaatcaacgcccataatcatacaaagcccccgcaccaataggatcctcccgaatcaaccctgacccctctccttcataaattattcagcttcctacactattaaagtttaccacaaccaccaccccatcatactctttcacccacagcaccaatcctacctccatcgctaaccccactaaaacactcaccaagacctcaacccctgacccccatgcctcaggatactcctcaatagccatcgctgtagtatatccaaagacaaccatcattccccctaaataaattaaaaaaactattaaacccatataacctcccccaaaattcagaataataacacacccgaccacaccgctaacaatcaatactaaacccccataaataggagaaggcttagaagaaaaccccacaaaccccattactaaacccacactcaacagaaacaaagcatacatcattattctcgcacggactacaaccacgaccaatgatatgaaaaaccatcgttgtatttcaactacaagaacaccaatgaccccaatacgcaaaactaaccccctaataaaattaattaaccactcattcatcgacctccccaccccatccaacatctccgcatgatgaaacttcggctcactccttggcgcctgcctgatcctccaaatcaccacaggactattcctagccatgcactactcaccagacgcctcaaccgccttttcatcaatcgcccacatcactcgagacgtaaattatggctgaatcatccgctaccttcacgccaatggcgcctcaatattctttatctgcctcttcctacacatcgggcgaggcctatattacggatcatttctctactcagaaacctgaaacatcggcattatcctcctgcttgcaactatagcaacagccttcataggctatgtcctcccgtgaggccaaatatcattctgaggggccacagtaattacaaacttactatccgccatcccatacattgggacagacctagttcaatgaatctgaggaggctactcagtagacagtcccaccctcacacgattctttacctttcacttcatcttgcccttcattattgcagccctagcagcactccacctcctattcttgcacgaaacgggatcaaacaaccccctaggaatcacctcccattccgataaaatcaccttccacccttactacacaatcaaagacgccctcggcttacttctcttccttctctccttaatgacattaacactattctcaccagacctcctaggcgacccagacaattataccctagccaaccccttaaacacccctccccacatcaagcccgaatgatatttcctattcgcctacacaattctccgatccgtccctaacaaactaggaggcgtccttgccctattactatccatcctcatcctagcaataatccccatcctccatatatccaaacaacaaagcataatatttcgcccactaagccaatcactttattgactcctagccgcagacctcctcattctaacctgaatcggaggacaaccagtaagctacccttttaccatcattggacaagtagcatccgtactatacttcacaacaatcttaatcctaataccaactatctccctaattgaaaacaaaatactcaaatgggcctgtccttgtagtataaactaatacaccagtcttgtaaaccggagatgaaaacctttttccaaggacaaatcagagaaaaagtctttaactccaccattagcacccaaagctaagattctaatttaaactattctctgttctttcatggggaagcagatttgggtaccacccaagtattgactcacccatcaacaaccgctatgtatttcgtacattactgccagccaccatgaatattgtacggtaccataaatacttgaccacctgtagtacataaaaacccaatccacatcaaaaccccctccccatgcttacaagcaagtacagcaatcaaccctcaactatcacacatcaactgcaactccaaagccacccctcacccactaggataccaacaaacctacccacccttaacagcacatagtacataaagccatttaccgtacatagcacattacagtcaaatcccttctcgtccccatggatgacccccctcagataggggtcccttgaccaccatcctccgtgaaatcaatatcccgcacaagagtgctactctcctcgctccgggcccataacacttgggggtagctaaagtgaactgtatccgacatctggttcctacttcagggtcataaagcctaaatagcccacacgttccccttaaataagacatcacgatg

SEQ ID NO: 73 - DNA, 16561 bp, Homo sapiens mitochondrial
  3108: "n" refers to a nucleotide at position 3107 of the Cambridge Reference Sequence (CRS, Anderson et al. 1981 Nature 290:457-465), later determined to be absent from the human mtDNA sequence according to the revised CRS (rCRS, Andrews et al. 1999 Nature Genetics 23:147); "n" therefore represents a single nucleotide deletion at a position corresponding to nucleotide 3107 of SEQ ID NO:1 as provided herein.
gatcacaggtctatcaccctattaaccactcacgggagctctccatgcatttggtattttcgtctggggggtgtgcacgcgatagcattgcgagacgctggagccggagcaccctatgtcgcagtatctgtctttgattcctgcctcatcctattatttatcgcacctacgttcaatattacaggcgaacatacctactaaagtgtgttaattaattaatgcttgtaggacataataataacaattgaatgtctgcacagccgctttccacacagacatcataacaaaaaatttccaccaaaccccccctcccccgccttctggccacagcacttaaacacatctctgccaaaccccaaaaacaaagaaccctaacaccagcctaaccagatttcaaattttatcttttggcggtatgcacttttaacagtcaccccccaactaacacattattttcccctcccactcccatactactaatctcatcaatacaacccccgcccatcctacccagcacacacacaccgctgctaaccccataccccgaaccaaccaaaccccaaagacaccccccacagtttatgtagcttacctcctcaaagcaatacactgaaaatgtttagacgggctcacatcaccccataaacaaataggtttggtcctagcctttctattagctcttagtaagattacacatgcaagcatccccattccagtgagttcaccctctaaatcaccacgatcaaaagggacaagcatcaagcacgcagcaatgcagctcaaaacgcttagcctagccacacccccacgggaaacagcagtgattaacctttagcaataaacgaaagtttaactaagctatactaaccccagggttggtcaatttcgtgccagccaccgcggtcacacgattaacccaagtcaatagaagccggcgtaaagagtgttttagatcaccccctccccaataaagctaaaactcacctgagttgtaaaaaactccagttgacacaaaatagactacgaaagtggctttaacatatctgaacacacaatagctaagacccaaactgggattagataccccactatgcttagccctaaacctcaacagttaaatcaacaaaactgctcgccagaacactacgagccacagcttaaaactcaaaggacctggcggtgcttcatatccctctagaggagcctgttctgtaatcgataaaccccgatcaacctcaccacctcttgctcagcctatataccgccatcttcagcaaaccctgatgaaggctacaaagtaagcgcaagtacccacgtaaagacgttaggtcaaggtgtagcccatgaggtggcaagaaatgggctacattttctaccccagaaaactacgatagcccttatgaaacttaagggtcgaaggtggatttagcagtaaactgagagtagagtgcttagttgaacagggccctgaagcgcgtacacaccgcccgtcaccctcctcaagtatacttcaaaggacatttaactaaaacccctacgcatttatatagaggagacaagtcgtaacatggtaagtgtactggaaagtgcacttggacgaaccagagtgtagcttaacacaaagcacccaacttacacttaggagatttcaacttaacttgaccgctctgagctaaacctagccccaaacccactccaccttactaccagacaaccttagccaaaccatttacccaaataaagtataggcgatagaaattgaaacctggcgcaatagatatagtaccgcaagggaaagatgaaaaattataaccaagcataatatagcaaggactaacccctataccttctgcataatgaattaactagaaataactttgcaaggagaaccaaagctaagacccccgaaaccagacgagctacctaagaacagctaaaagagcacacccgtctatgtagcaaaatagtgggaagatttataggtagaggcgacaaacctaccgagcctggtgatagctggttgtccaagatagaatcttagttcaactttaaatttgcccacagaaccctctaaatccccttgtaaatttaactgttagtccaaagaggaacagctctttggacactaggaaaaaaccttgtagagagagtaaaaaatttaacacccatagtaggcctaaaagcagccaccaattaagaaagcgttcaagctcaacacccactacctaaaaaatcccaaacatataactgaactcctcacacccaattggaccaatctatcaccctatagaagaactaatgttagtataagtaacatgaaaacattctcctccgcataagcctgcgtcagattaaaacactgaactgacaattaacagcccaatatctacaatcaaccaacaagtcattattaccctcactgtcaacccaacacaggcatgctcataaggaaaggttaaaaaaagtaaaaggaactcggcaaatcttaccccgcctgtttaccaaaaacatcacctctagcatcaccagtattagaggcaccgcctgcccagtgacacatgtttaacggccgcggtaccctaaccgtgcaaaggtagcataatcacttgttccttaaatagggacctgtatgaatggctccacgagggttcagctgtctcttacttttaaccagtgaaattgacctgcccgtgaagaggcgggcatgacacagcaagacgagaagaccctatggagctttaatttattaatgcaaacagtacctaacaaacccacaggtcctaaactaccaaacctgcattaaaaatttcggttggggcgacctcggagcagaacccaacctccgagcagtacatgctaagacttcaccagtcaaagcgaactactatactcaattgatccaataacttgaccaacggaacaagttaccctagggataacagcgcaatcctattctagagtccatatcaacaatagggtttacgacctcgatgttggatcaggacatcccgatggtgcagccgctattaaaggttcgtttgttcaacgattaaagtcctacgtgatctgagttcagaccggagtaatccaggtcggtttctatctacnttcaaattcctccctgtacgaaaggacaagagaaataaggcctacttcacaaagcgccttcccccgtaaatgatatcatctcaacttagtattatacccacacccacccaagaacagggtttgttaagatggcagagcccggtaatcgcataaaacttaaaactttacagtcagaggttcaattcctcttcttaacaacatacccatggccaacctcctactcctcattgtacccattctaatcgcaatggcattcctaatgcttaccgaacgaaaaattctaggctatatacaactacgcaaaggccccaacgttgtaggcccctacgggctactacaacccttcgctgacgccataaaactcttcaccaaagagcccctaaaacccgccacatctaccatcaccctctacatcaccgccccgaccttagctctcaccatcgctcttctactatgaacccccctccccatacccaaccccctggtcaacctcaacctaggcctcctatttattctagccacctctagcctagccgtttactcaatcctctgatcagggtgagcatcaaactcaaactacgccctgatcggcgcactgcgagcagtagcccaaacaatctcatatgaagtcaccctagccatcattctactatcaacattactaataagtggctcctttaacctctccacccttatcacaacacaagaacacctctgattactcctgccatcatgacccttggccataatatgatttatctccacactagcagagaccaaccgaacccccttcgaccttgccgaaggggagtccgaactagtctcaggcttcaacatcgaatacgccgcaggccccttcgccctattcttcatagccgaatacacaaacattattataataaacaccctcaccactacaatcttcctaggaacaacatatgacgcactctcccctgaactctacacaacatattttgtcaccaagaccctacttctaacctccctgttcttatgaattcgaacagcatacccccgattccgctacgaccaactcatacacctcctatgaaaaaacttcctaccactcaccctagcattacttatatgacatgtctccatacccattacaatctccagcattccccctcaaacctaagaaatatgtctgataaaagagttactttgatagagtaaataataggagcttaaacccccttatttctaggactatgagaatcgaacccatccctgagaatccaaaattctccgtgccacctatcacaccccatcctaaagtaaggtcagctaaataagctatcgggcccataccccgaaaatgttggttatacccttcccgtactaattaatcccctggcccaacccgtcatctactctaccatctttgcaggcacactcatcacagcgctaagctcgcactgattttttacctgagtaggcctagaaataaacatgctagcttttattccagttctaaccaaaaaaataaaccctcgttccacagaagctgccatcaagtatttcctcacgcaagcaaccgcatccataatccttctaatagctatcctcttcaacaatatactctccggacaatgaaccataaccaatactaccaatcaatactcatcattaataatcataatggctatagcaataaaactaggaatagccccctttcacttctgagtcccagaggttacccaaggcacccctctgacatccggcctgcttcttctcacatgacaaaaactagcccccatctcaatcatataccaaatctctccctcactagacgtaagccttctcctcactctctcaatcttatccatcatagcaggcagttgaggtggattaaaccaaacccagctacgcaaaatcttagcatactcctcaattacccacataggatgaataatagcagttctaccgtacaaccctaacataaccattcttaatttaactatttatattatcctaactactaccgcattcctactactcaacttaaactccagcaccacgaccctactactatctcgcacctgaaacaagctaacatgactaacacccttaattccatccaccctcctctccctaggaggcctgcccccgctaaccggctttttgcccaaatgggccattatcgaagaactcacaaaaaacaatagcctcatcatccccaccatcatagccaccatcaccctccttaacctctacttctacctacgcctaatctactccacctcaatcacactactccccatatctaacaacgtaaaaataaaatgacagtttgaacacacaaaacccaccccattcctccccacactcatcgcccttaccacgctactcctacctatctccccttttatactaataatcttatagaaatttaggttaaatacagaccaagagccttcaaagccctcagtaagttgcaatacttaatttctgtaacagctaaggactgcaaaaccccactctgcatcaactgaacgcaaatcagccactttaattaagctaagcccttactagaccaatgggacttaaacccacaaacacttagttaacagctaagcaccctaatcaactggcttcaatctacttctcccgccgccgggaaaaaaggcgggagaagccccggcaggtttgaagctgcttcttcgaatttgcaattcaatatgaaaatcacctcggagctggtaaaaagaggcctaacccctgtctttagatttacagtccaatgcttcactcagccattttacctcacccccactgatgttcgccgaccgttgactattctctacaaaccacaaagacattggaacactatacctattattcggcgcatgagctggagtcctaggcacagctctaagcctccttattcgagccgagctgggccagccaggcaaccttctaggtaacgaccacatctacaacgttatcgtcacagcccatgcatttgtaataatcttcttcatagtaatacccatcataatcggaggctttggcaactgactagttcccctaataatcggtgcccccgatatggcgtttccccgcataaacaacataagcttctgactcttacctccctctctcctactcctgctcgcatctgctatagtggaggccggagcaggaacaggttgaacagtctaccctcccttagcagggaactactcccaccctggagcctccgtagacctaaccatcttctccttacacctagcaggtgtctcctctatcttaggggccatcaatttcatcacaacaattatcaatataaaaccccctgccataacccaataccaaacgcccctcttcgtctgatccgtcctaatcacagcagtcctacttatcctatctctcccagtcctagctgctggcatcactatactactaacagaccgcaacctcaacaccaccttcttcgaccccgccggaggaggagaccccattctataccaacacctattctgatttttcggtcaccctgaagtttatattcttatcctaccaggcttcggaataatctcccatattgtaacttactactccggaaaaaaagaaccatttggatacataggtatggtctgagctatgatatcaattggcttcctagggtttatcgtgtgagcacaccatatatttacagtaggaatagacgtagacacacgagcatatttcacctccgctaccataatcatcgctatccccaccggcgtcaaagtatttagctgactcgccacactccacggaagcaatatgaaatgatctgctgcagtgctctgagccctaggattcatctttcttttcaccgtaggtggcctgactggcattgtattagcaaactcatcactagacatcgtactacacgacacgtactacgttgtagctcacttccactatgtcctatcaataggagctgtatttgccatcataggaggcttcattcactgatttcccctattctcaggctacaccctagaccaaacctacgccaaaatccatttcactatcatattcatcggcgtaaatctaactttcttcccacaacactttctcggcctatccggaatgccccgacgttactcggactaccccgatgcatacaccacatgaaacatcctatcatctgtaggctcattcatttctctaacagcagtaatattaataattttcatgatttgagaagccttcgcttcgaagcgaaaagtcctaatagtagaagaaccctccataaacctggagtgactatatggatgccccccaccctaccacacattcgaagaacccgtatacataaaatctagacaaaaaaggaaggaatcgaaccccccaaagctggtttcaagccaaccccatggcctccatgactttttcaaaaaggtattagaaaaaccatttcataactttgtcaaagttaaattataggctaaatcctatatatcttaatggcacatgcagcgcaagtaggtctacaagacgctacttcccctatcatagaagagcttatcacctttcatgatcacgccctcataatcattttccttatctgcttcctagtcctgtatgcccttttcctaacactcacaacaaaactaactaatactaacatctcagacgctcaggaaatagaaaccgtctgaactatcctgcccgccatcatcctagtcctcatcgccctcccatccctacgcatcctttacataacagacgaggtcaacgatccctcccttaccatcaaatcaattggccaccaatggtactgaacctacgagtacaccgactacggcggactaatcttcaactcctacatacttcccccattattcctagaaccaggcgacctgcgactccttgacgttgacaatcgagtagtactcccgattgaagcccccattcgtataataattacatcacaagacgtcttgcactcatgagctgtccccacattaggcttaaaaacagatgcaattcccggacgtctaaaccaaaccactttcaccgctacacgaccgggggtatactacggtcaatgctctgaaatctgtggagcaaaccacagtttcatgcccatcgtcctagaattaattcccctaaaaatctttgaaatagggcccgtatttaccctatagtaccccctctagagcccactgtaaagctaacttagcattaaccttttaagttaaagattaagagaaccaacacctctttacagtgaaatgccccaactaaatactaccgtatggcccaccataattacccccatactccttacactattcctcatcacccaactaaaaatattaaacacaaactaccacctacctccctcaccaaagcccataaaaataaaaaattataacaaaccctgagaaccaaaatgaacgaaaatctgttcgcttcattcattgcccccacaatcctaggcctacccgccgcagtactgatcattctatttccccctctattgatccccacctccaaatatctcatcaacaaccgactaatcaccacccaacaatgactaatcaaactaacctcaaaacaaataataaccatacacaacactaaaggacgaacctgatctcttatactagtatccttaatcatttttattgccacaactaacctcctcggactcctgcctcactcatttacaccaaccacccaactatctataaacctagccatggccatccccttatgagcgggcgcagtgattataggctttcgctctaagattaaaaatgccctagcccacttcttaccacaaggcacacctacaccccttatccccatactagttattatcgaaaccatcagcctactcattcaaccaatagccctggccgtacgcctaaccgctaacattactgcaggccacctactcatgcacctaattggaagcgccaccctagcaatatcaaccattaaccttccctctacacttatcatcttcacaattctaattctactgactatcctagaaatcgctgtcgccttaatccaagcctacgttttcacacttctagtaagcctctacctgcacgacaacacataatgacccaccaatcacatgcctatcatatagtaaaacccagcccatgacccctaacaggggccctctcagccctcctaatgacctccggcctagccatgtgatttcacttccactccataacgctcctcatactaggcctactaaccaacacactaaccatataccaatgatggcgcgatgtaacacgagaaagcacataccaaggccaccacacaccacctgtccaaaaaggccttcgatacgggataatcctatttattacctcagaagtttttttcttcgcaggatttttctgagccttttaccactccagcctagcccctaccccccaattaggagggcactggcccccaacaggcatcaccccgctaaatcccctagaagtcccactcctaaacacatccgtattactcgcatcaggagtatcaatcacctgagctcaccatagtctaatagaaaacaaccgaaaccaaataattcaagcactgcttattacaattttactgggtctctattttaccctcctacaagcctcagagtacttcgagtctcccttcaccatttccgacggcatctacggctcaacattttttgtagccacaggcttccacggacttcacgtcattattggctcaactttcctcactatctgcttcatccgccaactaatatttcactttacatccaaacatcactttggcttcgaagccgccgcctgatactggcattttgtagatgtggtttgactatttctgtatgtctccatctattgatgagggtcttactcttttagtataaatagtaccgttaacttccaattaactagttttgacaacattcaaaaaagagtaataaacttcgccttaattttaataatcaacaccctcctagccttactactaataattattacattttgactaccacaactcaacggctacatagaaaaatccaccccttacgagtgcggcttcgaccctatatcccccgcccgcgtccctttctccataaaattcttcttagtagctattaccttcttattatttgatctagaaattgccctccttttacccctaccatgagccctacaaacaactaacctgccactaatagttatgtcatccctcttattaatcatcatcctagccctaagtctggcctatgagtgactacaaaaaggattagactgaaccgaattggtatatagtttaaacaaaacgaatgatttcgactcattaaattatgataatcatatctaccaaatgcccctcatttacataaatattatactagcatttaccatctcacttctaggaatactagtatatcgctcacacctcatatcctccctactatgcctagaaggaataatactatcgctgttcattatagctactctcataaccctcaacacccactccctcttagccaatattgtgcctattgccatactagtctttgccgcctgcgaagcagcggtgggcctagccctactagtctcaatctccaacacatatggcctagactacgtacataacctaaacctactccaatgctaaaactaatcgtcccaacaattatattactaccactgacatgactttccaaaaaacacataatttgaatcaacacaaccacccacagcctaattattagcatcatccctctactattttttaaccaaatcaacaacaacctatttagctgttccccaaccttttcctccgaccccctaacaacccccctcctaatactaactacctgactcctacccctcacaatcatggcaagccaacgccacttatccagtgaaccactatcacgaaaaaaactctacctctctatactaatctccctacaaatctccttaattataacattcacagccacagaactaatcatattttatatcttcttcgaaaccacacttatccccaccttggctatcatcacccgatgaggcaaccagccagaacgcctgaacgcaggcacatacttcctattctacaccctagtaggctcccttcccctactcatcgcactgatttacactcacaacaccctaggctcactaaacattctactactcactctcactgcccaagaactatcaaactcctgagccaacaacttaatatgactagcttacacaatagcttttatagtaaagatacctctttacggactccacttatgactccctaaagcccatgtcgaagcccccatcgctgggtcaatagtacttgccgcagtactcttaaaactaggcggctatggtataatacgcctcacactcattctcaaccccctgacaaaacacatagcctaccccttccttgtactatccctatgaggcataattataacaagctccatctgcctacgacaaacagacctaaaatcgctcattgcatactcttcaatcagccacatagccctcgtagtaacagccattctcatccaaaccccctgaagcttcaccggcgcagtcattctcataatcgcccacggacttacatcctcattactattctgcctagcaaactcaaactacgaacgcactcacagtcgcatcataatcctctctcaaggacttcaaactctgctcccactaatagctttttgatgacttctagcaagcctcgctaacctcgccttaccccccactattaacctactgggagaactctctgtgctagtaaccacgttctcctgatcaaatatcactctcctacttacaggactcaacatactagtcacagccctatactccctctacatatttaccacaacacaatggggctcactcacccaccacattaacaacataaaaccctcattcacacgagaaaacaccctcatgttcatacacctatcccccattctcctcctatccctcaaccccgacatcattaccgggttttcctcttgtaaatatagtttaaccaaaacatcagattgtgaatctgacaacagaggcttacgaccccttatttaccgagaaagctcacaagaactgctaactcatgcccccatgtctaacaacatggctttctcaacttttaaaggataacagctatccattggtcttaggccccaaaaattttggtgcaactccaaataaaagtaataaccatgcacactactataaccaccctaaccctgacttccctaattccccccatccttaccaccctcgttaaccctaacaaaaaaaactcatacccccattatgtaaaatccattgtcgcatccacctttattatcagtctcttccccacaacaatattcatgtgcctagaccaagaagttattatctcgaactgacactgagccacaacccaaacaacccagctctccctaagcttcaaactagactacttctccataatattcatccctgtagcattgttcgttacatggtccatcatagaattctcactgtgatatataaactcagacccaaacattaatcagttcttcaaatatctactcatcttcctaattaccatactaatcttagttaccgctaacaacctattccaactgttcatcggctgagagggcgtaggaattatatccttcttgctcatcagttgatgatacgcccgagcagatgccaacacagcagccattcaagcaatcctatacaaccgtatcggcgatatcggtttcatcctcgccttagcatgatttatcctacactccaactcatgagacccacaacaaatagcccttctaaacgctaatccaagcctcaccccactactaggcctcctcctagcagcagcaggcaaatcagcccaattaggtctccacccctgactcccctcagccatagaaggccccaccccagtctcagccctactccactcaagcactatagttgtagcaggaatcttcttactcatccgcttccaccccctagcagaaaatagcccactaatccaaactctaacactatgcttaggcgctatcaccactctgttcgcagcagtctgcgcccttacacaaaatgacatcaaaaaaatcgtagccttctccacttcaagtcaactaggactcataatagttacaatcggcatcaaccaaccacacctagcattcctgcacatctgtacccacgccttcttcaaagccatactatttatgtgctccggatccatcatccacaaccttaacaatgaacaagatattcgaaaaataggaggactactcaaaaccatacctctcacttcaacctccctcaccattggcagcctagcattagcaggaatacctttcctcacaggtttctactccaaagaccacatcatcgaaaccgcaaacatatcatacacaaacgcctgagccctatctattactctcatcgctacctccctgacaagcgcctatagcactcgaataattcttctcaccctaacaggtcaacctcgcttccccacccttactaacattaacgaaaataaccccaccctactaaaccccattaaacgcctggcagccggaagcctattcgcaggatttctcattactaacaacatttcccccgcatcccccttccaaacaacaatccccctctacctaaaactcacagccctcgctgtcactttcctaggacttctaacagccctagacctcaactacctaaccaacaaacttaaaataaaatccccactatgcacattttatttctccaacatactcggattctaccctagcatcacacaccgcacaatcccctatctaggccttcttacgagccaaaacctgcccctactcctcctagacctaacctgactagaaaagctactacctaaaacaatttcacagcaccaaatctccacctccatcatcacctcaacccaaaaaggcataattaaactttacttcctctctttcttcttcccactcatcctaaccctactcctaatcacataacctattcccccgagcaatctcaattacaatatatacaccaacaaacaatgttcaaccagtaactactactaatcaacgcccatagtcatacaaagcccccgcaccaataggatcctcccgaatcaaccctgacccctctccttcataaattattcagcttcctacactattaaagtttaccacaaccaccaccccatcatactctttcacccacagcaccaatcctacctccatcgctaaccccactaaaacactcaccaagacctcaacccctgacccccatgcctcaggatactcctcaatagccatcgctgtagtatatccaaagacaaccatcattccccctaaataaattaaaaaaactattaaacccatataacctcccccaaaattcagaataataacacacccgaccacaccgctaacaatcaatactaaacccccataaataggagaaggcttagaagaaaaccccacaaaccccattactaaacccacactcaacagaaacaaagcatacatcattattctcgcacggactacaaccacgaccaatgatatgaaaaaccatcgttgtatttcaactacaagaacaccaatgaccccaatacgcaaaattaaccccctaataaaattaattaaccactcattcatcgacctccccaccccatccaacatctccgcatgatgaaacttcggctcactccttggcgcctgcctgatcctccaaatcaccacaggactattcctagccatacactactcaccagacgcctcaaccgccttttcatcaatcgcccacatcactcgagacgtaaattatggctgaatcatccgctaccttcacgccaatggcgcctcaatattctttatctgcctattcctacacatcggacgaggcctatattacggatcatttctctactcagaaacctgaaacatcggcattatcctcctgcttgcaactatagcaacagccttcataggctatgtcctcccgtgaggccaaatatcattctgaggggccacagtaattacaaacttactatccgccatcccatacattgggacagacctagttcaatgaatctgaggaggctactcagtagacagtcccaccctcacacgattctttacctttcacttcatcttgcccttcattattgcagccctagcagcactccacctcctattcttgcacgaaacgggatcaaacaaccccctaggaatcacctcccattccgataaaatcaccttccacccttactacacaatcaaagacgccctcggcttacttctcttcattctctccttaatgacattaacactattctcaccagacctcctaggcgacccagacaattataccctagccaaccccttaaacacccctccccacatcaagcccgaatgatatttcctattcgcctacacaattctccgatccgtccctaacaagctaggaggcgtccttgccctattactatccatcctcatcctagcaataatccccatcctccatatatccaaacaacaaagcataatatttcgcccactaagccaatcactttattgactcctagccgcagacctcctcattctaacctgaatcggaggacaaccagtaagctacccttttaccatcattggacaagtagcatccgtactatacttcacaacaatcctaatcctaataccaactatctccctaattgaaaacaaaatactcaaatgggcctgtccttgtagtataaactaatacaccagtcttgtaaaccgaagatgaaaacctttttccaaggacaaatcagagaaaaagtctttaactccaccattagcacccaaagctaagattctaatttaaactattctctgttctttcatggggaagcagatttgggtaccacccaagtattgactcacccatcaacaaccgctatgtatttcgtacattactgccagccaccatgaatattgcacggtaccataaatacttgaccacctgtagtacataaaaacccaatccacatcaaccccccccccccatgcttacaagcaagtacagcaatcaaccctcaactatcacacatcaactgcaactccaaagccacccctcacccactaggataccaacaaacctacccatcctcaacagtacatagtacataaagccatttaccgtacatagcacattacagtcaaatcccttctcgtccccatggatgacccccctcagataggggtcccttgaccaccatcctccgtgaaatcaatatcccgcacaagagtgctactctcctcgctccgggcccataacacttgggggtagctaaagtgaactgtatccgacatctggttcctacttcagggccataaagcctaaatagcccacacgttccccttaaataagacatcacgatg

SEQ ID NO: 74 - DNA, 16570 bp, Homo sapiens mitochondrial
  3108: "n" refers to a nucleotide at position 3107 of the Cambridge Reference Sequence (CRS, Anderson et al. 1981 Nature 290:457-465), later determined to be absent from the human mtDNA sequence according to the revised CRS (rCRS, Andrews et al. 1999 Nature Genetics 23:147); "n" therefore represents a single nucleotide deletion at a position corresponding to nucleotide 3107 of SEQ ID NO:1 as provided herein.
gatcacaggtctatcaccctattaaccactcacgggagctctccatgcatttggtattttcgtctggggggtgtgcacgcgatagcattgcgagacgctggagccggagcaccctatgtcgcagtatctgtctttgattcctgcctcatcccattatttatcgcacctacgttcaatattacaggcgaacatacttactaaagtgtgttaattaattaatgcttgtaggacataataataacaattgaatgtctgcacagccgctttccacacagacatcataacaaaaaattttcaccaaaccccccctcccccgccttctggccacagcacttaaacacatctctgccaaaccccaaaaacaaagaaccctaacaccagcctaaccagatttcaaattttatcttttggcggtatgcacttttaacagtcaccccccaactaacacattattttcccctctcactcccatactactaatctcatcaacacaacccccgcccatcctacccagcacacacacaccgctgctaaccccataccccgaaccaaccaaaccccaaagacaccccccacagtttatgtagcttacctcctcaaagcaatacactgaaaatgtttagacgggctcacatcaccccataaacaaataggtttggtcctagcctttctattagctcttagtaagattacacatgcaagcatccccgttccagtgagttcaccctctaaatcaccacgatcaaaagggacaagcatcaagcacgcagcaatgcagctcaaaacgcttagcctagccacacccccacgggaaacagcagtgattaacctttagcaataaacgaaagtttaactaagctatactaaccccagggttggtcaatttcgtgccagccaccgcggtcacacgattaacccaagtcaatagaagccggcgtaaagagtgttttagatcaccccctccccaataaagctaaaactcacctgagttgtaaaaaactccagttaacacaaaatagactacgaaagtggctttaacatatctgaacacacaatagctaagacccaaactgggattagataccccactatgcttagccctaaacctcaacagttaaatcaacaaaactgctcgccagaacactacgagccacagcttaaaactcaaaggacctggcggtgcttcatatccctctagaggagcctgttctgtaatcgataaaccccgatcaacctcaccacctcttgctcagcctatataccgccatcttcagcaaaccctgatgaaggctacaaagtaagcgcaagtacccacgtaaagacgttaggtcaaggtgtagcccatgaggtggcaagaaatgggctacattttctaccccagaaaactacgatagcccttatgaaacttaagggtcgaaggtggatttagcagtaaactgagagtagagtgcttagttgaacagggccctgaagcgcgtacacaccgcccgtcaccctcctcaagtatacttcaaaggacatttaactaaaacccctacgcatttatatagaggagacaagtcgtaacatggtaagtgtactggaaagtgcacttggacgaaccagagtgtagcttaacacaaagcacccaacttacacttaggagatttcaacttaacttgaccgctctgagctaaacctagccccaaacccactccaccttactaccagacaaccttagccaaaccatttacccaaataaagtataggcgatagaaattgaaacctggcgcaatagatatagtaccgcaagggaaagatgaaaaattataaccaagcataatatagcaaggactaacccctataccttctgcataatgaattaactagaaataactttgcaaggagagccaaagctaagacccccgaaaccagacgagctacctaagaacagctaaaagagcacacccgtctatgtagcaaaatagtgggaagatttataggtagaggcgacaaacctaccgagcctggtgatagctggttgtccaagatagaatcttagttcaactttaaatttgcccacagaaccctctaaatccccttgtaaatttaactgttagtccaaagaggaacagctctttggacactaggaaaaaaccttgtagagagagtaaaaaatttaacacccatagtaggcctaaaagcagccaccaattaagaaagcgttcaagctcaacacccactacctaaaaaatcccaaacatataactgaactcctcacacccaattggaccaatctatcaccctatagaagaactaatgttagtataagtaacatgaaaacattctcctccgcataagcctgcgtcagattaaaacactgaactgacaattaacagcccaatatctacaatcaaccaacaagtcattattaccctcactgtcaacccaacacaggcatgctcataaggaaaggttaaaaaaagtaaaaggaactcggcaaatcttaccccgcctgtttaccaaaaacatcacctctagcatcaccagtattagaggcaccgcctgcccagtgacacatgtttaacggccgcggtaccctaaccgtgcaaaggtagcataatcacttgttccttaaatagggacctgtatgaatggctccacgagggttcagctgtctcttacttttaaccagtgaaattgacctgcccgtgaagaggcgggcatgacacagcaagacgagaagaccctatggagctttaatttattaatgcaaacagtacctaacaaacccacaggtcctaaactaccaaacctgcattaaaaatttcggttggggcgacctcggagcagaacccaacctccgagcagtacatgctaagacttcaccagtcaaagcgaactactatactcaattgatccaataacttgaccaacggaacaagttaccctagggataacagcgcaatcctattctagagtccatatcaacaatagggtttacgacctcgatgttggatcaggacatcccaatggtgcagccgctattaaaggttcgtttgttcaacgattaaagtcctacgtgatctgagttcagaccggagtaatccaggtcggtttctatctacnttcaaattcctccctgtacgaaaggacaagagaaataaggcctacttcacaaagcgccttcccccgtaaatgatatcatctcaacttagtattatacccacacccacccaagaacagggtttgttaagatggcagagcccggtaatcgcataaaacttaaaactttacagtcagaggttcaattcctcttcttaacaacatacccatggccaacctcctactcctcattgtacccattctaatcgcaatggcattcctaatgcttaccgaacgaaaaattctaggctatatacaactacgcaaaggccccaacgttgtaggcccctacgggctactacaacccttcgctgacgccataaaactcttcaccaaagagcccctaaaacccgccacatctaccatcaccctctacatcaccgccccgaccttagctctcaccatcgctcttctactatgaacccccctccccatacccaaccccctggtcaacctcaacctaggcctcctatttattctagccacctctagcctagccgtttactcaatcctctgatcagggtgagcatcaaactcaaactacgccctgatcggcgcactgcgagcagtagcccaaacaatctcatatgaagtcaccctagccatcattctactatcaacattactaataagtggctcctttaacctctccacccttatcacaacacaagaacacctctgattactcctgccatcatgacccttggccataatatgatttatctccacactagcagagaccaaccgaacccccttcgaccttgccgaaggggagtccgaactagtctcaggcttcaacatcgaatacgccgcaggccccttcgccctattcttcatagccgaatacacaaacattattataataaacaccctcaccactacaatcttcctaggaacaacatatgacgcactctcccctgaactctacacaacatattttgtcaccaagaccctacttctaacctccctgttcttatgaattcgaacagcatacccccgattccgctacgaccaactcatacacctcctatgaaaaaacttcctaccactcaccctagcattacttatatgacatgtctccatacccattacaatctccagcattccccctcaaacctaagaaatatgtctgataaaagagttactttgatagagtaaataataggagcttaaacccccttatttctaggactatgagaatcgaacccatccctgagaatccaaaattctccgtgccacctatcacaccccatcctaaagtaaggtcagctaaataagctatcgggcccataccccgaaaatgttggttatacccttcccgtactaattaatcccctggcccaacccgtcatctactctaccatctttgcaggcacactcatcacagcgctaagctcgcactgattttttacctgagtaggcctagaaataaacatgctagcttttattccagttctaaccaaaaaaataaaccctcgttccacagaagctgccatcaagtatttcctcacgcaagcaaccgcatccataatccttctaatagctatcctcttcaacaatatactctccggacaatgaaccataaccaatactaccaatcaatactcatcattaataatcataatggctatagcaataaaactaggaatagccccctttcacttctgagtcccagaggttacccaaggcacccctctgacatccggcctgcttcttctcacatgacaaaaactagcccccatctcaatcatataccaaatctctccctcactaaacgtaagccttctcctcactctctcaatcttatccatcatagcaggcagttgaggtggattaaaccaaacccagctacgcaaaatcttagcatactcctcaattacccacataggatgaataatagcagttctaccgtacaaccctaacataaccattcttaatttaactatttatattatcctaactactaccgcattcctactactcaacttaaactccagcaccacgaccctactactatctcgcacctgaaacaagctaacatgactaacacccttaattccatccaccctcctctccctaggaggcctgcccccgctaaccggctttttgcccaaatgggccattatcgaagaattcacaaaaaacaatagcctcatcatccccaccatcatagccaccatcaccctccttaacctctacttctacctacgcctaatctactccacctcaatcacactactccccatatctaacaacgtaaaaataaaatgacagtttgaacatacaaaacccaccccattcctccccacactcatcgcccttaccacgctactcctacctatctccccttttatactaataatcttatagaaatttaggttaaatacagaccaagagccttcaaagccctcagtaagttgcaatacttaatttctgtaacagctaaggactgcaaaaccccactctgcatcaactgaacgcaaatcagccactttaattaagctaagcccttactagaccaatgggacttaaacccacaaacacttagttaacagctaagcaccctaatcaactggcttcaatctacttctcccgccgccgggaaaaaaggcgggagaagccccggcaggtttgaagctgcttcttcgaatttgcaattcaatatgaaaatcacctcggagctggtaaaaagaggcctaacccctgtctttagatttacagtccaatgcttcactcagccattttacctcacccccactgatgttcgccgaccgttgactattctctacaaaccacaaagacattggaacactatacctattattcggcgcatgagctggagtcctaggcacagctctaagcctccttattcgagccgagctgggccagccaggcaaccttctaggtaacgaccacatctacaacgttatcgtcacagcccatgcatttgtaataatcttcttcatagtaatacccatcataatcggaggctttggcaactgactagttcccctaataatcggtgcccccgatatggcgtttccccgcataaacaacataagcttctgactcttacctccctctctcctactcctgctcgcatctgctatagtggaggccggagcaggaacaggttgaacagtctaccctcccttagcagggaactactcccaccctggagcctccgtagacctaaccatcttctccttacacctagcaggtgtctcctctatcttaggggccatcaatttcatcacaacaattatcaatataaaaccccctgccataacccaataccaaacgcccctcttcgtctgatccgtcctaatcacagcagtcctacttctcctatctctcccagtcctagctgctggcatcactatactactaacagaccgcaacctcaacaccaccttcttcgaccccgccggaggaggagaccccattctataccaacacctattctgatttttcggtcaccctgaagtttatattcttatcctaccaggcttcggaataatctcccatattgtaacttactactccggaaaaaaagaaccatttggatacataggtatggtctgagctatgatatcaattggcttcctagggtttatcgtgtgagcacaccatatatttacagtaggaatagacgtagacacacgagcatatttcacctccgctaccataatcatcgctatccccaccggcgtcaaagtatttagctgactcgccacactccacggaagcaatatgaaatgatctgctgcagtgctctgagccctaggattcatctttcttttcaccgtaggtggcctgactggcattgtattagcaaactcatcactagacatcgtactacacgacacgtactacgttgtagctcacttccactatgtcctatcaataggagctgtatttgccatcataggaggcttcattcactgatttcccctattctcaggctacaccctagaccaaacctacgccaaaatccatttcactatcatattcatcggcgtaaatctaactttcttcccacaacactttctcggcctatccggaatgccccgacgttactcggactaccccgatgcatacaccacatgaaacatcctatcatctgtaggctcattcatttctctaacagcagtaatattaataattttcatgatttgagaagccttcgcttcgaagcgaaaagtcctaatagtagaagaaccctccataaacctggagtgactatatggatgccccccaccctaccacacattcgaagaacccgtatacataaaatctagacaaaaaaggaaggaatcgaaccccccaaagctggtttcaagccaaccccatggcctccatgactttttcaaaaaggtattagaaaaaccatttcataactttgtcaaagttaaattataggctaaatcctatatatcttaatggcacatgcagcgcaagtaggtctacaagacgctacttcccctatcatagaagagcttatcacctttcatgatcacgccctcataatcattttccttatctgcttcctagtcctgtatgcccttttcctaacactcacaacaaaactaactaatactaacatctcagacgctcaggaaatagaaaccgtctgaactatcctacccgccatcatcctagtcctcatcgccctcccatccctacgcatcctttacataacagacgaggtcaacgatccctcccttaccatcaaatcaattggccaccaatggtactgaacctacgagtacaccgactacggcggactaatcttcaactcctacatacttcccccattgttcctagaaccaggcgacctgcgactccttgacgttgacaatcgagtagtactcccgattgaagcccccattcgtataataattacatcacaagacgtcttgcactcatgagctgtccccacattaggcttaaaaacagatgcaattcccggacgtctaaaccaaaccactttcaccgctacacgaccgggggtatactacggtcaatgctctgaaatctgtggagcaaaccacagtttcatgcccatcgtcctagaattaattcccctaaaaatctttgaaatagggcccgtatttaccctatagcaccccctctaccccctctagagcccactgtaaagctaacttagcattaaccttttaagttaaagattaagagaaccaacacctctttacagtgaaatgccccaactaaatactaccgtatggcccaccataattacccccatactccttacactattcctcatcacccaactaaaaatattaaacacaaactaccacctacctccctcaccaaagcccataaaaataaaaaattataacaaaccctgagaaccaaaatgaacgaaaatctgttcgcttcattcattgcccccacaatcctaggcctacccgccgcagtactgatcattctatttccccctctattgatccccacctccaaatatctcatcaacaaccgactaatcaccacccaacaatgactaatcaaactaacctcaaaacaaatgataaccatacacaacactaaaggacgaacctgatctcttatactagtatccttaatcatttttattgccacaactaacctcctcggactcctgcctcactcatttacaccaaccacccaactatctataaacctagccatggccatccccttatgagcgggcgcagtgattataggctttcgctctaagattaaaaatgccctagcccacttcttaccacaaggcacacctacaccccttatccccatactagttattatcgaaaccatcagcctactcattcaaccaatagccctggccgtacgcctaaccgctaacattactgcaggccacctactcatgcacctaattggaagcgccaccctagcaatatcaaccattaaccttccctctacacttatcatcttcacaattctaattctactgactatcctagaaatcgctgtcgccttaatccaagcctacgttttcacacttctagtaagcctctacctgcacgacaacacataatgacccaccaatcacatgcctatcatatagtaaaacccagcccatgacccctaacaggggccctctcagccctcctaatgacctccggcctagccatgtgatttcacttccactccataacgctcctcatactaggcctactaaccaacacactaaccatataccaatgatggcgcgatgtaacacgagaaagcacataccaaggccaccacacaccacctgtccaaaaaggccttcgatacgggataatcctatttattacctcagaagtttttttcttcgcaggatttttctgagccttttaccactccagcctagcccctaccccccaattaggagggcactggcccccaacaggcatcaccccgctaaatcccctagaagtcccactcctaaacacatccgtattactcgcatcaggagtatcaatcacctgagctcaccatagtctaatagaaaacaaccgaaaccaaataattcaagcactgcttattacaattttactgggtctctattttaccctcctacaagcctcagagtacttcgagtctcccttcaccatttccgacggcatctacggctcaacattttttgtagccacaggcttccacggacttcacgtcattattggctcaactttcctcactatctgcttcatccgccaactaatatttcactttacatccaaacatcactttggcttcgaagccgccgcctgatactggcattttgtagatgtggtttgactatttctgtatgtctccatctattgatgagggtcttactcttttagtataaatagtaccgttaacttccaattaactagttttgacaacattcaaaaaagagtaataaacttcgccttaattttaataatcaacaccctcctagccttactactaataattattacattttgactaccacaactcaacggctacatagaaaaatccaccccttacgagtgcggcttcgaccctatatcccccgcccgcgtccctttctccataaaattcttcttagtagctattaccttcttattatttgatctagaaattgccctccttttacccctaccatgagccctacaaacaactaacctgccactaatagttatgtcatccctcttattaatcatcatcctagccctaagtctggcctatgagtgactacaaaaaggattagactgagccgaattggtatatagtttaaacaaaacgaatgatttcgactcattaaattatgataatcatatttaccaaatgcccctcatttacataaatattatactagcatttaccatctcacttctaggaatactagtatatcgctcacacctcatatcctccctactatgcctagaaggaataatactatcgctgttcattatagctactctcataaccctcaacacccactccctcttagccaatattgtgcctattgccatactagtctttgccgcctgcgaagcagcggtgggcctagccctactagtctcaatctccaacacatatggcctagactacgtacataacctaaacctactccaatgctaaaactaatcgtcccaacaattatattactaccactgacatgactttccaaaaaacacataatttgaatcaacacaaccacccacagcctaattattagcatcatccctctactattttttaaccaaatcaacaacaacctatttagctgttccccaaccttttcctccgaccccctaacaacccccctcctaatactaactacctgactcctacccctcacaatcatggcaagccaacgccacttatccagtgaaccactatcacgaaaaaaactctacctctctatactaatctccctacaaatctccttaattataacattcacagccacagaactaatcatattttatatcttcttcgaaaccacacttatccccaccttggctatcatcacccgatgaggcaaccagccagaacgcctgaacgcaggcacatacttcctattctacaccctagtaggctcccttcccctactcatcgcactgatttacactcacaacaccctaggctcactaaacattctactactcactctcactgcccaagaactatcaaactcctgagccaacaacttaatatgactagcttacacaatagcttttatagtaaagatacctctttacggactccacttatgactccctaaagcccatgtcgaagcccccatcgctgggtcaatagtacttgccgcagtactcttaaaactaggcggctatggtataatacgcctcacactcattctcaaccccctgacaaaacatatagcctaccccttccttgtactatccctatgaggcataattataacaagctccatctgcctacgacaaacagacctaaaatcgctcattgcatactcttcaatcagccacatagccctcgtagtaacagccattctcatccaaaccccctgaagcttcaccggcgcagtcattctcataatcgcccacggacttacatcctcattactattctgcctagcaaactcaaactacgaacgcactcacagtcgcatcataatcctctctcaaggacttcaaactctactcccactaatagctttttgatgacttctagcaagcctcgctaacctcgccttaccccccactattaacctactgggagaactctctgtgctagtaaccacgttctcctgatcaaatatcactctcctacttacaggactcaacatactagtcacagccctatactccctctacatatttaccacaacacaatggggctcactcacccaccacattaacaacataaaaccctcattcacacgagaaaacaccctcatgttcatacacctatcccccattctcctcctatccctcaaccccgacatcattaccgggttttcctcttgtaaatatagtttaaccaaaacatcagattgtgaatctgacaacagaggcttacgaccccttatttaccgagaaagctcacaagaactgctaactcatgcccccatgtctaacaacatggctttctcaacttttaaaggataacagctatccattggtcttaggccccaaaaattttggtgcaactccaaataaaagtaataaccatgcacactactataaccaccctaaccctgacttccctaattccccccatccttaccaccctcgttaaccctaacaaaaaaaactcatacccccattatgtaaaatccattgtcgcatccacctttattatcagtctcttccccacaacaatattcatgtgcctagaccaagaagttattatctcgaactgacactgagccacaacccaaacaacccagctctccctaagcttcaaactagactacttctccataatattcatccctgtggcattgttcgttacatggtccatcatagaattctcactgtgatatataaactcagacccaaacattaatcagttcttcaaatatctactcatcttcctaattaccatactaatcttagttaccgctaacaacctattccaactgttcatcggctgagagggcgtaggaattatatccttcttgctcatcagttgatgatacgcccgagcagatgccaacacagcagccattcaagcaatcctatacaaccgtatcggcgatatcggtttcatcctcgccttagcatgatttatcctacactccaactcatgagacccacaacaaatagcccttctaaacgctaatccaagcctcaccccactactaggcctcctcctagcagcagcaggcaaatcagcccaattaggtctccacccctgactcccctcagccatagaaggccccaccccagtctcagccctactccactcaagcactatagttgtagcaggaatcttcttactcatccgcttccaccccctagcagaaaatagcccactaatccaaactctaacactatgcttaggcgctatcaccactctgttcgcagcagtctgcgcccttacacaaaatgacatcaaaaaaatcgtagccttctccacttcaagtcaactaggactcataatagttacaatcggcatcaaccaaccacacctagcattcctgcacatctgtacccacgccttcttcaaagccatactatttatgtgctccgggtccatcatccacaaccttaacaatgaacaagatattcgaaaaataggaggactactcaaaaccatacctctcacttcaacctccctcaccattggcagcctagcattagcaggaatacctttcctcacaggtttctactccaaagaccacatcatcgaaaccgcaaacatatcatacacaaacgcctgagccctatctattactctcatcgctacctccctgacaagcgcctatagcactcgaataattcttctcaccctaacaggtcaacctcgcttccccacccttactaacattaacgaaaataaccccaccctactaaaccccattaaacgcctgacagccggaagcctattcgcaggatttctcattactaacaacatttcccccgcatcccccttccaaacaacaatccccctctacctaaaactcacagccctcgctgtcactttcctaggacttctaacagccctagacctcaactacctaaccaacaaacttaaaataaaatccccactatgcacattttatttctccaacatactcggattctaccctagcatcacacaccgcacaatcccctatctaggccttcttacgagccaaaacctgcccctactcctcctagacctaacctgactagaaaagctattacctaaaacaatttcacagcaccaaatctccacctccatcatcacctcaacccaaaaaggcataattaaactttacttcctctctttcttcttcccactcatcctaaccctactcctaatcacataacctattcccccgagcaatctcaattacaatatatacaccaacaaacaatgttcaaccagtaactactactaatcaacgcccataatcatacaaagcccccgcaccaataggatcctcccgaatcaaccctgacccctctccttcataaattattcagcttcctacactattaaagtttaccacaaccaccaccccatcatactctttcacccacagcaccaatcctacctccatcgctaaccccactaaaacactcaccaagacctcaacccctgacccccatgcctcaggatactcctcaatagccatcgctgtagtatatccaaagacaaccatcattccccctaaataaattaaaaaaactattaaacccatataacctcccccaaaattcagaataataacacacccgaccacaccgctaacaatcaatactaaacccccataaataggagaaggcttagaagaaaaccccacaaaccccattactaaacccacactcaacagaaacaaagcatacatcattattctcgcacggactacaaccacgaccaatgatatgaaaaaccatcgttgtatttcaactacaagaacaccaatgaccccaatacgcaaaattaaccccctaataaaattaattaaccactcattcatcgacctccccaccccatccaacatctccgcatgatgaaacttcggctcactccttggcgcctgcctgatcctccaaatcaccacaggactattcctagccatgcactactcaccagacgcctcaaccgccttttcatcaatcgcccacatcactcgagacgtaaattatggctgaatcatccgctaccttcacgccaatggcgcctcaatattctttatctgcctcttcctacacatcgggcgaggcctatattacggatcatttctctactcagaaacctgaaacatcggcattatcctcctgcttgcaactatagcaacagccttcataggctatgtcctcccgtgaggccaaatatcattctgaggggccacagtaattacaaacttactatccgccatcccatacattgggacagacctagttcaatgaatctgaggaggctactcagtagacagtcccaccctcacacgattctttacctttcacttcatcttgcccttcattattgcagccctagcagcactccacctcctattcttgcacgaaacgggatcaaacaaccccctaggaatcacctcccattccgataaaatcaccttccacccttactacacaatcaaagacgccctcggcttacttctcttcattctctccttaatgacattaacactattctcaccagacctcctaggcgacccagacaattataccctagccaaccccttaaacacccctccccacatcaagcccgaatgatatttcctattcgcctacacaattctccgatccgtccctaacaaactaggaggcgtccttgccctattactatccatcctcatcctagcaataatccccatcctccatatatccaaacaacaaagcataatatttcgcccactaagccaatcactttattgactcctagccgcagacctcctcattctaacctgaatcggaggacaaccagtaagctacccttttaccatcattggacaagtagcatccgtactatacttcacaacaatcctaatcctaataccaactatctccctaattgaaaacaaaatactcaaatgggcctgtccttgtagtataaactaatacaccagtcttgtaaaccggagatgaaaacctttttccaaggacaaatcagagaaaaagtctttaactccaccattagcacccaaagctaagattctaatttaaactattctctgttctttcatggggaagcagatttgggtaccacccaagtattgacttacccatcaacaaccgctatgtatttcgtacattactgccagccaccatgaatattgcacggtaccataaatacttgaccacctgtagtacataaaaacccaatccacatcaaaaccccctccctatgcttacaagcaagtacagcaatcaaccctcaactatcacacatcaactgcaactccaaagtcacccctcacccactaggataccaacaaacctacccacccttagcagtacatggtacataaagccatttaccgtacatagcacattacagtcaaatcccttctcgtccccatggatgacccccctcagataggggtcccttgaccaccatcctccgtgaaatcaatatcccgcacaagagtgctactctcctcgctccgggcccataacacttgggggtagctaaagtgaactgtatccgacatctggttcctacttcagggtcataaagcctaaatagcccacacgttccccttaaataagacatcacgatg

SEQ ID NO: 75 - DNA, 16572 bp, Homo sapiens mitochondrial
  3110: "n" refers to a nucleotide at position 3107 of the Cambridge Reference Sequence (CRS, Anderson et al. 1981 Nature 290:457-465), later determined to be absent from the human mtDNA sequence according to the revised CRS (rCRS, Andrews et al. 1999 Nature Genetics 23:147); "n" therefore represents a single nucleotide deletion at a position corresponding to nucleotide 3107 of SEQ ID NO:1 as provided herein.
gatcacaggtctatcaccctattaaccactcacgggagctctccatgcatttggtattttcgtctggggggtatgcacgcgatagcattgcgagacgctggagccggagcaccctatgtcgcagtatctgtctttgattcctgcctcatcctattatttatcgcacctacgttcaatattacaggcgaacatacttactaaagtgtgttaattaattaatgcttgtaggacataacaataacaattgaatgtctgcacagccgctttccacacagacatcataacaaaaaatttccaccaaaccccccctccccccccgcttctggccacagcacttaaacacatctctgccaaaccccaaaaacaaagaaccctaacaccagcctaaccagatttcaaattttatcttttggcggtatgcacttttaacagtcaccccccaactaacacattattttcccctcccactcccatactactaatctcatcaatacaacccccgcccatcctacccagcacacacacaccgctgctaaccccataccccgaaccaaccaaaccccaaagacaccccccacagtttatgtagcttacctcctcaaagcaatacactgaaaatgtttagacgggctcacatcaccccataaacaaataggtttggtcctagcctttctattagctcttagtaagattacacatgcaagcatccccgttccagtgagttcaccctctaaatcaccacgatcaaaagggacaagcatcaagcacgcagcaatgcagctcaaaacgcttagcctagccacacccccacgggaaacagcagtgattaacctttagcaataaacgaaagtttaactaagctatactaaccccagggttggtcaatttcgtgccagccaccgcggtcacacgattaacccaagtcaatagaagccggcgtaaagagtgttttagatcaccccctccccaataaagctaaaactcacctgagttgtaaaaaactccagttgacacaaaatagactacgaaagtggctttaacatatctgaacacacaatagctaagacccaaactgggattagataccccactatgcttagccctaaacctcaacagttaaatcaacaaaactgctcgccagaacactacgagccacagcttaaaactcaaaggacctggcggtgcttcatatccctctagaggagcctgttctgtaatcgataaaccccgatcaacctcaccacctcttgctcagcctatataccgccatcttcagcaaaccctgatgaaggctacaaagtaagcgcaagtacccacgtaaagacgttaggtcaaggtgtagcccatgaggtggcaagaaatgggctacattttctaccccagaaaactacgatagcccttatgaaacttaagggtcgaaggtggatttagcagtaaactgagagtagagtgcttagttgaacagggccctgaagcgcgtacacaccgcccgtcaccctcctcaagtatacttcaaaggacatttaactaaaacccctacgcatttatatagaggagacaagtcgtaacatggtaagtgtactggaaagtgcacttggacgaaccagagtgtagcttaacacaaagcacccaacttacacttaggagatttcaacttaacttgaccgctctgagctaaacctagccccaaacccactccaccttactaccagacaaccttagccaaaccatttacccaaataaagtataggcgatagaaattgaaacctggcgcaatagatatagtaccgcaagggaaagatgaaaaattataaccaagcataatatagcaaggactaacccctataccttctgcataatgaattaactagaaataactttgcaaggagagccaaagctaagacccccgaaaccagacgagctacctaagaacagctaaaagagcacacccgtctatgtagcaaaatagtgggaagatttataggtagaggcgacaaacctaccgagcctggtgatagctggttgtccaagatagaatcttagttcaactttaaatttgcccacagaaccctctaaatccccttgtaaatttaactgttagtccaaagaggaacagctctttggacactaggaaaaaaccttgtagagagagtaaaaaatttaacacccatagtaggcctaaaagcagccaccaattaagaaagcgttcaagctcaacacccactacctaaaaaatcccaaacatataactgaactcctcacacccaattggaccaatctatcaccctatagaagaactaatgttagtataagtaacatgaaaacattctcctccgcataagcctgcgtcagattaaaacactgaactgacaattaacagcccaatatctacaatcaaccaacaagtcattattaccctcactgtcaacccaacacaggcatgctcataaggaaaggttaaaaaaagtaaaaggaactcggcaaatcttaccccgcctgtttaccaaaaacatcacctctagcatcaccagtattagaggcaccgcctgcccagtgacacatgtttaacggccgcggtaccctaaccgtgcaaaggtagcataatcacttgttccttaaatagggacctgtatgaatggctccacgagggttcagctgtctcttacttttaaccagtgaaattgacctgcccgtgaagaggcgggcataacacagcaagacgagaagaccctatggagctttaatttattaatgcaaacagtacctaacaaacccacaggtcctaaactaccaaacctgcattaaaaatttcggttggggcgacctcggagcagaacccaacctccgagcagtacatgctaagacttcaccagtcaaagcgaactactatactcaattgatccaataacttgaccaacggaacaagttaccctagggataacagcgcaatcctattctagagtccatatcaacaatagggtttacgacctcgatgttggatcaggacatcccgatggtgcagccgctattaaaggttcgtttgttcaacgattaaagtcctacgtgatctgagttcagaccggagtaatccaggtcggtttctatctacnttcaaattcctccctgtacgaaaggacaagagaaataaggcctacttcacaaagcgccttcccccgtaaatgatatcatctcaacttagtattatacccacacccacccaagaacagggtttgttaagatggcagagcccggtaatcgcataaaacttaaaactttacagtcagaggttcaattcctcttcttaacaacatacccatggccaacctcctactccttattgtacccattctaatcgcaatggcattcctaatgcttaccgaacgaaaaattctaggctatatacaactacgcaaaggccccaacgttgtaggcccctacgggctactacaacccttcgctgacgccataaaactcttcaccaaagagcccctaaaacccgccacatctaccatcaccctctacatcaccgccccgaccttagctctcaccatcgctcttctactatgaacccccctccccatacccaaccccctggtcaacctcaacctaggcctcctatttattctagccacctctagcctagccgtttactcaatcctctgatcagggtgagcatcaaactcaaactacgccctgatcggcgcactgcgagcagtagcccaaacaatctcatatgaagtcaccctagccatcattctactatcaacattactaataagtggctcctttaacctctccacccttatcacaacacaagaacacctctgattactcctgccatcatgacccttggccataatatgatttatctccacactagcagagaccaaccgaacccccttcgaccttgccgaaggggagtccgaactagtctcaggcttcaacatcgaatacgccgcaggccccttcgccctattcttcatagccgaatacacaaacattattataataaacaccctcaccactacaatcttcctaggaacaacatatgacgcactctcccctgaactctacacaacatattttgtcaccaagaccctacttctaacctccctgttcttatgaattcgaacagcatacccccgattccgctacgaccaactcatacacctcctatgaaaaaacttcctaccactcaccctagcattacttatatgatatgtctccatacccattacaatctccagcattccccctcaaacctaagaaatatgtctgataaaagagttactttgatagagtaaataataggagcttaaacccccttatttctaggactatgagaatcgaacccatccctgagaatccaaaattctccgtgccacctatcacaccccatcctaaagtaaggtcagctaaataagctatcgggcccataccccgaaaatgttggttatacccttcccgtactaattaatcccctggcccaacccgtcatctactctaccatctttgcaggcacactcatcacagcgctaagctcgcactgattttttacctgagtaggcctagaaataaacatgctagcttttattccagttctaaccaaaaaaataaaccctcgttccacagaagctgccatcaagtatttcctcacgcaagcaaccgcatccataatccttctaatagctatcctcttcaacaatatactctccggacaatgaaccataaccaatactaccaatcaatactcatcattaataatcataatggctatagcaataaaactaggaatagccccctttcacttctgagtcccagaggttacccaaggcacccctctgacatccggcctgcttcttctcacatgacaaaaactagcccccatctcaatcatataccaaatctctccctcactaaacgtaagccttctcctcactctctcaatcttatccatcatagcaggcagttgaggtggattaaaccaaacccagctacgcaaaatcttagcatactcctcaattacccacataggatgaataatagcagttctaccgtacaaccctaacataaccattcttaatttaactatttatattatcctaactactaccgcattcctactactcaacttaaactccagcaccacgaccctactactatctcgcacctgaaacaagctaacatgactaacacccttaattccatccaccctcctctccctaggaggcctgcccccgctaaccggctttttgcccaaatgggccattatcgaagaattcacaaaaaacaatagcctcatcatccccaccatcatagccaccatcaccctccttaacctctacttctacctacgcctaatctactccacctcaatcacactactccccatatctaacaacgtaaaaataaaatgacagtttgaacatacaaaacccaccccattcctccccacactcatcgcccttaccacgctactcctacctatctccccttttatactaataatcttatagaaatttaggttaaatacagaccaagagccttcaaagccctcagtaagttgcaatacttaatttctgtaacagctaaggactgcaaaaccccactctgcatcaactgaacgcaaatcagccactttaattaagctaagcccttactagaccaatgggacttaaacccacaaacacttagttaacagctaagcaccctaatcaactggcttcaatctacttctcccgccgccgggaaaaaaggcgggagaagccccggcaggtttgaagctgcttcttcgaatttgcaattcaatatgaaaatcacctcggagctggtaaaaagaggcctaacccctgtctttagatttacagtccaatgcttcactcagccattttacctcacccccactgatgttcgccgaccgttgactattctctacaaaccacaaagacattggaacactatacctattattcggcgcatgagctggagtcctaggcacagctctaagcctccttattcgagccgagctgggccagccaggcaaccttctaggtaacgaccacatctacaacgttatcgtcacagcccatgcatttgtaataatcttcttcatagtaatacccatcataatcggaggctttggcaactgactagttcccctaataatcggtgcccccgatatggcgtttccccgcataaacaacataagcttctgactcttacctccctctctcctactcctgctcgcatctgctatagtggaggccggagcaggaacaggttgaacagtctaccctcccttagcagggaactactcccaccctggagcctccgtagacctaaccatcttctccttacacctagcaggtgtctcctctatcttaggggccatcaatttcatcacaacaattatcaatataaaaccccctgccataacccaataccaaacgcccctcttcgtctgatccgtcctaatcacagcagtcctacttctcctatctctcccagtcctagctgctggcatcactatactactaacagaccgcaacctcaacaccaccttcttcgaccccgccggaggaggagaccccattctataccaacacctattctgatttttcggtcaccctgaagtttatattcttatcctaccaggcttcggaataatctcccatattgtaacttactactccggaaaaaaagaaccatttggatacataggtatggtctgagctatgatatcaattggcttcctagggtttatcgtgtgagcacaccatatatttacagtaggaatagacgtagacacacgagcatatttcacctccgctaccataatcatcgctatccccaccggcgtcaaagtatttagctgactcgccacactccacggaagcaatatgaaatgatctgctgcagtgctctgagccctaggattcatctttcttttcaccgtaggtggcctgactggcattgtattagcaaactcatcactagacatcgtactacacgacacgtactacgttgtagcccacttccactatgtcctatcaataggagctgtatttgccatcataggaggcttcattcactgatttcccctattctcaggctacaccctagaccaaacctacgccaaaatccatttcactatcatattcatcggcgtaaatctaactttcttcccacaacactttctcggcctatccggaatgccccgacgttactcggactaccccgatgcatacaccacatgaaacatcctatcatctgtaggctcattcatttctctaacagcagtaatattaataattttcatgatttgagaagccttcgcttcgaagcgaaaagtcctaatagtagaagaaccctccataaacctggagtgactatatggatgccccccaccctaccacacattcgaagaacccgtatacataaaatctagacaaaaaaggaaggaatcgaaccccccaaagctggtttcaagccaaccccatggcctccatgactttttcaaaaaggtattagaaaaaccatttcataactttgtcaaagttaaattataggctaaatcctatatatcttaatggcacatgcagcgcaagtaggtctacaagacgctacttcccctatcatagaagagcttatcacctttcatgatcacgccctcataatcattttccttatctgcttcctagtcctgtatgcccttttcctaacactcacaacaaaactaactaatactaacatctcagacgctcaggaaatagaaaccgtctgaactatcctgcccgccatcatcctagtcctcatcgccctcccatccctacgcatcctttacataacagacgaggtcaacgatccctcccttaccatcaaatcaattggccaccaatggtactgaacctacgagtacaccgactacggcggactaatcttcaactcctacatacttcccccattattcctagaaccaggcgacctgcgactccttgacgttgacaatcgagtagtactcccgattgaagcccccattcgtataataattacatcacaagacgtcttgcactcatgagctgtccccacattaggcttaaaaacagatgcaattcccggacgtctaaaccaaaccactttcaccgctacacgaccgggggtatactacggtcaatgctctgaaatctgtggagcaaaccacagtttcatgcccatcgtcctagaattaattcccctaaaaatctttgaaatagggcccgtatttaccctatagcaccccctctaccccctctagagcccactgtaaagctaacttagcattaaccttttaagttaaagattaagagaaccaacacctctttacagtgaaatgccccaactaaatactaccgtatggcccaccataattacccccatactccttacactattcctcatcacccaactaaaaatattaaacacaaactaccacctacctccctcaccaaagcccataaaaataaaaaattataacaaaccctgagaaccaaaatgaacgaaaatctgttcgcttcattcattgcccccacaatcctaggcctacccgccgcagtactgatcattctatttccccctctattgatccccacctccaaatatctcatcaacaaccgactaatcaccacccaacaatgactaatcaaactaacctcaaaacaaatgataaccatacacaacactaaaggacgaacctgatctcttatactagtatccttaatcatttttattgccacaactaacctcctcggactcctgcctcactcatttacaccaaccacccaactatctataaacctagccatggccatccccttatgagcgggcgcagtgattataggctttcgctctaagattaaaaatgccctagcccacttcttaccacaaggcacacctacaccccttatccccatactagttattatcgaaaccatcagcctactcattcaaccaatagccctggccgtacgcctaaccgctaacattactgcaggccacctactcatgcacctaattggaagcgccaccctagcaatatcaaccattaaccttccctctacacttatcatcttcacaattctaattctactgactatcctagaaatcgctgtcgccttaatccaagcctacgttttcacacttctagtaagcctctacctgcacgacaacacataatgacccaccaatcacatgcctatcatatagtaaaacccagcccatgacccctaacaggggccctctcagccctcctaatgacctccggcctagccatgtgatttcacttccactccataacgctcctcatactaggcctactaaccaacacactaaccatataccaatgatggcgcgatgtaacacgagaaagcacataccaaggccaccacacaccacctgtccaaaaaggccttcgatacgggataatcctatttattacctcagaagtttttttcttcgcaggatttttctgagccttttaccactccagcctagcccctaccccccaattaggagggcactggcccccaacaggcatcaccccgctaaatcccctagaagtcccactcctaaacacatccgtattactcgcatcaggagtatcaatcacctgagctcaccatagtctaatagaaaacaaccgaaaccaaataattcaagcactgcttattacaattttactgggtctctattttaccctcctacaagcctcagagtacttcgagtctcccttcaccatttccgacggcatctacggctcaacattttttgtagccacaggcttccacggacttcacgtcattattggctcaactttcctcactatctgcttcatccgccaactaatatttcactttacatccaaacatcactttggcttcgaagccgccgcctgatactggcattttgtagatgtggtttgactatttctgtatgtctccatctattgatgagggtcttactcttttagtataaatagtaccgttaacttccaattaactagttttgacaacattcaaaaaagagtaataaacttcgccttaattttaataatcaacaccctcctagccttactactaataattattacattttgactaccacaactcaacggctacatagaaaaatccaccccttacgagtgcggcttcgaccctatatcccccgcccgcgtccctttctccataaaattcttcttagtagctattaccttcttattatttgatctagaaattgccctccttttacccctaccatgagccctacaaacaactaacctgccactaatagttatgtcatccctcttattaatcatcatcctagccctaagtctggcctatgagtgactacaaaaaggattagactgaaccgaattggtatatagtttaaacaaaacgaatgatttcgactcattaaattatgataatcatatttaccaaatgcccctcatttacataaatattatactagcatttaccatctcacttctaggaatactagtatatcgctcacacctcatatcctccctactatgcctagaaggaataatactatcgctgttcattatagctactctcataaccctcaacacccactccctcttagccaatattgtgcctattgccatactagtctttgccgcctgcgaagcagcggtgggcctagccctactagtctcaatctccaacacatatggcctagactacgtacataacctaaacctactccaatgctaaaactaatcgtcccaacaattatattactaccactgacatgactttccaaaaaacacataatttgaatcaacacaaccacccacagcctaattattagcatcatccctctactattttttaaccaaatcaacaacaacctatttagctgttccccaaccttttcctccgaccccctaacaacccccctcctaatactaactacctgactcctacccctcacaatcatggcaagccaacgccacttatccagtgaaccactatcacgaaaaaaactctacctctctatactaatctccctacaaatctccttaattataacattcacagccacagaactaatcatattttatatcttcttcgaaaccacacttatccccaccttggctatcatcacccgatgaggcaaccagccagaacgcctgaacgcaggcacatacttcctattctacaccctagtaggctcccttcccctactcatcgcactaatttacactcacaacaccctaggctcactaaacattctactactcactctcactgcccaagaactatcaaactcctgagccaacaacttaatatgactagcttacacaatagcttttatagtaaagatacctctttacggactccacttatgactccctaaagcccatgtcgaagcccccatcgctgggtcaatagtacttgccgcagtactcttaaaactaggcggctatggtataatacgcctcacactcattctcaaccccctgacaaaacacatagcctaccccttccttgtactatccctatgaggcataattataacaagctccatctgcctacgacaaacagacctaaaatcgctcattgcatactcttcaatcagccacatagccctcgtagtaacagccattctcatccaaaccccctgaagcttcaccggcgcagtcattctcataatcgcccacgggcttacatcctcattactattctgcctagcaaactcaaactacgaacgcactcacagtcgcatcataatcctctctcaaggacttcaaactctactcccactaatagctttttgatgacttctagcaagcctcgctaacctcgccttaccccccactattaacctactgggagaactctctgtgctagtaaccacgttctcctgatcaaatatcactctcctacttacaggactcaacatactagtcacagccctatactccctctacatatttaccacaacacaatggggctcactcacccaccacattaacaacataaaaccctcattcacacgagaaaacaccctcatgttcatacacctatcccccattctcctcctatccctcaaccccgacatcattaccgggttttcctcttgtaaatatagtttaaccaaaacatcagattgtgaatctgacaacagaggcttacgaccccttatttaccgagaaagctcacaagaactgctaactcatgcccccatgtctaacaacatggctttctcaacttttaaaggataacagctatccattggtcttaggccccaaaaattttggtgcaactccaaataaaagtaataaccatgcacactactataaccaccctaaccctgacttccctaattccccccatccttaccaccctcgttaaccctaacaaaaaaaactcatacccccattatgtaaaatccattgtcgcatccacctttattatcagtctcttccccacaacaatattcatgtgcctagaccaagaagttattatctcgaactgacactgagccacaacccaaacaacccagctctccctaagcttcaaactagactacttctccataatattcatccctgtagcattgttcgttacatggtccatcatagaattctcactgtgatatataaactcagacccaaacattaatcagttcttcaaatatctactcatcttcctaattaccatactaatcttagttaccgctaacaacctattccaactgttcatcggctgagagggcgtaggaattatatccttcttgctcatcagttgatgatacgcccgagcagatgccaacacagcagccattcaagcaatcctatacaaccgtatcggcgatatcggtttcatcctcgccttagcatgatttatcctacactccaactcatgagacccacaacaaatagcccttctaaacgctaatccaagcctcaccccactactaggcctcctcctagcagcagcaggcaaatcagcccaattaggtctccacccctgactcccctcagccatagaaggccccaccccagtctcagccctactccactcaagcactatagttgtagcaggaatcttcttactcatccgcttccaccccctagcagaaaatagcccactaatccaaactctaacactatgcttaggcgctatcaccactctgttcgcagcagtctgcgcccttacacaaaatgacatcaaaaaaatcgtagccttctccacttcaagtcaactaggactcataatagttacaatcggcatcaaccaaccacacctagcattcctgcacatctgtacccacgccttcttcaaagccatactatttatgtgctccgggtccatcatccacaaccttaacaatgaacaagatattcgaaaaataggaggactactcaaaaccatacctctcacttcaacctccctcaccattggcagcctagcattagcaggaatacctttcctcacaggtttctactccaaagaccacatcatcgaaaccgcaaacatatcatacacaaacgcctgagccctatctattactctcatcgctacctccctgacaagcgcctatagcactcgaataattcttctcaccctaacaggtcaacctcgcttccccacccttactaacattaacgaaaataaccccaccctactaaaccccattaaacgcctggcagccggaagcctattcgcaggatttctcattactaacaacatttcccccgcatcccccttccaaacaacaatccccctctacctaaaactcacagccctcgctgtcactttcctaggacttctaacagccctagacctcaactacctaaccaacaaacttaaaataaaatccccactatgcacattttatttctccaacatactcggattctaccctagcatcacacaccgcacaatcccctatctaggccttcttacgagccaaaacctgcccctactcctcctagacctaacctgactagaaaagctattacctaaaacaatttcacagcaccaaatctccacctccatcatcacctcaacccaaaaaggcataattaaactttacttcctctctttcttcttcccactcatcctaaccctactcctaatcacataacctattcccccgagcaatctcaattacaatatatacaccaacaaacaatgttcaaccagtaactactactaatcaacgcccataatcatacaaagcccccgcaccaataggatcctcccgaatcaaccctgacccctctccttcataaattattcagcttcctacactattaaagtttaccacaaccaccaccccatcatactctttcacccacagcaccaatcctacctccatcgctaaccccactaaaacactcaccaagacctcaacccctgacccccatgcctcaggatactcctcaatagccatcgctgtagtatatccaaagacaaccatcattccccctaaataaattaaaaaaactattaaacccatataacctcccccaaaattcagaataataacacacccgaccacaccgctaacaatcaatactaaacccccataaataggagaaggcttagaagaaaaccccacaaaccccattactaaacccacactcaacagaaacaaagcatacatcattattctcgcacggactacaaccacgaccaatgatatgaaaaaccatcgttgtatttcaactacaagaacaccaatgaccccaatacgcaaaactaaccccctaataaaattaattaaccactcattcatcgacctccccaccccatccaacatctccgcatgatgaaacttcggctcactccttggcgcctgcctgatcctccaaatcaccacaggactattcctagccatgcactactcaccagacgcctcaaccgccttttcatcaatcgcccacatcactcgagacgtaaattatggctgaatcatccgctaccttcacgccaatggcgcctcaatattctttatctgcctcttcctacacatcgggcgaggcctatattacggatcatttctctactcagaaacctgaaacatcggcattatcctcctgcttgcaactatagcaacagccttcataggctatgtcctcccgtgaggccaaatatcattctgaggggccacagtaattacaaacttactatccgccatcccatacattgggacagacctagttcaatgaatctgaggaggctactcagtagacagtcccaccctcacacgattctttacctttcacttcatcttgcccttcattattgcagccctagcagcactccacctcctattcttgcacgaaacgggatcaaacaaccccctaggaatcacctcccattccgataaaatcaccttccacccttactacacaatcaaagacgccctcggcttacttctcttccttctctccttaatgacattaacactattctcaccagacctcctaggcgacccagacaattataccctagccaaccccttaaacacccctccccacatcaagcccgaatgatatttcctattcgcctacacaattctccgatccgtccctaacaaactaggaggcgtccttgccctattactatccatcctcatcctagcaataatccccatcctccatatatccaaacaacaaagcataatatttcgcccactaagccaatcactttattgactcctagccgcagacctcctcattctaacctgaatcggaggacaaccagtaagctacccttttaccatcattggacaagtagcatccgtactatacttcacaacaatcctaatcctaataccaactatctccctaattgaaaacaaaatactcaaatgggcctgtccttgtagtataaactaatacaccagtcttgtaaaccggagatgaaaacctttttccaaggacaaatcagagaaaaagtctttaactccaccattagcacccaaagctaagattctaatttaaactattctctgttctttcatggggaagcagatttgggtaccacccaagtattgactcacccatcaacaaccgctatgtatttcgtacattactgccagccaccatgaatattgtacggtaccataaatacttgaccacctgtagtacataaaaacccaatccacatcaaaaccccctccccatgcttacaagcaagtacagcaatcaaccctcaactatcacacatcaactgcaactccaaagccacccctcacccactaggataccaacaaacctacccgcccttaacagtacatagtacataaagccatttaccgtacatagcacattacagtcaaatcccttctcgtccccatggatgacccccctcagataggggtcccttgaccaccatcctccgtgaaatcaatatcccgcacaagagtgctactctcctcgctccgggcccataacacttgggggtagctaaagtgaactgtatccgacatctggttcctacttcagggccataaagcctaaatagcccacacgttccccttaaataagacatcacgatg

SEQ ID NO: 76 - DNA, 16570 bp, Homo sapiens mitochondrial
  3108: "n" refers to a nucleotide at position 3107 of the Cambridge Reference Sequence (CRS, Anderson et al. 1981 Nature 290:457-465), later determined to be absent from the human mtDNA sequence according to the revised CRS (rCRS, Andrews et al. 1999 Nature Genetics 23:147); "n" therefore represents a single nucleotide deletion at a position corresponding to nucleotide 3107 of SEQ ID NO:1 as provided herein.
gatcacaggtctatcaccctattaaccactcacgggagctctccatgcatttggtattttcgtctggggggtgtgcacgcgatagcattgcgagacgctggagccggagcaccttatgtcgcagtatctgtctttgattcctgcctcatcctattatttatcgcacctacgttcaatattacaggcgagcatacctactaaagtgtgttaattaattaatgcttgtaggacataataataacaattgaatgtctgcacagccgctttccacacagacatcataacaaaaaatttccaccaaaccccccctcccccgccttctggccacagcacttaaacacatctctgccaaaccccaaaaacaaagaaccctaacaccagcctaaccagatttcaaattttatcttttggcggtatgcacttttaacagtcaccccccaactaacacattattttcccctcccactcccatactactaatctcatcaatacaaccctcgcccatcctacccagcacacacacaccgctgctaaccccataccccgaaccaaccaaaccccaaagacaccccccacagtttatgtagcttaccccctcaaagcaatacactgaaaatgtttagacgggctcacatcaccccataaacaaataggtttggtcctagcctttctattagctcttagtaagattacacatgcaagcatccccgttccagtgagttcaccctctaaatcaccacgatcaaaagggacaagcatcaagcacgcagcaatgcagctcaaaacgcttagcctagccacacccccacgggaaacagcagtgattaacctttagcaataaacgaaagtttaactaagctatactaaccccagggttggtcaatttcgtgccagccaccgcggtcacacgattaacccaagtcaatagaagccggcgtaaagagtgttttagatcaccccctccccaataaagctaaaactcacctgagttgtaaaaaactccagttgacacaaaatagactacgaaagtggctttaacatatctgaacacacaatagctaagacccaaactgggattagataccccactatgcttagccctaaacctcaacagttaaatcaacaaaactgctcgccagaacactacgagccacagcttaaaactcaaaggacctggcggtgcttcatacccctctagaggagcctgttctgtaatcgataaaccccgatcaacctcaccacctcttgctcagcctatataccgccatcttcagcaaaccctgatgaaggctacaaagtaagcgcaagtacccacgtaaagacgttaggtcaaggtgtagcccatgaggtggcaagaaatgggctacattttctaccccagaaaactacgatagcccttatgaaacttaagggtcgaaggtggatttagcagtaaactgagagtagagtgcttagttgaacagggccctgaagcgcgtacacaccgcccgtcaccctcctcaagtatacttcaaaggacatttaactaaaacccctacgcatttatatagaggagacaagtcgtaacatggtaagtgtactggaaagtgcacttggacgaaccagagtgtagcttaacacaaagcacccaacttacacttaggagatttcaacttaacttgaccgctctgagctaaacctagccccaaacccactccaccttactaccagacaaccttagccaaaccatttacccaaataaagtataggcgatagaaattgaaacctggcgcaatagatatagtaccgcaagggaaagatgaaaaattatagccaagcataatatagcaaggactaacccctataccttctgcataatgaattaactagaaataactttgcaaggagagccaaagctaagacccccgaaaccagacgagctacctaagaacagctaaaagagcacacccgtctatgtagcaaaatagtgggaagatttataggtagaggcgacaaacctaccgagcctggtgatagctggttgtccaagatagaatcttagttcaactttaaatttgcccacagaaccctctaaatccccttgtaaatttaactgttagtccaaagaggaacagctctttggacactaggaaaaaaccttgtagagagagtaaaaaatttaacacccatagtaggcctaaaagcagccaccaattaagaaagcgttcaagctcaacacccactacctaaaaaatcccaaacatataactgaactcctcacacccaattggaccaatctatcaccctatagaagaactaatgttagtataagtaacatgaaaacattctcctccgcataagcctgcgtcagattaaaacactgaactgacaattaacagcccaatatctacaatcaaccaacaagtcattattaccctcactgtcaacccaacacaggcatgctcataaggaaaggttaaaaaaagtaaaaggaactcggcaaaccttaccccgcctgtttaccaaaaacatcacctctagcatcaccagtattagaggcaccgcctgcccagtgacacatgtttaacggccgcggtaccctaaccgtgcaaaggtagcataatcacttgttccttaaatagggacctgtatgaatggctccacgagggttcagctgtctcttacttttaaccagtgaaattgacctgcccgtgaagaggcgggcatgacacagcaagacgagaagaccctatggagctttaatttattaatgcaaacagtacctaacaaacccacaggtcctaaactaccaaacctgcattaaaaatttcggttggggcgacctcggagcagaacccaacctccgagcagtacatgctaagacttcaccagtcaaagcgaactactatactcaattgatccaataacttgaccaacggaacaagttaccctagggataacagcgcaatcctattctagagtccatatcaacaatagggtttacgacctcgatgttggatcaggacatcccgatggtgcagccgctattaaaggttcgtttgttcaacgattaaagtcctacgtgatctgagttcagaccggagtaatccaggtcggtttctatctacnttcaaattcctccctgtacgaaaggacaagagaaataaggcctacttcacaaagcgccttcccccgtaaatgatatcatctcaacttagtattatacccacacccacccaagaacagggtttgttaagatggcagagcccggtaatcgcataaaacttaaaactttacagtcagaggttcaattcctcttcttaacaacatacccatggccaacctcctactcctcattgtacccattctaatcgcaatggcattcctaatgcttaccgaacgaaaaattctaggctatatacaactacgcaaaggccccaacgttgtaggcccctacgggctactacaacccttcgctgacgccataaaactcttcaccaaggagcccctaaaacccgccacatctaccatcaccctctacatcaccgccccgaccttagctctcaccatcgctcttctactatgaacccccctccccatacccaaccccctggtcaacctcaacctaggcctcctatttattctagccacctctagcctagccgtttactcaatcctctgatcagggtgagcatcaaactcaaactacgccctgatcggcgcactgcgagcagtagcccaaacaatctcatatgaagtcaccctagccatcattctactatcaacattactaataagtggctcctttaacctctccacccttatcacaacacaagaacacctctgattactcctgccatcatgacccttggccataatatgatttatctccacactagcagagaccaaccgaacccccttcgaccttgccgaaggggagtccgaactagtctcaggcttcaacatcgaatacgccgcaggccccttcgccctattcttcatagccgaatacacaaacattattataataaacaccctcaccactacaatcttcctaggaacaacatatgacgcactctcccctgaactctacacaacatattttgtcaccaagaccctacttctaacctccctgttcttatgaattcgaacagcatacccccgattccgctacgaccaactcatacacctcctatgaaaaaacttcctaccactcaccctagcattacttatatgatatgtctccatacccattacaatctccagcattccccctcaaacctaagaaatatgtctgataaaagagttactttgatagagtaaataataggagcttaaacccccttatttctaggactatgagaatcgaacccatccctgagaatccaaaattctccgtgccacctatcacaccccatcctaaagtaaggtcagctaaataagctatcgggcccataccccgaaaatgttggttatacccttcccgtactaattaatcccctggcccaacccgtcatctactctaccatctttgcaggcacactcatcacagcgctaagctcgcactgattttttacctgagtaggcctagaaataaacatgctagcttttattccagttctaaccaaaaaaataaaccctcgttccacagaagctgccatcaagtatttcctcacgcaagcaaccgcatccataatccttctaatagctatcctcttcaacaatatactctccggacaatgaaccataaccaatactaccaatcaatactcatcattaataatcataatggctatagcaataaaactaggaatagccccctttcacttctgagtcccagaggttacccaaggcacccctctgacatccggcctgcttcttctcacatgacaaaaactagcccccatctcaatcatataccaaatctctccctcactaaacgtaagccttctcctcactctctcaatcttatccatcatagcaggcagttgaggtggattaaaccaaacccagctacgcaaaatcttagcatactcctcaattacccacataggatgaataatagcagttctaccgtacaaccctaacataaccattcttaatttaactatttatattatcctaactactaccgcattcctactactcaacttaaactccagcaccacgaccctactactatctcgcacctgaaacaagctaacatgactaacacccttaattccatccaccctcctctccctaggaggcctgcccccgctaaccggctttttgcccaaatgggccattatcgaagaattcacaaaaaacaatagcctcatcatccccaccatcatagccaccatcaccctccttaacctctacttctacctacgcctaatctactccacctcaatcacactactccccatatctaacaacgtaaaaataaaatgacagtttgaacatacaaaacccaccccattcctccccacactcatcgcccttaccacgctactcctacctatctccccttttatactaataatcttatagaaatttaggttaaatacagaccaagagccttcaaagccctcagtaagttgcaatacttaatttctgtaacagctaaggactgcaaaaccccactctgcatcaactgaacgcaaatcagccactttaattaagctaagcccttactagaccaatgggacttaaacccacaaacacttagttaacagctaagcaccctaatcaactggcttcaatctacttctcccgccgccgggaaaaaaggcgggagaagccccggcaggtttgaagctgcttcttcgaatttgcaattcaatatgaaaatcacctcggagctggtaaaaagaggcctaacccctgtctttagatttacagtccaatgcttcactcagccattttacctcacccccactgatgttcgccgaccgttgactattctctacaaaccacaaagacattggaacactatacctattattcggcgcatgagctggagtcctaggcacagctctaagcctccttattcgagccgagctgggccagccaggcaaccttctaggtaacgaccacatctacaacgttatcgtcacagcccatgcatttgtaataatcttcttcatagtaatacccatcataatcggaggctttggcaactgactagttcccctaataatcggtgcccccgatatggcgtttccccgcataaacaacataagcttctgactcttacctccctctctcctactcctgctcgcatctgctatagtggaggccggagcaggaacaggttgaacagtctaccctcccttagcagggaactactcccaccctggagcctccgtagacctaaccatcttctccttacacctagcaggtgtctcctctatcttaggggccatcaatttcatcacaacaattatcaatataaaaccccctgccataacccaataccaaacgcccctcttcgtctgatccgtcctaatcacagcagtcctacttctcctatctctcccagtcctagctgctggcatcactatactactaacagaccgcaacctcaacaccaccttcttcgaccccgccggaggaggagaccccattctataccaacacctattctgatttttcggtcaccctgaagtttatattcttatcctaccaggcttcggaataatctcccatattgtaacttactactccggaaaaaaagaaccatttggatacataggtatggtctgagctatgatatcaattggcttcctagggtttatcgtgtgagcacaccatatatttacagtaggaatagacgtagacacacgagcatatttcacctccgctaccataatcatcgctatccccaccggcgtcaaagtatttagctgactcgccacactccacggaagcaatatgaaatgatctgctgcagtgctctgagccctaggattcatctttcttttcaccgtaggtggcctgactggcattgtattagcaaactcatcactagacatcgtactacacgacacgtactacgttgtagctcacttccactatgtcctatcaataggagctgtatttgccatcataggaggcttcattcactgatttcccctattctcaggctacaccctagaccaaacctacgccaaaatccatttcactatcatattcatcggcgtaaatctaactttcttcccacaacactttctcggcctatccggaatgccccgacgttactcggactaccccgatgcatacaccacatgaaacatcctatcatctgtaggctcattcatttctctaacagcagtaatattaataattttcatgatttgagaagccttcgcttcgaagcgaaaagtcctaatagtagaagaaccctccataaacctggagtgactatatggatgccccccaccctaccacacattcgaagaacccgtatacataaaatctagacaaaaaaggaaggaatcgaaccccccaaagctggtttcaagccaaccccatggcctccatgactttttcaaaaaggtattagaaaaaccatttcataactttgtcaaagttaaattataggctaaatcctatatatcttaatggcacatgcagcgcaagtaggtctacaagacgctacttcccctatcatagaagagcttatcacctttcatgatcacgccctcataatcattttccttatctgcttcctagtcctgtatgcccttttcctaacactcacaacaaaactaactaatactaacatctcagacgctcaggaaatagaaaccgtctgaactatcctgcccgccatcatcctagtcctcatcgccctcccatccctacgcatcctttacataacagacgaggtcaacgatccctcccttaccatcaaatcaattggccaccaatggtactgaacctacgagtacaccgactacggcggactaatcttcaactcctacatacttcccccattattcctagaaccaggcgacctgcgactccttgacgttgacaatcgagtagtactcccgattgaagcccccattcgtataataattacatcacaagacgtcttgcactcatgagctgtccccacattaggcttaaaaacagatgcaattcccggacgtctaaaccaaaccactttcaccgctacacgaccgggggtatactacggtcaatgctctgaaatctgtggagcaaaccacagtttcatgcccatcgtcctagaattaattcccctaaaaatctttgaaatagggcccgtatttaccctatagcaccccctctaccccctctagagcccactgtaaagctaacttagcattaaccttttaagttaaagattaagagaaccaacacctctttacagtgaaatgccccaactaaatactaccgtatggcccaccataattacccccatactccttacactattcctcatcacccaactaaaaatattaaacacaaactaccacctacctccctcaccaaagcccataaaaataaaaaattataacaaaccctgagaaccaaaatgaacgaaaatctgttcgcttcattcattgcccccacaatcctaggcctacccgccgcagtactgatcattctatttccccctctattgatccccacctccaaatatctcatcaacaaccgactaatcaccacccaacaatgactaatcaaactaacctcaaaacaaatgataaccatacacaacactaaaggacgaacctgatctcttatactagtatccttaatcatttttattgccacaactaacctcctcggactcctgcctcactcatttacaccaaccacccaactatctataaacctagccatggccatccccttatgagcgggcgcagtgattataggctttcgctctaagattaaaaatgccctagcccacttcttaccacaaggcacacctacaccccttatccccatactagttattatcgaaaccatcagcctactcattcaaccaatagccctggccgtacgcctaaccgctaacattactgcaggccacctactcatgcacctaattggaagcaccaccctagcaatatcaaccattaaccttccctctacacttatcatcttcacaattctaattctactgactatcctagaaatcgctgtcgccttaatccaagcctacgttttcacacttctagtaagcctctacctgcacgacaacacataatgacccaccaatcacatgcctatcatatagtaaaacccagcccatgacccctaacaggggccctctcagccctcctaatgacctccggcctagccatgtgatttcacttccactccataacgctcctcatactaggcctactaaccaacacactaaccatataccaatgatggcgcgatgtaacacgagaaagcacataccaaggccaccacacaccacctgtccaaaaaggccttcgatacgggataatcctatttattacctcagaagtttttttcttcgcaggatttttctgagccttttaccactccagcctagcccctaccccccaattaggagggcactggcccccaacaggcatcaccccgctaaatcccctagaagtcccactcctaaacacatccgtattactcgcatcaggagtatcaatcacctgagctcaccatagtctaatagaaaacaaccgaaaccaaataattcaagcactgctcattacaattttactgggtctctattttaccctcctacaagcctcagagtacttcgagtctcccttcaccatttccgacggcatctacggctcaacattttttgtagccacaggcttccacggacttcacgtcattattggctcaactttcctcactatctgcttcatccgccaactaatatttcactttacatccaaacatcactttggcttcgaagccgccgcctgatactggcattttgtagatgtggtttgactatttctgtatgtctccatctattgatgagggtcttactcttttagtataaatagtaccgttaacttccaattaactagttttgacaacattcaaaaaagagtaataaacttcgccttaattttaataatcaacaccctcctagccttactactaataattattacattttgactaccacaactcaacggctacatagaaaaatccaccccttacgagtgcggcttcgaccctatatcccccgcccgcgtccctttctccataaaattcttcttagtagctattaccttcttattatttgatctagaaattgccctccttttacccctaccatgagccctacaaacaactaacctgccactaatagttatgtcatccctcttattaatcatcatcctagccctaagtctggcctatgagtgactacaaaaaggattagactgagccgaattggtatatagtttaaacaaaacgaatgatttcgactcattaaattatgataatcatatttaccaaatgcccctcatttacataaatattatactagcatttaccatctcacttctaggaatactagtatatcgctcacacctcatgtcctccctactatgcctagaaggaataatactatcgctgttcattatagctactctcataaccctcaacacccactccctcttagccaatattgtgcctattgccatactagtctttgccgcctgcgaagcagcggtgggcctagccctactagtctcaatctccaacacatatggcctagactacgtacataacctaaacctactccaatgctaaaactaatcgtcccaacaattatattactaccactgacatgactttccaaaaaacacataatttgaatcaacacaaccacccacagcctaattattagcatcatccctctactattttttaaccaaatcaacaacaacctatttagctgttccccaaccttttcctccgaccccctaacaacccccctcctaatactaactacctgactcctacccctcacaatcatggcaagccaacgccacttatccagtgaaccactatcacgaaaaaaactctacctctctatactaatctccctacaaatctccttaattataacattcacagccacagaactaatcatattttatatcttcttcgaaaccacacttatccccaccttggctatcatcacccgatgaggcaaccagccagaacgcctgaacgcaggcacatacttcctattctacaccctagtaggctcccttcccctactcatcgcactaatttacactcacaacaccctaggctcactaaacattctactactcaccctcactgcccaagaactatcaaactcctgagccaacaacttaatatgactagcttacacaatagcttttatagtaaagatacctctttacggactccacttatgactccctaaagcccatgtcgaagcccccatcgctgggtcaatagtacttgccgcagtactcttgaagctaggcggctatggtataatacgcctcacactcattctcaaccccctgacaaaacacatagcctaccccttccttgtactatccctatgaggcataattataacaagctccatctgcctacgacaaacagacctaaaatcgctcattgcatactcttcaatcagccacatagccctcgtagtaacagccattctcatccaaaccccctgaagcttcaccggcgcagtcattctcataatcgcccacggacttacatcctcattactattctgcctagcaaactcaaactacgaacgcactcacagtcgcatcataatcctctctcaaggacttcaaactctactcccactaatagctttttgatgacttctagcaagcctcgctaacctcgccttaccccccactattaacctactgggagaactctctgtgctagtaaccacattctcctgatcaaatatcactctcctacttacaggactcaacatactagtcacagccctatactccctctacatatttaccacaacacaatggggctcactcacccaccacattaacaacataaaaccctcattcacacgagaaaacaccctcatgttcatacacctatcccccattctcctcctatccctcaaccccgacatcattaccgggttttcctcttgtaaatatagtttaaccaaaacatcagattgtgaatctgacaacagaggcttacgaccccttatttaccgagaaagctcacaagaactgctaactcatgcccccatgtctaacaacatggctttctcaacttttaaaggataacagctatccattggtcttaggccccaagaattttggtgcaactccaaataaaagtaataaccatgcacactactataaccaccctaaccctaacttccctaattccccccatccttaccaccctcgttaaccctaacaaaaaaaactcatacccccattatgtaaaatccattgtcgcatccacctttattatcagtctcttccccacaacaatattcatgtgcctagaccaagaagttattatctcgaactgacactgagccacaacccaaacaacccagctctccctaagcttcaaactagactacttctccataatattcatccctgtagcattgttcgttacatggtccatcatagaattctcactgtgatatataaactcagacccaaacattaatcagttcttcaaatatctactcatcttcctaattaccatactaatcttagttaccgctaacaacctattccaactgttcatcggctgagagggcgtaggaattatatccttcttgctcatcagttgatgatacgcccgagcagatgccaacacagcagccattcaagcaatcctatacaaccgtatcggcgatatcggtttcatcctcgccttagcatgatttatcctacactccaactcatgagacccacaacaaatagcccttctaaacgctaatccaagcctcaccccactactaggcctcctcctagcagcagcaggcaaatcagcccaattaggtctccacccctgactcccctcagccatagaaggccccaccccagtctcagccctactccactcaagcactatagttgtagcaggaatcttcttactcatccgcttccaccccctagcagaaaatagcccactaatccaaactctaacactatgcttaggcgctatcaccactctgttcgcagcagtctgcgcccttacacaaaatgacatcaaaaaaatcgtagccttctccacttcaagtcaactaggactcataatagttacaatcggcatcaaccaaccacacctagcattcctgcacatctgtacccacgccttcttcaaagccatactatttatgtgctccgggtccatcatccacaaccttaacaatgaacaagatattcgaaaaataggaggactactcaaaaccatacctctcacttcaacctccctcaccattggcagcctagcattagcaggaatacctttcctcacaggtttctactccaaagaccacatcatcgaaaccgcaaacatatcatacacaaacgcctgagccctatctattactctcatcgctacctccctgacaagcgcctatagcactcgaataattcttctcaccctaacaggtcaacctcgcttccccacccttactaacattaacgaaaataaccccaccctactaaaccccattaaacgcctggcagccggaagcctattcgcaggatttctcattactaacaacatttcccccgcatcccccttccaaacaacaatccccctctacctaaaactcacagccctcgctgtcactttcctaggacttctaacagccctagacctcaactacctaaccaacaaacttaaaataaaatccccactatgcacattttatttctccaacatactcggattctaccctagcatcacacaccgcacaatcccctatctaggccttcttacgagccaaaacctgcccctactcctcctagacctaacctgactagaaaagctattacctaaaacaatttcacagcaccaaatctccacctccatcatcacctcaacccaaaaaggcataattaaactttacttcctctctttcttcttcccactcatcctaaccctactcctaatcacataacctattcccccgagcaatttcaattacaatatatacaccaacaaacaatgttcaaccagtaactactactaatcaacgcccataatcatacaaagcccccgcaccaataggatcctcccgaatcaaccctgacccctctccttcataaattattcagcttcctacactattaaagtttaccacaaccaccaccccatcatactctttcacccacagcaccaatcctacctccatcgctaaccccactaaaacactcaccaagacctcaacccctgacccccatgcctcaggatactcctcaatagccatcgctgtagtatatccaaagacaaccatcattccccctaaataaattaaaaaaactattaaacccatataacctcccccaaaattcagaataataacacacccgaccacaccgctaacaatcaatactaaacccccataaataggagaaggcttagaagaaaaccccacaaaccccattactaaacccacactcaacagaaacaaagcatacatcattattctcgcacggactacaaccacgaccaatgatatgaaaaaccatcgttgtatttcaactacaagaacaccaatgaccccaatacgcaaaattaaccccctaataaaattaattaaccactcactcatcgacctccccaccccatccaacatctccgcatgatgaaacttcggctcactccttggcgcctgcctgatcctccaaatcaccacaggactattcctagccatgcactactcaccagacgcctcaaccgccttttcatcaatcgcccacatcactcgagacgtaaattatggctgaatcatccgctaccttcacgccaatggcgcctcaatattctttatctgcctcttcctacacatcgggcgaggcctatattacggatcatttctctactcagaaacctgaaacatcggcattatcctcctgcttgcaactatagcaacagccttcataggctatgtcctcccgtgaggccaaatatcattctgaggggccacagtaattacaaacttactatccgccatcccatacattgggacagacctagttcaatgaatctgaggaggctactcagtagacagtcccaccctcacacgattctttacctttcacttcatcttgcccttcattattgcagccctagcagcactccacctcctattcttgcacgaaacgggatcaaacaaccccctaggaatcacctcccattccgataaaatcaccttccacccttactacacaatcaaagacgccctcggcttacttctcttccttctctccttaatgacattaacactattctcaccagacctcctaggcgacccagacaattataccctagccaaccccttaaacacccctccccacatcaagcccgaatgatatttcctattcgcctacacaattctccgatccgtccctaacaaactaggaggcgtccttgccctattactatccatcctcatcctagcaataatccccatcctccatatatccaaacaacaaagcataatatttcgcccactaagccaatcactttattgactcctagccgcagacctcctcattctaacctgaatcggaggacaaccagtaagctacccttttaccatcattggacaagtagcatccgtactatacttcacaacaatcctaatcctaataccaactatctccctaattgaaaacaaaatactcaaatgggcctgtccttgtagtataaactaatacaccagtcttgtaagccggagatgaaaacctttttccaaggacaaatcagagaaaaagtctttaactccaccattagcacccaaagctaagattctaatttaaactattctctgttctttcatggggaagcagatttgggtaccacccaagtattgactcacccatcaacaaccgctatgtatttcgtacattactgccagccaccatgaatattgtacggtaccataaatacttgaccacctgtagtacataaaaacccaatccacatcaaaaccccctccccatgcttacaagcaagtacagcaatcaacccccaactatcacacatcaactgcaactccaaagccacccctcacccactaggataccaacaaacctacccacccttaacagtacatagcacataaagccatttaccgtacatagcacattacagtcaaatcccttctcgtccccatggatgacccccctcagataggggtcccttgaccaccatcctccgtgaaatcaatatcccgcacaagagtgctactctcctcgctccgggcccataacacttgggggtagctaaagtgaactgtatccgacatctggttcctacttcagggccataaagcctaaatagcccacacgttccccttaaataagacatcacgatg

SEQ ID NO: 77 - DNA, 16570 bp, Homo sapiens mitochondrial
  3108: "n" refers to a nucleotide at position 3107 of the Cambridge Reference Sequence (CRS, Anderson et al. 1981 Nature 290:457-465), later determined to be absent from the human mtDNA sequence according to the revised CRS (rCRS, Andrews et al. 1999 Nature Genetics 23:147); "n" therefore represents a single nucleotide deletion at a position corresponding to nucleotide 3107 of SEQ ID NO:1 as provided herein.
gatcacaggtctatcaccctattaaccactcacgggagctctccatgcatttggtattttcgtctggggggtatgcacgcgatagcattgcgagacgctggagccggagcaccctatgtcgcagtatctgtctttgattcctgcctcatcctattatttatcgcacctacgttcaatattacaggcgaacatacttactaaagtgtgttaattaattaatgcttgtaggacataataataacaattgaatgtctgcacagccgctttccacacagacatcataacaaaaaatttccaccaaaccccccctcccccgccttctggccacagcacttaaacacatctctgccaaaccccaaaaacaaagaaccctaacaccagcctaaccagatttcaaattttatcttttggcggtatgcacttttaacagtcaccccccaactaacacattattttcccctcccactcccatactactaatctcatcaatacaacccccgcccatcctacccagcacacacacaccgctgctaaccccataccccgaaccaaccaaaccccaaagacaccccccacagtttatgtagcttacctcctcaaagcaatacactgaaaatgtttagacgggctcacatcaccccataaacaaataggtttggtcctagcctttctattagctcttagtaagattacacatgcaagcatccccgttccagtgagttcaccctctaaatcaccacgatcaaaagggacaagcatcaagcacgcagcaatgcagctcaaaacgcttagcctagccacacccccacgggaaacagcagtgattaacctttagcaataaacgaaagtttaactaagctatactaaccccagggttggtcaatttcgtgccagccaccgcggtcacacgattaacccaagtcaatagaagccggcgtaaagagtgttttagatcaccccctccccaataaagctaaaactcacctgagttgtaaaaaactccagttgacacaaaatagactacgaaagtggctttaacatatctgaacacacaatagctaagacccaaactgggattagataccccactatgcttagccctaaacctcaacagttaaatcaacaaaactgctcgccagaacactacgagccacagcttaaaactcaaaggacctggcggtgcttcatatccctctagaggagcctgttctgtaatcgataaaccccgatcaacctcaccacctcttgctcagcctatataccgccatcttcagcaaaccctgatgaaggctacaaagtaagcgcaagtacccacgtaaagacgttaggtcaaggtgtagcccatgaggtggcaagaaatgggctacattttctaccccagaaaactacgatagcccttatgaaacttaagggtcgaaggtggatttagcagtaaactgagagtagagtgcttagttgaacagggccctgaagcgcgtacacaccgcccgtcaccctcctcaagtatacttcaaaggacatttaactaaaacccctacgcatttatatagaggagacaagtcgtaacatggtaagtgtactggaaagtgcacttggacgaaccagagtgtagcttaacacaaagcacccaacttacacttaggagatttcaacttaacttgaccgctctgagctaaacctagccccaaacccactccaccttactaccagacaaccttagccaaaccatttacccaaataaagtataggcgatagaaattgaaacctggcgcaatagatatagtaccgcaagggaaagatgaaaaattataaccaagcataatatagcaaggactaacccctataccttctgcataatgaattaactagaaataactttgcaaggagagccaaagctaagacccccgaaaccagacgagctacctaagaacagctaaaagagcacacccgtctatgtagcaaaatagtgggaagatttataggtagaggcgacaaacctaccgagcctggtgatagctggttgtccaagatagaatcttagttcaactttaaatttgcccacagaaccctctaaatccccttgtaaatttaactgttagtccaaagaggaacagctctttggacactaggaaaaaaccttgtagagagagtaaaaaatttaacacccatagtaggcctaaaagcagccaccaattaagaaagcgttcaagctcaacacccactacctaaaaaatcccaaacatataactgaactcctcacacccaattggaccaatctatcaccctatagaagaactaatgttagtataagtaacatgaaaacattctcctccgcataagcctgcgtcagattaaaacactgaactgacaattaacagcccaatatctacaatcaaccaacaagtcattattaccctcactgtcaacccaacacaggcatgctcataaggaaaggttaaaaaaagtaaaaggaactcggcaaatcttaccccgcctgtttaccaaaaacatcacctctagcatcaccagtattagaggcaccgcctgcccagtgacacatgtttaacggccgcggtaccctaaccgtgcaaaggtagcataatcacttgttccttaaatagggacctgtatgaatggctccacgagggttcagctgtctcttacttttaaccagtgaaattgacctgcccgtgaagaggcgggcataacacagcaagacgagaagaccctatggagctttaatttattaatgcaaacagtacctaacaaacccacaggtcctaaactaccaaacctgcattaaaaatttcggttggggcgacctcggagcagaacccaacctccgagcagtacatgctaagacttcaccagtcaaagcgaactactatactcaattgatccaataacttgaccaacggaacaagttaccctagggataacagcgcaatcctattctagagtccatatcaacaatagggtttacgacctcgatgttggatcaggacatcccgatggtgcagccgctattaaaggttcgtttgttcaacgattaaagtcctacgtgatctgagttcagaccggagtaatccaggtcggtttctatctacnttcaaattcctccctgtacgaaaggacaagagaaataaggcctacttcacaaagcgccttcccccgtaaatgatatcatctcaacttagtattatacccacacccacccaagaacagggtttgttaagatggcagagcccggtaatcgcataaaacttaaaactttacagtcagaggttcaattcctcttcttaacaacatacccatggccaacctcctactcctcattgtacccattctaatcgcaatggcattcctaatgcttaccgaacgaaaaattctaggctatatacaactacgcaaaggccccaacgttgtaggcccctacgggctactacaacccttcgctgacgccataaaactcttcaccaaagagcccctaaaacccgccacatctaccatcaccctctacatcaccgccccgaccttagctctcaccatcgctcttctactatgaacccccctccccatacccaaccccctggtcaacctcaacctaggcctcctatttattctagccacctctagcctagccgtttactcaatcctctgatcagggtgagcatcaaactcaaactacgccctgatcggcgcactgcgagcagtagcccaaacaatctcatatgaagtcaccctagccatcattctactatcaacattactaataagtggctcctttaacctctccacccttatcacaacacaagaacacctctgattactcctgccatcatgacccttggccataatatgatttatctccacactagcagagaccaaccgaacccccttcgaccttgccgaaggggagtccgaactagtctcaggcttcaacatcgaatacgccgcaggccccttcgccctattcttcatagccgaatacacaaacattattataataaacaccctcaccactacaatcttcctaggaacaacatatgacgcactctcccctgaactctacacaacatattttgtcaccaagaccctacttctaacctccctgttcttatgaattcgaacagcatacccccgattccgctacgaccaactcatacacctcctatgaaaaaacttcctaccactcaccctagcattacttatatgatatgtctccatacccattacaatctccagcattccccctcaaacctaagaaatatgtctgataaaagagttactttgatagagtaaataataggagcttaaacccccttatttctaggactatgagaatcgaacccatccctgagaatccaaaattctccgtgccacctatcacaccccatcctaaagtaaggtcagctaaataagctatcgggcccataccccgaaaatgttggttatacccttcccgtactaattaatcccctggcccaacccgtcatctactctaccatctttgcaggcacactcatcacagcgctaagctcgcactgattttttacctgagtaggcctagaaataaacatgctagcttttattccagttctaaccaaaaaaataaaccctcgttccacagaagctgccatcaagtatttcctcacgcaagcaaccgcatccataatccttctaatagctatcctcttcaacaatatactctccggacaatgaaccataaccaatactaccaatcaatactcatcattaataatcataatggctatagcaataaaactaggaatggccccctttcacttctgagtcccagaggttacccaaggcacccctctgacatccggcctgcttcttctcacatgacaaaaactagcccccatctcaatcatataccaaatctctccctcactaaacgtaagccttctcctcactctctcaatcttatccatcatagcaggcagttgaggtggattaaaccaaacccagctacgcaaaatcttagcatactcctcaattacccacataggatgaataatagcagttctaccgtacaaccctaacataaccattcttaatttaactatttatattatcctaactactaccgcattcctactactcaacttaaactccagcaccacgaccctactactatctcgcacctgaaacaagctaacatgactaacacccttaattccatccaccctcctctccctaggaggcctgcccccgctaaccggctttttgcccaaatgggccattatcgaagaattcacaaaaaacaatagcctcatcatccccaccatcatagccaccatcaccctccttaacctctacttctatctacgcctaatctactccacctcaatcacactactccccatatctaacaacgtaaaaataaaatgacagtttgaacatacaaaacccaccccattcctccccacactcatcgcccttaccacgctactcctacctatctccccttttatactaataatcttatagaaatttaggttaaatacagaccaagagccttcaaagccctcagtaagttgcaatacttaatttctgtaacagctaaggactgcaaaaccccactctgcatcaactgaacgcaaatcagccactttaattaagctaagcccttactagaccaatgggacttaaacccacaaacacttagttaacagctaagcaccctaatcaactggcttcaatctacttctcccgccgccgggaaaaaaggcgggagaagccccggcaggtttgaagctgcttcttcgaatttgcaattcaatatgaaaatcacctcggagctggtaaaaagaggcctaacccctgtctttagatttacagtccaatgcttcactcagccattttacctcacccccactgatgttcgccgaccgttgactattctctacaaaccacaaagacattggaacactatacctattattcggcgcatgagctggagtcctaggcacagctctaagcctccttattcgagccgagctgggccagccaggcaaccttctaggtaacgaccacatctacaacgttatcgtcacagcccatgcatttgtaataatcttcttcatagtaatacccatcataatcggaggctttggcaactgactagttcccctaataatcggtgcccccgatatggcgtttccccgcataaacaacataagcttctgactcttacctccctctctcctactcctgctcgcatctgctatagtggaggccggagcaggaacaggttgaacagtctaccctcccttagcagggaactactcccaccctggagcctccgtagacctaaccatcttctccttacacctagcaggtgtctcctctatcttaggggccatcaatttcatcacaacaattatcaatataaaaccccctgccataacccaataccaaacgcccctcttcgtctgatccgtcctaatcacagcagtcctacttctcctatctctcccagtcctagctgctggcatcactatactactaacagaccgcaacctcaacaccaccttcttcgaccccgccggaggaggagaccccattctataccaacacctattctgatttttcggtcaccctgaagtttatattcttatcctaccaggcttcggaataatctcccatattgtaacttactactccggaaaaaaagaaccatttggatacataggtatggtctgagctatgatatcaattggcttcctagggtttatcgtgtgagcacaccatatatttacagtaggaatagacgtagacacacgagcatatttcacctccgctaccataatcatcgctatccccaccggcgtcaaagtatttagctgactcgccacactccacggaagcaatatgaaatgatctgctgcagtgctctgagccctaggattcatctttcttttcaccgtaggtggcctgactggcattgtattagcaaactcatcactagacatcgtactacacgacacgtactacgttgtagcccacttccactatgtcctatcaataggagctgtatttgccatcataggaggcttcattcactgatttcccctattctcaggctacaccctagaccaaacctacgccaaaatccatttcactatcatattcatcggcgtaaatctaactttcttcccacaacactttctcggcctatccggaatgccccgacgttactcggactaccccgatgcatacaccacatgaaacatcctatcatctgtaggctcattcatttctctaacagcagtaatattaataattttcatgatttgagaagccttcgcttcgaagcgaaaagtcctaatagtagaagaaccctccataaacctggagtgactatatggatgccccccaccctaccacacattcgaagaacccgtatacataaaatctagacaaaaaaggaaggaatcgaaccccccaaagctggtttcaagccaaccccatggcctccatgactttttcaaaaaggtattagaaaaaccatttcataactttgtcaaagttaaattataggctaaatcctatatatcttaatggcacatgcagcgcaagtaggtctacaagacgctacttcccctatcatagaagagcttatcacctttcatgatcacgccctcataatcattttccttatctgcttcctagtcctgtatgcccttttcctaacactcacaacaaaactaactaatactaacatctcagacgctcaggaaatagaaaccgtctgaactatcctgcccgccatcatcctagtcctcatcgccctcccatccctacgcatcctttacataacagacgaggtcaacgatccctcccttaccatcaaatcaattggccaccaatggtactgaacctacgagtacaccgactacggcggactaatcttcaactcctacatacttcccccattattcctagaaccaggcgacctgcgactccttgacgttgacaatcgagtagtactcccgattgaagcccccattcgtataataattacatcacaagacgtcttgcactcatgagctgtccccacattaggcttaaaaacagatgcaattcccggacgtctaaaccaaaccactttcaccgctacacgaccgggggtatactacggtcaatgctctgaaatctgtggagcaaaccacagtttcatgcccatcgtcctagaattaattcccctaaaaatctttgaaatagggcccgtatttaccctatagcaccccctctaccccctctagagcccactgtaaagctaacttagcattaaccttttaagttaaagattaagagaaccaacacctctttacagtgaaatgccccaactaaatactaccgtatggcccaccataattacccccatactccttacactattcctcatcacccaactaaaaatattaaacacaaactaccacctacctccctcaccaaagcccataaaaataaaaaattataacaaaccctgagaaccaaaatgaacgaaaatctgttcgcttcattcattgcccccacaatcctaggcctacccgccgcagtactgatcattctatttccccctctattgatccccacctccaaatatctcatcaacaaccgactaatcaccacccaacaatgactaatcaaactaacctcaaaacaaatgataaccatacacaacactaaaggacgaacctgatctcttatactagtatccttaatcatttttattgccacaactaacctcctcggactcctgcctcactcatttacaccaaccacccaactatctataaacctagccatggccatccccttatgagcgggcgcagtgattataggctttcgctctaagattaaaaatgccctagcccacttcttaccacaaggcacacctacaccccttatccccatactagttattatcgaaaccatcagcctactcattcaaccaatagccctggccgtacgcctaaccgctaacattactgcaggccacctactcatgcacctaattggaagcgccaccctagcaatatcaaccattaaccttccctctacacttatcatcttcacaattctaattctactgactatcctagaaatcgctgtcgccttaatccaagcctacgttttcacacttctagtaagcctctacctgcacgacaacacataatgacccaccaatcacatgcctatcatatagtaaaacccagcccatgacccctaacaggggccctctcagccctcctaatgacctccggcctagccatgtgatttcacttccactccataacgctcctcatactaggcctactaaccaacacactaaccatataccaatgatggcgcgatgtaacacgagaaagcacataccaaggccaccacacaccacctgtccaaaaaggccttcgatacgggataatcctatttattacctcagaagtttttttcttcgcaggatttttctgagccttttaccactccagcctagcccctaccccccaattaggagggcactggcccccaacaggcatcaccccgctaaatcccctagaagtcccactcctaaacacatccgtattactcgcatcaggagtatcaatcacctgagctcaccatagtctaatagaaaacaaccgaaaccaaataattcaagcactgcttattacaattttactgggtctctattttaccctcctacaagcctcagagtacttcgagtctcccttcaccatttccgacggcatctacggctcaacattttttgtagccacaggcttccacggacttcacgtcattattggctcaactttcctcactatctgcttcatccgccaactaatatttcactttacatccaaacatcactttggcttcgaagccgccgcctgatactggcattttgtagatgtggtttgactatttctgtatgtctccatctattgatgagggtcttactcttttagtataaatagtaccgttaacttccaattaactagttttgacaacattcaaaaaagagtaataaacttcgccttaattttaataatcaacaccctcctagccttactactaataattattacattttgactaccacaactcaacggctacatagaaaaatccaccccttacgagtgcggcttcgaccctatatcccccgcccgcgtccctttctccataaaattcttcttagtagctattaccttcttattatttgatctagaaattgccctccttttacccctaccatgagccctacaaacaactaacctgccactaatagttatgtcatccctcttattaatcatcatcctagccctaagtctggcctatgagtgactacaaaaaggattagactgaaccgaattggtatatagtttaaacaaaacgaatgatttcgactcattaaattatgataatcatatttaccaaatgcccctcatttacataaatattatactagcatttaccatctcacttctaggaatactagtatatcgctcacacctcatatcctccctactatgcctagaaggaataatactatcgctgttcattatagctactctcataaccctcaacacccactccctcttagccaatattgtgcctattgccatactagtctttgccgcctgcgaagcagcggtgggcctagccctactagtctcaatctccaacacatatggcctagactacgtacataacctaaacctactccaatgctaaaactaatcgtcccaacaattatattactaccactgacatgactttccaaaaaacacataatttgaatcaacacaaccacccacagcctaattattagcatcatccctctactattttttaaccaaatcaacaacaacctatttagctgttccccaaccttttcctccgaccccctaacaacccccctcctaatactaactacctgactcctacccctcacaatcatggcaagccaacgccacttatccagtgaaccactatcacgaaaaaaactctacctctctatactaatctccctacaaatctccttaattataacattcacagccacagaactaatcatattttatatcttcttcgaaaccacacttatccccaccttggctatcatcacccgatgaggcaaccagccagaacgcctgaacgcaggcacatacttcctattctacaccctagtaggctcccttcccctactcatcgcactaatttacactcacaacaccctaggctcactaaacattctactactcactctcactgcccaagaactatcaaactcctgagccaacaacttaatatgactagcttacacaatagcttttatagtaaagatacctctttacggactccacttatgactccctaaagcccatgtcgaagcccccatcgctgggtcaatagtacttgccgcagtactcttaaaactaggcggctatggtataatacgcctcacactcattctcaaccccctgacaaaacacatagcctaccccttccttgtactatccctatgaggcataattataacaagctccatctgcctacgacaaacagacctaaaatcgctcattgcatactcttcaatcagccacatagccctcgtagtaacagccattctcatccaaaccccctgaagcttcaccggcgcagtcattctcataatcgcccacgggcttacatcctcattactattctgcctagcaaactcaaactacgaacgcactcacagtcgcatcataatcctctctcaaggacttcaaactctactcccactaatagctttttgatgacttctagcaagcctcgctaacctcgccttaccccccactattaacctactgggagaactctctgtgctagtaaccacattctcctgatcaaatatcactctcctacttacaggactcaacatactagtcacagccctatactccctctacatatttaccacaacacaatggggctcactcacccaccacattaacaacataaaaccctcattcacacgagaaaacaccctcatgttcatacacctatcccccattctcctcctatccctcaaccccgacatcattaccgggttttcctcttgtaaatatagtttaaccaaaacatcagattgtgaatctgacaacagaggcttacgaccccttatttaccgagaaagctcacaagaactgctaactcatgcccccatgtctaacaacatggctttctcaacttttaaaggataacagctatccattggtcttaggccccaaaaattttggtgcaactccaaataaaagtaataaccatgcacactactataaccaccctaaccctgacttccctaattccccccatccttaccaccctcgttaaccctaacaaaaaaaactcatacccccattatgtaaaatccattgtcgcatccacctttatcatcagtctcttccccacaacaatattcatgtgcctagaccaagaagttattatctcgaactgacactgagccacaacccaaacaacccagctctccctaagcttcaaactagactacttctccataatattcatccctgtagcattgttcgttacatggtccatcatagaattctcactgtgatatataaactcagacccaaacattaatcagttcttcaaatatctactcatcttcctaattaccatactaatcttagttaccgctaacaacctattccaactgttcatcggctgagagggcgtaggaattatatccttcttgctcatcagttgatgatacgcccgagcagatgccaacacagcagccattcaagcaatcctatacaaccgtatcggcgatatcggtttcatcctcgccttagcatgatttatcctacactccaactcatgagacccacaacaaatagcccttctaaacgctaatccaagcctcaccccactactaggcctcctcctagcagcagcaggcaaatcagcccaattaggtctccacccctgactcccctcagccatagaaggccccaccccagtctcagccctactccactcaagcactatagttgtagcaggaatcttcttactcatccgcttccaccccctagcagaaaatagcccactaatccaaactctaacactatgcttaggcgctatcaccactctgttcgcagcagtctgcgcccttacacaaaatgacatcaaaaaaatcgtagccttctccacttcaagtcaactaggactcataatagttacaatcggcatcaaccaaccacacctagcattcctgcacatctgtacccacgccttcttcaaagccatactatttatgtgctccgggtccatcatccacaaccttaacaatgaacaagatattcgaaaaataggaggactactcaaaaccatacctctcacttcaacctccctcaccattggcagcctagcattagcaggaatacctttcctcacaggtttctactccaaagaccacatcatcgaaaccgcaaacatatcatacacaaacgcctgagccctatctattactctcatcgctacctccctgacaagcgcctatagcactcgaataattcttctcaccctaacaggtcaacctcgcttccccacccttactaacattaacgaaaataaccccaccctactaaaccccattaaacgcctggcagccggaagcctattcgcaggatttctcattactaacaacatttcccccgcatcccccttccaaacaacaatccccctctacctaaaactcacagccctcgctgtcactttcctaggacttctaacagccctagacctcaactacctaaccaacaaacttaaaataaaatccccactatgcacattttatttctccaacatactcggattctaccctagcatcacacaccgcacaatcccctatctaggccttcttacgagccaaaacctgcccctactcctcctagacctaacctgactagaaaagctattacctaaaacaatttcacagcaccaaatctccacctccatcatcacctcaacccaaaaaggcataattaaactttacttcctctctttcttcttcccactcatcctaaccctactcctaatcacataacctattcccccgagcaatctcaattacaatatatacaccaacaaacaatgttcaaccagtaactactactaatcaacgcccataatcatacaaagcccccgcaccaataggatcctcccgaatcaaccctgacccctctccttcataaattattcagcttcctacactattaaagtttaccacaaccaccaccccatcatactctttcacccacagcaccaatcctacctccatcgctaaccccactaaaacactcaccaagacctcaacccctgacccccatgcctcaggatactcctcaatagccatcgctgtagtatatccaaagacaaccatcattccccctaaataaattaaaaaaactattaaacccatataacctcccccaaaattcagaataataacacacccgaccacaccgctaacaatcaatactaaacccccataaataggagaaggcttagaagaaaaccccacaaaccccattactaaacccacactcaacagaaacaaagcatacatcattattctcgcacggactacaaccacgaccaatgatatgaaaaaccatcgttgtatttcaactacaagaacaccaatgaccccaatacgcaaaactaaccccctaataaaattaattaaccactcattcatcgacctccccaccccatccaacatctccgcatgatgaaacttcggctcactccttggcgcctgcctgatcctccaaatcaccacaggactattcctagccatgcactactcaccagacgcctcaaccgccttttcatcaatcgcccacatcactcgagacgtaaattatggctgaatcatccgctaccttcacgccaatggcgcctcaatattctttatctgcctcttcctacacatcgggcgaggcctatattacggatcatttctctactcagaaacctgaaacatcggcattatcctcctgcttgcaactatagcaacagccttcataggctatgtcctcccgtgaggccaaatatcattctgaggggccacagtaattacaaacttactatccgccatcccatacattgggacagacctagttcaatgaatctgaggaggctactcagtagacagtcccaccctcacacgattctttacctttcacttcatcttgcccttcattattgcagccctagcagcactccacctcctattcttgcacgaaacgggatcaaacaaccccctaggaatcacctcccattccgataaaatcaccttccacccttactacacaatcaaagacgccctcggcttacttctcttccttctctccttaatgacattaacactattctcaccagacctcctaggcgacccagacaattataccctagccaaccccttaaacacccctccccacatcaagcccgaatgatatttcctattcgcctacacaattctccgatccgtccctaacaaactaggaggcgtccttgccctattactatccatcctcatcctagcaataatccccatcctccatatatccaaacaacaaagcataatatttcgcccactaagccaatcactttattgactcctagccgcagacctcctcattctaacctgaatcggaggacaaccagtaagctacccttttaccatcattggacaagtagcatccgtactatacttcacaacaatcctaatcctaataccaactatctccctaattgaaaacaaaatactcaaatgggcctgtccttgtagtataaactaatacaccagtcttgtaaaccggagatgaaaacctttttccaaggacaaatcagagaaaaagtctttaactccaccattagcacccaaagctaagattctaatttaaactattctctgttctttcatggggaagcagatttgggtaccacccaagtattgactcacccatcaacaaccgctatgtatttcgtacattactgccagccaccatgaatattgtacggtaccataaatacttgaccacctgtagtacataaaaacccaatccacatcaaaaccccctccccatgcttacaagcaagtacagcaatcaaccttcaactatcacacatcaactgcaactccaaagccacccctcacccactaggataccaacaaacctacccacccttaacagtacatagtacataaagccatttaccgtacatagcacattacagtcaaatcccttctcgtccccatggatgacccccctcagataggggtcccttgaccaccatcctccgtgaaatcaatatcccgcacaagagtgctactctcctcgctccgggcccataacacttgggggtagctaaagtgaactgtatccgacatctggttcctacttcagggccataaagcctaaatagcccacacgttccccttaaataagacatcacgatg

SEQ ID NO: 78 - DNA, 16570 bp, Homo sapiens mitochondrial
  3108: "n" refers to a nucleotide at position 3107 of the Cambridge Reference Sequence (CRS, Anderson et al. 1981 Nature 290:457-465), later determined to be absent from the human mtDNA sequence according to the revised CRS (rCRS, Andrews et al. 1999 Nature Genetics 23:147); "n" therefore represents a single nucleotide deletion at a position corresponding to nucleotide 3107 of SEQ ID NO:1 as provided herein.
gatcacaggtctatcaccctattaaccactcacgggagctctccatgcatttggtattttcgtctggggggtgtgcacgcgatagcattgcgagacgctggagccggagcaccctatgtcgcagtatctgtctttgattcctgcctcatcctattatttatcgcacctacgttcaatattacaggcgaacatacctactaaagtgtgttaattaattaatgcttgtaggacataataataacaattgaatgtctgcacagccgctttccacacagacatcataacaaaaaatttccaccaaaccccccctcccccgccttctggccacagcacttaaacacatctctgccaaaccccaaaaacaaagaaccctaacaccagcctaaccagatttcaaattttatcttttggcggtatgcacttttaacagtcaccccccaactaacacattattttcccctcccactcccatactactaatctcatcaatacaaccctcgcccatcctacccagcacacacacaccggtgctaaccccataccccgaaccaaccaaaccccaaagacaccccccacagtttatgtagcttacctcctcaaagcaatacactgaaaatgtttagacgggctcacatcaccccataaacaaataggtttggtcctagcctttctattagctcttagtaagattacacatgcaagcatccccgttccagtgagttcaccctctaaatcaccacgatcaaaagggacaagcatcaagcacgcagcaatgcagctcaaaacgcttagcctagccacacccccacgggaaacagcagtgattaacctttagcaataaacgaaagtttaactaagctatactaaccccagggttggtcaatttcgtgccagccaccgcggtcacacgattaacccaagtcaatagaagccggcgtaaagagtgttttagatcaccccctccccaataaagctaaaactcacctgagttgtaaaaaactccagttgacacaaaatagactacgaaagtggctttaacatatctgaacacacaatagctaagacccaaactgggattagataccccactatgcttagccctaaacctcaacagttaaatcaacaaaactgctcgccagaacactacgagccacagcttaaaactcaaaggacctggcggtgcttcatacccctctagaggagcctgttctgtaatcgataaaccccgatcaacctcaccacctcttgctcagcctatataccgccatcttcagcaaaccctgatgaaggctacaaagtaagcgcaagtacccacgtaaagacgttaggtcaaggtgtagcccatgaggtggcaagaaatgggctacattttctaccccagaaaactacgatagcccttatgaaacttaagggtcgaaggtggatttagcagtaaactgagagtagagtgcttagttgaacagggccctgaagcgcgtacacaccgcccgtcaccctcctcaagtatacttcaaaggacatttaactaaaacccctacgcatttatatagaggagacaagtcgtaacatggtaagtgtactggaaagtgcacttggacgaaccagagtgtagcttaacacaaagcacccaacttacacttaggagatttcaacttaacttgaccgctctgagctaaacctagccccaaacccactccaccttactaccagacaaccttagccaaaccatttacccaaataaagtataggcgatagaaattgaaacctggcgcaatagatatagtaccgcaagggaaagatgaaaaattatagccaagcataatatagcaaggactaacccctataccttctgcataatgaattaactagaaataactttgcaaggagagccaaagctaagacccccgaaaccagacgagctacctaagaacagctaaaagagcacacccgtctatgtagcaaaatagtgggaagatttataggtagaggcgacaaacctaccgagcctggtgatagctggttgtccaagatagaatcttagttcaactttaaatttgcccacagaaccctctaaatccccttgtaaatttaactgttagtccaaagaggaacagctctttggacactaggaaaaaaccttgtagagagagtaaaaaatttaacacccatagtaggcctaaaagcagccaccaattaagaaagcgttcaagctcaacacccactacctaaaaaatcccaaacatataactgaactcctcacacccaattggaccaatctatcaccctatagaagaactaatgttagtataagtaacatgaaaacattctcctccgcataagcctgcgtcagattaaaacactgaactgacaattaacagcccaatatctacaatcaaccaacaagtcattattaccctcactgtcaacccaacacaggcatgctcataaggaaaggttaaaaaaagtaaaaggaactcggcaaatcttaccccgcctgtttaccaaaaacatcacctctagcatcaccagtattagaggcaccgcctgcccagtgacacatgtttaacggccgcggtaccctaaccgtgcaaaggtagcataatcacttgttccttaaatagggacctgtatgaatggctccacgagggttcagctgtctcttacttttaaccagtgaaattgacctgcccgtgaagaggcgggcatgacacagcaagacgagaagaccctatggagctttaatttattaatgcaaacagtacctaacaaacccacaggtcctaaactaccaaacctgcattaaaaatttcggttggggcgacctcggagcagaacccaacctccgagcagtacatgctaagacttcaccagtcaaagcgaactactatactcaattgatccaataacttgaccaacggaacaagttaccctagggataacagcgcaatcctattctagagtccatatcaacaatagggtttacgacctcgatgttggatcaggacatcccgatggtgcagccgctattaaaggttcgtttgttcaacgattaaagtcctacgtgatctgagttcagaccggagtaatccaggtcggtttctatctacnttcaaattcctccctgtacgaaaggacaagagaaataaggcctacttcacaaagcgccttcccccgtaaatgatatcatctcaacttagtattatacccacacccacccaagaacagggtttgttaagatggcagagcccggtaatcgcataaaacttaaaactttacagtcagaggttcaattcctcttcttaacaacatacccatggccaacctcctactcctcattgtacccattctaatcgcaatggcattcctaatgcttaccgaacgaaaaattctaggctatatacaactacgcaaaggccccaacgttgtaggcccctacgggctactacaacccttcgctgacgccataaaactcttcaccaaggagcccctaaaacccgccacatctaccatcaccctctacatcaccgccccgaccttagctctcaccatcgctcttctactatgaacccccctccccatacccaaccccctggtcaacctcaacctaggcctcctatttattctagccacctctagcctagccgtttactcaatcctctgatcagggtgagcatcaaactcaaactacgccctgatcggcgcactgcgagcagtagcccaaacaatctcatatgaagtcaccctagccatcattctactatcaacattactaataagtggctcctttaacctctccacccttatcacaacacaagaacacctctgattactcctgccatcatgacccttggccataatatgatttatctccacactagcagagaccaaccgaacccccttcgaccttgccgaaggggagtccgaactagtctcaggcttcaacatcgaatacgccgcaggccccttcgccctattcttcatagccgaatacacaaacattattataataaacaccctcaccactacaatcttcctaggaacaacatatgacgcactctcccctgaactctacacaacatattttgtcaccaagaccctacttctaacctccctgttcttatgaattcgaacagcatacccccgattccgctacgaccaactcatacacctcctatgaaaaaacttcctaccactcaccctagcattacttatatgatatgtctccatacccattacaatctccagcattccccctcaaacctaagaaatatgtctgataaaagagttactttgatagagtaaataataggagcttaaacccccttatttctaggactatgagaatcgaacccatccctgagaatccaaaattctccgtgccacctatcacaccccatcctaaagtaaggtcagctaaataagctatcgggcccataccccgaaaatgttggttatacccttcccgtactaattaatcccctggcccaacccgtcatctactctaccatctttgcaggcacactcatcacagcgctaagctcgcactgattttttacctgagtaggcctagaaataaacatgctagcttttattccagttctaaccaaaaaaataaaccctcgttccacagaagctgccatcaagtatttcctcacgcaagcaaccgcatccataatccttctaatagctatcctcttcaacaatatactctccggacaatgaaccataaccaatactaccaatcaatactcatcattaataatcataatggctatagcaataaaactaggaatagccccctttcacttctgagtcccagaggttacccaaggcacccctctgacatccggcctgcttcttctcacatgacaaaaactagcccccatctcaatcatataccaaatctctccctcactaaacgtaagccttctcctcactctctcaatcttatccatcatagcaggcagttgaggtggattaaaccaaacccagctacgcaaaatcttagcatactcctcaattacccacataggatgaataatagcagttctaccgtacaaccctaacataaccattcttaatttaactatttatattatcctaactactaccgcattcctactactcaacttaaactccagcaccacgaccctactactatctcgcacctgaaacaagctaacatgactaacacccttaattccatccaccctcctctccctaggaggcctgcccccgctaaccggctttttgcccaaatgggccattatcgaagaattcacaaaaaacaatagcctcatcatccccaccatcatagccaccatcaccctccttaacctctacttctacctacgcctaatctactccacctcaatcacactactccccatatctaacaacgtaaaaataaaatgacagtttgaacatacaaaacccaccccattcctccccacactcatcgcccttaccacgctactcctacctatctccccttttatactaataatcttatagaaatttaggttaaatacagaccaagagccttcaaagccctcagtaagttgcaatacttaatttctgtaacagctaaggactgcaaaaccccactctgcatcaactgaacgcaaatcagccactttaattaagctaagcccttactagaccaatgggacttaaacccacaaacacttagttaacagctaagcaccctaatcaactggcttcaatctacttctcccgccgccgggaaaaaaggcgggagaagccccggcaggtttgaagctgcttcttcgaatttgcaattcaatatgaaaatcacctcggagctggtaaaaagaggcctaacccctgtctttagatttacagtccaatgcttcactcagccattttacctcacccccactgatgttcgccgaccgttgactattctctacaaaccacaaagacattggaacactatacctattattcggcgcatgagctggagtcctaggcacagctctaagcctccttattcgagccgagctgggccagccaggcaaccttctaggtaacgaccacatctacaacgttatcgtcacagcccatgcatttgtaataatcttcttcatagtaatacccatcataatcggaggctttggcaactgactagttcccctaataatcggtgcccccgatatggcgtttccccgcataaacaacataagcttctgactcttacctccctctctcctactcctgctcgcatctgctatagtggaggccggagcaggaacaggttgaacagtctaccctcccttagcagggaactactcccaccctggagcctccgtagacctaaccatcttctccttacacctagcaggtgtctcctctatcttaggggccatcaatttcatcacaacaattatcaatataaaaccccctgccataacccaataccaaacgcccctcttcgtctgatccgtcctaatcacagcagtcctacttctcctatctctcccagtcctagctgctggcatcactatactactaacagaccgcaacctcaacaccaccttcttcgaccccgccggaggaggagaccccattctataccaacacctattctgatttttcggtcaccctgaagtttatattcttatcctaccaggcttcggaataatctcccatattgtaacttactactccggaaaaaaagaaccatttggatacataggtatggtctgagctatgatatcaattggcttcctagggtttatcgtgtgagcacaccatatatttacagtaggaatagacgtagacacacgagcatatttcacctccgctaccataatcatcgctatccccaccggcgtcaaagtatttagctgactcgccacactccacggaagcaatatgaaatgatctgctgcagtgctctgagccctaggattcatctttcttttcaccgtaggtggcctgactggcattgtattagcaaactcatcactagacatcgtactacacgacacgtactacgttgtagctcacttccactatgtcctatcaataggagctgtatttgccatcataggaggcttcattcactgatttcccctattctcaggctacaccctagaccaaacctacgccaaaatccatttcactatcatattcatcggcgtaaatctaactttcttcccacaacactttctcggcctatccggaatgccccgacgttactcggactaccccgatgcatacaccacatgaaacatcctatcatctgtaggctcattcatttctctaacagcagtaatattaataattttcatgatttgagaagccttcgcttcgaagcgaaaagtcctaatagtagaagaaccctccataaacctggagtgactatatggatgccccccaccctaccacacattcgaagaacccgtatacataaaatctagacaaaaaaggaaggaatcgaaccccccaaagctggtttcaagccaaccccatggcctccatgactttttcaaaaaggtattagaaaaaccatttcataactttgtcaaagttaaattataggctaaatcctatatatcttaatggcacatgcagcgcaagtaggtctacaagacgctacttcccctatcatagaagagcttatcacctttcatgatcacgccctcataatcattttccttatctgcttcctagtcctgtatgcccttttcctaacactcacaacaaaactaactaatactaacatctcagacgctcaggaaatagaaaccgtctgaactatcctgcccgccatcatcctagtcctcatcgccctcccatccctacgcatcctttacataacagacgaggtcaacgatccctcccttaccatcaaatcaattggccaccaatggtactgaacctacgagtacaccgactacggcggactaatcttcaactcctacatacttcccccattattcctagaaccaggcgacctgcgactccttgacgttgacaatcgagtagtactcccgattgaagcccccattcgtataataattacatcacaagacgtcttgcactcatgagctgtccccacattaggcttaaaaacagatgcaattcccggacgtctaaaccaaaccactttcaccgctacacgaccgggggtatactacggtcaatgctctgaaatctgtggagcaaaccacagtttcatgcccatcgtcctagaattaattcccctaaaaatctttgaaatagggcccgtatttaccctatagcaccccctctaccccctctagagcccactgtaaagctaacttagcattaaccttttaagttaaagattaagagaaccaacacctctttacagtgaaatgccccaactaaatactaccgtatggcccaccataattacccccatactccttacactattcctcatcacccaactaaaaatattaaacacaaactaccacctacctccctcaccaaagcccataaaaataaaaaattataacaaaccctgagaaccaaaatgaacgaaaatctgttcgcttcattcattgcccccacaatcctaggcctacccgccgcagtactgatcattctatttccccctctattgatccccacctccaaatatctcatcaacaaccgactaatcaccacccaacaatgactaatcaaactaacctcaaaacaaatgataaccatacacaacactaaaggacgaacctgatctcttatactagtatccttaatcatttttattgccacaactaacctcctcggactcctgcctcactcatttacaccaaccacccaactatctataaacctagccatggccatccccttatgagcgggcgcagtgattataggctttcgctctaagattaaaaatgccctagcccacttcttaccacaaggcacacctacaccccttatccccatactagttattatcgaaaccatcagcctactcattcaaccaatagccctggccgtacgcctaaccgctaacattactgcaggccacctactcatgcacctaattggaagcaccaccctagcaatatcaaccattaaccttccctctacacttatcatcttcacaattctaattctactgactatcctagaaatcgctgtcgccttaatccaagcctacgttttcacacttctagtaagcctctacctgcacgacaacacataatgacccaccaatcacatgcctatcatatagtaaaacccagcccatgacccctaacaggggccctctcagccctcctaatgacctccggcctagccatgtgatttcacttccactccataacgctcctcatactaggcctactaaccaacacactaaccatataccaatgatggcgcgatgtaacacgagaaagcacataccaaggccaccacacaccacctgtccaaaaaggccttcgatacgggataatcctatttattacctcagaagtttttttcttcgcaggatttttctgagccttttaccactccagcctagcccctaccccccaattaggagggcactggcccccaacaggcatcaccccgctaaatcccctagaagtcccactcctaaacacatccgtattactcgcatcaggagtatcaatcacctgagctcaccatagtctaatagaaaacaaccgaaaccaaataattcaagcactgctcattacaattttactgggtctctattttaccctcctacaagcctcagagtacttcgagtctcccttcaccatttccgacggcatctacggctcaacattttttgtagccacaggcttccacggacttcacgtcattattggctcaactttcctcactatctgcttcatccgccaactaatatttcactttacatccaaacatcactttggcttcgaagccgccgcctgatactggcattttgtagatgtggtttgactatttctgtatgtctccatctattgatgagggtcttactcttttagtataaatagtaccgttaacttccaattaactagttttgacaacattcaaaaaagagtaataaacttcgccttaattttaataatcaacaccctcctagccttactactaataattattacattttgactaccacaactcaacggctacatagaaaaatccaccccttacgagtgcggcttcgaccctatatcccccgcccgcgtccctttctccataaaattcttcttagtagctattaccttcttattatttgatctagaaattgccctccttttacccctaccatgagccctacaaacaactaacctgccactaatagttatgtcatccctcttattaatcatcatcctagccctaagtctggcctatgagtgactacaaaaaggattagactgagccgaattggtatatagtttaaacaaaacgaatgatttcgactcattaaattatgataatcatatttaccaaatgcccctcatttacataaatattatactagcatttaccatctcacttctaggaatactagtatatcgctcacacctcatgtcctccctactatgcctagaaggaataatactatcgctgttcattatagctactctcataaccctcaacacccactccctcttagccaatattgtgcctattgccatactagtctttgccgcctgcgaagcagcggtgggcctagccctactagtctcaatctccaacacatatggcctagactacgtacataacctaaacctactccaatgctaaaactaatcgtcccaacaattatattactaccactgacatgactttccaaaaaacacataatttgaatcaacacaaccacccacagcctaattattagcatcatccctctactattttttaaccaaatcaacaacaacctatttagctgttccccaaccttttcctccgaccccctaacaacccccctcctaatactaactacctgactcctacccctcacaatcatggcaagccaacgccacttatccagtgaaccactatcacgaaaaaaactctacctctctatactaatctccctacaaatctccttaattataacattcacagccacagaactaatcatattttatatcttcttcgaaaccacacttatccccaccttggctatcatcacccgatgaggcaaccagccagaacgcctgaacgcaggcacatacttcctattctacaccctagtaggctcccttcccctactcatcgcactaatttacactcacaacaccctaggctcactaaacattctactactcaccctcactgcccaagaactatcaaactcctgagccaacaacttaatatgactagcttacacaatagcttttatagtaaagatacctctttacggactccacttatgactccctaaagcccatgtcgaagcccccatcgctgggtcaatagtacttgccgcagtactcttgaaactaggcggctatggtataatacgcctcacactcattctcaaccccctgacaaaacacatagcctaccccttccttgtactatccctatgaggcataattataacaagctccatctgcctacgacaaacagacctaaaatcgctcattgcatactcttcaatcagccacatagccctcgtagtaacagccattctcatccaaaccccctgaagcttcaccggcgcagtcattctcataatcgcccacggacttacatcctcattactattctgcctagcaaactcaaactacgaacgcactcacagtcgcatcataatcctctctcaaggacttcaaactctactcccactaatagctttttgatgacttctagcaagcctcgctaacctcgccttaccccccactattaacctactgggagaactctctgtgctagtaaccacgttctcctgatcaaatatcactctcctacttacaggactcaacatactagtcacagccctatactccctctacatatttaccacaacacaatggggctcactcacccaccacattaacaacataaaaccctcattcacacgagaaaacaccctcatgttcatacacctatcccccattctcctcctatccctcaaccccgacatcattaccgggttttcctcttgtaaatatagtttaaccaaaacatcagattgtgaatctgacaacagaggcttacgaccccttatttaccgagaaagctcacaagaactgctaactcatgcccccatgtctaacaacatggctttctcaacttttaaaggataacagctatccattggtcttaggccccaagaattttggtgcaactccaaataaaagtaataaccatgcacactactataaccaccctaaccctaacttccctaattccccccatccttaccaccctcgttaaccctaacaaaaaaaactcatacccccattatgtaaaatccattgtcgcatccacctttattatcagtctcttccccacaacaatattcatgtgcctagaccaagaagttattatctcgaactgacactgagccacaacccaaacaacccagctctccctaagcttcaaactagactacttctccataatattcatccctgtagcattgttcgttacatggtccatcatagaattctcactgtgatatataaactcagacccaaacattaatcagttcttcaaatatctactcatcttcctaattaccatactaatcttagttaccgctaacaacctattccaactgttcatcggctgagagggcgtaggaattatatccttcttgctcatcagttgatgatacgcccgagcagatgccaacacagcagccattcaagcaatcctatacaaccgtatcggcgatatcggtttcatcctcgccttagcatgatttatcctacactccaactcatgagacccacaacaaatagcccttctaaacgctaatccaagcctcaccccactactaggcctcctcctagcagcagcaggcaaatcagcccaattaggtctccacccctgactcccctcagccatagaaggccccaccccagtctcagccctactccactcaagcactatagttgtagcaggaatcttcttactcatccgcttccaccccctagcagaaaatagcccactaatccaaactctaacactatgcttaggcgctatcaccactctgttcgcagcagtctgcgcccttacacaaaatgacatcaaaaaaatcgtagccttctccacttcaagtcaactaggactcataatagttacaatcggcatcaaccaaccacacctagcattcctgcacatctgtacccacgccttcttcaaagccatactatttatgtgctccgggtccatcatccacaaccttaacaatgaacaagatattcgaaaaataggaggactactcaaaaccatacctctcacttcaacctccctcaccattggcagcctagcattagcaggaatacctttcctcacaggtttctactccaaagaccacatcatcgaaaccgcaaacatatcatacacaaacgcctgagccctatctattactctcatcgctacctccctgacaagcgcctatagcactcgaataattcttctcaccctaacaggtcaacctcgcttccccacccttactaacattaacgaaaataaccccaccctactaaaccccattaaacgcctggcagccggaagcctattcgcaggatttctcattactaacaacatttcccccgcatcccccttccaaacaacaatccccctctacctaaaactcacagccctcgctgtcactttcctaggacttctaacagccctagacctcaactacctaaccaacaaacttaaaataaaatccccactatgcacattttatttctccaacatactcggattctaccctagcatcacacaccgcataatcccctatctaggccttcttacgagccaaaacctgcccctactcctcctagacctaacctgactagaaaagctattacctaaaacaatttcacagcaccaaatctccacctccatcatcacctcaacccaaaaaggcataattaaactttacttcctctctttcttcttcccactcatcctaaccctactcctaatcacataacctattcccccgagcaatttcaattacaatatatacaccaacaaacaatgttcaaccagtaactactactaatcaacgcccataatcatacaaagcccccgcaccaataggatcctcccgaatcaaccctgacccctctccttcataaattattcagcttcctacactattaaagtttaccacaaccaccaccccatcatactctttcacccacagcaccaatcctacctccatcgctaaccccactaaaacactcaccaagacctcaacccctgacccccatgcctcaggatactcctcaatagccatcgctgtagtatatccaaagacaaccatcattccccctaaataaattaaaaaaactattaaacccatataacctcccccaaaattcagaataataacacacccgaccacaccgctaacaatcaatactaaacccccataaataggagaaggcttagaagaaaaccccacaaaccccattactaaacccacactcaacagaaacaaagcatacatcattattctcgcacggactacaaccacgaccaatgatatgaaaaaccatcgttgtatttcaactacaagaacaccaatgaccccaatacgcaaaattaaccccctaataaaattaattaaccactcactcatcgacctccccaccccatccaacatctccgcatgatgaaacttcggctcactccttggcgcctgcctgatcctccaaatcaccacaggactattcctagccatgcactactcaccagacgcctcaaccgccttttcatcaatcgcccacatcactcgagacgtaaattatggctgaatcatccgctaccttcacgccaatggcgcctcaatattctttatctgcctcttcctacacatcgggcgaggcctatattacggatcatttctctactcagaaacctgaaacatcggcattatcctcctgcttgcaactatagcaacagccttcataggctatgtcctcccgtgaggccaaatatcattctgaggggccacagtaattacaaacttactatccgccatcccatacattgggacagacctagttcaatgaatctgaggaggctactcagtagacagtcccaccctcacacgattctttacctttcacttcatcttgcccttcattattgcagccctagcagcactccacctcctattcttgcacgaaacgggatcaaacaaccccctaggaatcacctcccattccgataaaatcaccttccacccttactacacaatcaaagacgccctcggcttacttctcttccttctctccttaatgacattaacactattctcaccagacctcctaggcgacccagacaattataccctagccaaccccttaaacacccctccccacatcaagcccgaatgatatttcctattcgcctacacaattctccgatccgtccctaacaaactaggaggcgtccttgccctattactatccatcctcatcctagcaataatccccatcctccatatatccaaacaacaaagcataatatttcgcccactaagccaatcactttattgactcctagccgcagacctcctcattctaacctgaatcggaggacaaccagtaagctacccttttaccatcattggacaagtagcatccgtactatacttcacaacaatcctaatcctaataccaactatctccctaattgaaaacaaaatactcaaatgggcctgtccttgtagtataaactaatacaccagtcttgtaaaccggagatgaaaacctttttccaaggacaaatcagagaaaaagtctttaactccaccattagcacccaaagctaagattctaatttaaactattctctgttctttcatggggaagcagatttgggtaccacccaagtattgactcacccatcaacaaccgctatgtatttcgtacattactgccagccaccatgaatattgtacggtaccataaatacttgaccacctgtagtacataaaaacccaatccacatcaaaaccccctccccatgcttacaagcaagtacagcaatcaacccccaactatcacacatcaactgcaactccaaagccacccctcacccactaggataccaacaaacctacccacccttaacagtacatagcacataaagccatttaccgtacatagcacattacagtcaaatcccttctcgtccccatggatgacccccctcagataggggtcccttgaccaccatcctccgtgaaatcaatatcccgcacaagagtgctactctcctcgctccgggcccataacacttgggggtagctaaagtgaactgtatccgacatctggttcctacttcagggccataaagcctaaatagcccacacgttccccttaaataagacatcacgatg

SEQ ID NO: 79 - DNA, 16568 bp, Homo sapiens mitochondrial
  3106: "n" refers to a nucleotide at position 3107 of the Cambridge Reference Sequence (CRS, Anderson et al. 1981 Nature 290:457-465), later determined to be absent from the human mtDNA sequence according to the revised CRS (rCRS, Andrews et al. 1999 Nature Genetics 23:147); "n" therefore represents a single nucleotide deletion at a position corresponding to nucleotide 3107 of SEQ ID NO:1 as provided herein.
gatcacaggtctatcaccctattaaccactcacgggagctctccatgcatttggtattttcgtctggggggtatgcacgcgatagcattgcgagacgctggagccggagcaccctatgtcgcagtatctgtctttgattcctgcctcatcctattatttatcgcacctacgttcaatattacaggcgaacatacctactaaagtgtgttaattaattaatgcttgtaggacataataataacaattgaatgtctgcacagccgctttccacacagacatcataacaaaaaatttccaccaaaccccccctcccccgccttctggccacagcacttaaacacatctctgccaaaccccaaaaacaaagaaccctaacaccagcctaaccagatttcaaattttatcttttggcggtatgcacttttaacagtcaccccccaactaacacattattttcccctcccactcccatactactaatctcatcaatacaacccccggccatcctacccaacacacacaccgctgctaaccccataccccgaaccaaccaaaccccaaagacaccccccacagtttatgtagcttacctcctcaaagcaatacactgaaaatgtttagacgggctcacatcaccccataaacaaataggtttggtcctagcctttctattagctcttagtaagattacacatgcaagcatccccgttccagtgagttcaccctctaaatcaccacgatcaaaagggacaagcatcaagcacgcagcaatgcagctcaaaacgcttagcctagccacacccccacgggaaacagcagtgattaacctttagcaataaacgaaagtttaactaagctatactaaccccagggttggtcaatttcgtgccagccaccgcggtcacacgattaacccaagtcaatagaagccggcgtaaagagtgttttagatcaccccctccccaataaagctaaaactcacctgagttgtaaaaaactccagttgacacaaaatagactacgaaagtggctttaacatatctgaacacacaatagctaagacccaaactgggattagataccccactatgcttagccctaaacctcaacagttaaatcaacaaaactgctcgccagaacactacgagccacagcttaaaactcaaaggacctggcggtgcttcatatccctctagaggagcctgttctgtaatcgataaaccccgatcaacctcaccacctcttgctcagcctatataccgccatcttcagcaaaccctgatgaaggctacaaagtaagcgcaagtacccacgtaaagacgttaggtcaaggtgtagcccatgaggtggcaagaaatgggctacattttctaccccagaaaactacgatagcccttatgaaacttaagggtcgaaggtggatttagcagtaaactaagagtagagtgcttagttgaacagggccctgaagcgcgtacacaccgcccgtcaccctcctcaagtatacttcaaaggacatttaactaaaacccctacgcatttatatagaggagacaagtcgtaacatggtaagtgtactggaaagtgcacttggacgaaccagagtgtagcttaacacaaagcacccaacttacacttaggagatttcaacttaacttgaccgctctgagctaaacctagccccaaacccactccaccttactaccagacaaccttagccaaaccatttacccaaataaagtataggcgatagaaattgaaacctggcgcaatagatatagtaccgcaagggaaagatgaaaaattataaccaagcataatatagcaaggactaacccctataccttctgcataatgaattaactagaaataactttgcaaggagagccaaagctaagacccccgaaaccagacgagctacctaagaacagctaaaagagcacacccgtctatgtagcaaaatagtgggaagatttataggtagaggcgacaaacctaccgagcctggtgatagctggttgtccaagatagaatcttagttcaactttaaatttgcccacagaaccctctaaatccccttgtaaatttaactgttagtccaaagaggaacagctctttggacactaggaaaaaaccttgtagagagagtaaaaaatttaacacccatagtaggcctaaaagcagccaccaattaagaaagcgttcaagctcaacacccactacctaaaaaatcccaaacatataactgaactcctcacacccaattggaccaatctatcaccctatagaagaactaatgttagtataagtaacatgaaaacattctcctccgcataagcctgcgtcagattaaaacactgaactgacaattaacagcccaatatctacaatcaaccaacaagtcattattaccctcactgtcaacccaacacaggcatgctcataaggaaaggttaaaaaaagtaaaaggaactcggcaaatcttaccccgcctgtttaccaaaaacatcacctctagcatcaccagtattagaggcaccgcctgcccagtgacacatgtttaacggccgcggtaccctaaccgtgcaaaggtagcataatcacttgttccttaaatagggacctgtatgaatggctccacgagggttcagctgtctcttacttttaaccagtgaaattgacctgcccgtgaagaggcgggcataacacagcaagacgagaagaccctatggagctttaatttattaatgcaaacagtacctaacaaacccacaggtcctaaactaccaaacctgcattaaaaatttcggttggggcgacctcggagcagaacccaacctccgagcagtacatgctaagacttcaccagtcaaagcgaactactatactcaattgatccaataacttgaccaacggaacaagttaccctagggataacagcgcaatcctattctagagtccatatcaacaatagggtttacgacctcgatgttggatcaggacatcccgatggtgcagccgctattaaaggttcgtttgttcaacgattaaagtcctacgtgatctgagttcagaccggagtaatccaggtcggtttctatctacnttcaaattcctccctgtacgaaaggacaagagaaataaggcctacttcacaaagcgccttcccccgtaaatgatatcatctcaacttagtattatacccacacccacccaagaacagggtttgttaagatggcagagcccggtaatcgcataaaacttaaaactttacagtcagaggttcaattcctcttcttaacaacatacccatggccaacctcctactcctcattgtacccattctaatcgcaatggcattcctaatgcttaccgaacgaaaaattctaggctatatacaactacgcaaaggccccaacgttgtaggcccctacgggctactacaacccttcgctgacgccataaaactcttcaccaaagagcccctaaaacccgccacatctaccatcaccctctacatcaccgccccgaccttagctctcaccatcgctcttctactatgaacccccctccccatacccaaccccctggtcaacctcaacctaggcctcctatttattctagccacctctagcctagccgtttactcaatcctctgatcagggtgagcatcaaactcaaactacgccctgatcggcgcactgcgagcagtagcccaaacaatctcatatgaagtcaccctagccatcattctactatcaacattactaataagtggctcctttaacctctccacccttatcacaacacaagaacacctctgattactcctgccatcatgacccttggccataatatgatttatctccacactagcagagaccaaccgaacccccttcgaccttgccgaaggggagtccgaactagtctcaggcttcaacatcgaatacgccgcaggccccttcgccctattcttcatagccgaatacataaacattattataataaacaccctcaccactgcaatcttcctaggaacaacatatgacgcactctcccctgaactctacacaacatattttgtcaccaagaccctacttctaacctccctgttcttatgaattcgaacagcatacccccgattccgctacgaccaactcatacacctcctatgaaaaaacttcctaccactcaccctagcattacttatatgatatgtctccatacccattacaatctccagcattccccctcaaacctaagaaatatgtctgataaaagagttactttgatagagtaaataataggagcttaaacccccttatttctaggactatgagaatcgaacccatccctgagaatccaaaattctccgtgccacctatcacaccccatcctaaagtaaggtcagctaaataagctatcgggcccataccccgaaaatgttggttatacccttcccgtactaattaatcccctggcccaacccgtcatctactctaccatctttgcaggcacactcatcacagcgctaagctcgcactgattttttacctgagtaggcctagaaataaacatgctagcttttattccagttctaaccaaaaaaataaaccctcgttccacagaagctgccatcaagtatttcctcacgcaagcaaccgcatccataatccttctaatagctatcctcttcaacaatatactctccggacaatgaaccataaccaatactaccaatcaatactcatcattaataatcataatggctatagcaataaaactaggaatagccccctttcacttctgagtcccagaggttacccaaggcacccctctgacatccggcctgcttcttctcacatgacaaaaactagcccccatctcaatcatataccaaatctctccctcactaaacgtaagccttctcctcactctctcaatcttatccatcatagcaggcagttgaggtggattaaaccaaacccagctacgcaaaatcctagcatactcctcaattacccacataggatgaataatagcagttctaccgtacaaccctaacataaccattcttaatttaactatttatattatcctaactactaccgcattcctactactcaacttaaactccagcaccacgaccctactactatctcgcacctgaaacaagctaacatgactaacacccttaattccatccaccctcctctccctaggaggcctgcccccgctaaccggctttttgcccaaatgggccattatcgaagaattcacaaaaaacaatagcctcatcatccccaccatcatagccaccatcaccctccttaacctctacttctacctacgcctaatctactccacctcaatcacactactccccatatctaacaacgtaaaaataaaatgacagtttgaacatacaaaacccaccccattcctccccacactcatcgcccttaccacgctactcctacctatctccccttttatactaataatcttatagaaatttaggttaaatacagaccaagagccttcaaagccctcagtaagttgcaatacttaatttctgtaacagctaaggactgcaaaaccccactctgcatcaactgaacgcaaatcagccactttaattaagctaagcccttactagaccaatgggacttaaacccacaaacacttagttaacagctaagcaccctaatcaactggcttcaatctacttctcccgccgccgggaaaaaaggcgggagaagccccggcagatttgaagctgcttcttcgaatttgcaattcaatatgaaaatcacctcggagctggtaaaaagaggcctaacccctgtctttagatttacagtccaatgcttcactcagccattttacctcacccccactgatgttcgccgaccgttgactattctctacaaaccacaaagacattggaacactatacctattattcggcgcatgagctggagtcctaggcacagctctaagcctccttattcgagccgagctgggccagccaggcaaccttctaggtaacgaccacatctacaacgttatcgtcacagcccatgcatttgtaataatcttcttcatagtaatacccatcataatcggaggctttggcaactgactagttcccctaataatcggtgcccccgatatggcgtttccccgcataaacaacataagcttctgactcttacctccctctctcctactcctgctcgcatctgctatagtggaggccggagcaggaacaggttgaacagtctaccctcccttagcagggaactactcccaccctggagcctccgtagacctaaccatcttctccttacacctagcaggtgtctcctctatcttaggggccatcaatttcatcacaacaattatcaatataaaaccccctgccataacccaataccaaacgcccctcttcgtctgatccgtcctaatcacagcagtcctacttctcctatctctcccagtcctagctgctggcatcactatactactaacagaccgcaacctcaacaccaccttcttcgaccccgccggaggaggagaccccattctataccaacacctattctgatttttcggtcaccctgaagtttatattcttatcctaccaggcttcggaataatctcccatattgtaacttactactccggaaaaaaagaaccatttggatacataggtatggtctgagctatgatatcaattggcttcctagggtttatcgtgtgagcacaccatatatttacagtaggaatagacgtagacacacgagcatatttcacctccgctaccataatcatcgctatccccaccggcgtcaaagtatttagctgactcgccacactccacggaagcaatatgaaatgatctgctgcagtgctctgagccctaggattcatctttcttttcaccgtaggtggcctgactggcattgtattagcaaactcatcactagacatcgtactacacgacacgtactacgttgtagcccacttccactatgtcctatcaataggagctgtatttgccatcataggaggcttcattcactgatttcccctattctcaggctacaccctagaccaaacctacgccaaaatccatttcactatcatattcatcggcgtaaatctaactttcttcccacaacactttctcggcctatccggaatgccccgacgttactcggactaccccgatgcatacaccacatgaaacatcctatcatctgtaggctcattcatttctctaacagcagtaatattaataattttcatgatttgagaagccttcgcttcgaagcgaaaagtcctaatagtagaagaaccctccataaacctggagtgactatatggatgccccccaccctaccacacattcgaagaacccgtatacataaaatctagacaaaaaaggaaggaatcgaaccccccaaagctggtttcaagccaaccccatggcctccatgactttttcaaaaaggtattagaaaaaccatttcataactttgtcaaagttaaattataggctaaatcctatatatcttaatggcacatgcagcgcaagtaggtctacaagacgctacttcccctatcatagaagagcttatcacctttcatgatcacgccctcataatcattttccttatctgcttcctagtcctgtatgcccttttcctaacactcacaacaaaactaactaatactaacatctcagacgctcaggaaatagaaaccgtctgaactatcctgcccgccatcatcctagtcctcatcgccctcccatccctacgcatcctttacataacagacgaggtcaacgatccctcccttaccatcaaatcaattggccaccaatggtactgaacctacgagtacaccgactacggcggactaatcttcaactcctacatacttcccccattattcctagaaccaggcgacctgcgactccttgacgttgacaatcgagtagtactcccgattgaagcccccattcgtataataattacatcacaagacgtcttgcactcatgagctgtccccacattaggcttaaaaacagatgcaattcccggacgtctaaaccaaaccactttcaccgctacacgaccgggggtatactacggtcaatgctctgaaatctgtggagcaaaccacagtttcatgcccatcgtcctagaattaattcccctaaaaatctttgaaatagggcccgtatttaccctataacaccccctctaccccctctagagcccactgtaaagctaacttagcattaaccttttaagttaaagattaagagaaccaacacctctttacagtgaaatgccccaactaaatactaccgtatggcccaccataattacccccatactccttacactattcctcatcacccaactaaaaatattaaacacaaactaccacctacctccctcaccaaagcccataaaaataaaaaattataacaaaccctgagaaccaaaatgaacgaaaatctgttcgcttcattcattgcccccacaatcctaggcctacccgccgcagtactgatcattctatttccccctctattgatccccacctccaaatatctcatcaacaaccgactaatcaccacccaacaatgactaatcaaactaacctcaaaacaaatgataaccatacacaacactaaaggacgaacctgatctcttatactagtatccttaatcatttttattgccacaactaacctcctcggactcctgcctcactcatttacaccaaccacccaactatctataaacctagccatggccatccccttatgagcgggcgcagtgattataggctttcgctctaagattaaaaatgccctagcccacttcttaccacaaggcacacctacaccccttatccccatactagttattatcgaaaccatcagcctactcattcaaccaatagccctggccgtacgcctaaccgctaacattactgcaggccacctactcatgcacctaattggaagcgccaccctagcaatatcaaccattaaccttccctctacacttatcatcttcacaattctaattctactaactatcctagaaatcgctgtcgccttaatccaagcctacgttttcacacttctagtaagcctctacctgcacgacaacacataatgacccaccaatcacatgcctatcatatagtaaaacccagcccatgacccctaacaggggccctctcagccctcctaatgacctccggcctagccatgtgatttcacttccactccataacgctcctcatactaggcctactaaccaacacactaaccatataccaatgatggcgcgatgtaacacgagaaagcacataccaaggccaccacacaccacctgtccaaaaaggccttcgatacgggataatcctatttattacctcagaagtttttttcttcgcaggatttttctgagccttttaccactccagcctagcccctaccccccaattaggagggcactggcccccaacaggcatcaccccgctaaatcccctagaagtcccactcctaaacacatccgtattactcgcatcaggagtatcaatcacctgagctcaccatagtctaatagaaaacaaccgaaaccaaataattcaagcactgcttattacaattttactgggtctctattttaccctcctacaagcctcagagtacttcgagtctcccttcaccatttccgacggcatctacggctcaacattttttgtagccacaggcttccacggacttcacgtcattattggctcaactttcctcactatctgcttcatccgccaactaatatttcactttacatccaaacatcactttggcttcgaagccgccgcctgatactggcattttgtagatgtggtttgactatttctgtatgtctccatctattgatgagggtcttactcttttagtataaatagtaccgttaacttccaattaactagttttgacaacattcaaaaaagagtaataaacttcgccttaattttaataatcaacaccctcctagccttactactaataattattacattttgactaccacaactcaacggctacatagaaaaatccaccccttacgagtgcggcttcgaccctatatcccccgcccgcgtccctttctccataaaattcttcttagtagctattaccttcttattatttgatctagaaattgccctccttttacccctaccatgagccctacaaacaactaacctgccactaatagttatgtcatccctcttattaatcatcatcctagccctaagtctggcctatgagtgactacaaaaaggattagactgaaccgaattggtatatagtttaaacaaaacgaatgatttcgactcattaaattatgataatcatatttaccaaatgcccctcatttacataaatattatactagcatttaccatctcacttctaggaatactagtatatcgctcacacctcatatcctccctactatgcctagaaggaataatactatcgctgttcattatagctactctcataaccctcaacacccactccctcttagccaatattgtgcctattgccatactagtctttgccgcctgcgaagcagcggtgggcctagccctactagtctcaatctccaacacatatggcctagactacgtacataacctaaacctactccaatgctaaaactaatcgtcccaacaattatattactaccactgacatgactttccaaaaaacacataatttgaatcaacacaaccacccacagcctaattattagcatcatccctctactattttttaaccaaatcaacaacaacctatttagctgttccccaaccttttcctccgaccccctaacaacccccctcctaatactaactacctgactcctacccctcacaatcatggcaagccaacgccacttatccagtgaaccactatcacgaaaaaaactctacctctctatactaatctccctacaaatctccttaattataacattcacagccacagaactaatcatattttatatcttcttcgaaaccacacttatccccaccttggctatcatcacccgatgaggcaaccagccagaacgcctgaacgcaggcacatacttcctattctacaccctagtaggctcccttcccctactcatcgcactaatttacactcacaacaccctaggctcactaaacattctactactcactctcactgcccaagaactatcaaactcctgagccaacaacttaatatgactagcttacacaatagcttttatagtaaagatacctctttacggactccacttatgactccctaaagcccatgtcgaagcccccatcgctgggtcaatagtacttgccgcagtactcttaaaactaggcggctatggtataatacgcctcacactcattctcaaccccctgacaaaacacatagcctaccccttccttgtactatccctatgaggcataattataacaagctccatctgcctacgacaaacagacctaaaatcgctcattgcatactcttcaatcagccacatagccctcgtagtaacagccattctcatccaaaccccctgaagcttcaccggcgcagtcattctcataatcgcccacgggcttacatcctcattactattctgcctagcaaactcaaactacgaacgcactcacagtcgcatcataatcctctctcaaggacttcaaactctactcccactaatagctttttgatgacttctagcaagcctcgctaacctcgccttaccccccactattaacctactgggagaactctctgtgctagtaaccacgttctcctgatcaaatatcactctcctacttacaggactcaacatactagtcacagccctatactccctctacatatttaccacaacacaatggggctcactcacccaccacattaacaacataaaaccctcattcacacgagaaaacaccctcatgttcatacacctatcccccattctcctcctatccctcaaccccgacatcattaccgggttttcctcttgtaaatatagtttaaccaaaacatcagattgtgaatctgacaacagaggcttacgaccccttatttaccgagaaagctcacaagaactgctaactcatgcccccatgtctaacaacatggctttctcaacttttaaaggataacagctatccattggtcttaggccccaaaaattttggtgcaactccaaataaaagtaataaccatgcacactactataaccaccctaaccctgacttccctaattccccccatccttaccaccctcgttaaccctaacaaaaaaaactcatacccccattatgtaaaatccattgtcgcatccacctttattatcagtctcttccccacaacaatattcatgtgcctagaccaagaagttattatctcgaactgacactgagccacaacccaaacaacccagctctccctaagcttcaaactagactacttctccataatattcatccctgtagcattgttcgttacatggtccatcatagaattctcactgtgatatataaactcagacccaaacattaatcagttcttcaaatatctactcatcttcctaattaccatactaatcttagttaccgctaacaacctattccaactgttcatcggctgagagggcgtaggaattatatccttcttgctcatcagttgatgatacgcccgagcagatgccaacacagcagccattcaagcaatcctatacaaccgtatcggcgatatcggtttcatcctcgccttagcatgatttatcctacactccaactcatgagacccacaacaaatagcccttctaaacgctaatccaagcctcaccccactactaggcctcctcctagcagcagcaggcaaatcagcccaattaggtctccacccctgactcccctcagccatagaaggccccaccccagtctcagccctactccactcaagcactatagttgtagcaggaatcttcttactcatccgcttccaccccctagcagaaaatagcccactaatccaaactctaacactatgcttaggcgctatcaccactctgttcgcagcagtctgcgcccttacacaaaatgacatcaaaaaaatcgtagccttctccacttcaagtcaactaggactcataatagttacaatcggcatcaaccaaccacacctagcattcctgcacatctgtacccacgccttcttcaaagccatactatttatgtgctccgggtccatcatccacaaccttaacaatgaacaagatattcgaaaaataggaggactactcaaaaccatacctctcacttcaacctccctcaccattggcagcctagcattagcaggaatacctttcctcacaggtttctactccaaagaccacatcatcgaaaccgcaaacatatcatacacaaacgcctgagccctatctattactctcatcgctacctccctgacaagcgcctatagcactcgaataattcttctcaccctaacaggtcaacctcgcttccccacccttactaacattaacgaaaataaccccaccctactaaaccccattaaacgcctggcagccggaagcctattcgcaggatttctcattactaacaacatttcccccgcatcccccttccaaacaacaatccccctctacctaaaactcacagccctcgctgtcactttcctaggacttctaacagccctagacctcaactacctaaccaacaaacttaaaataaaatccccactatacacattttatttctccaacatactcggattctaccctagcatcacacaccgcacaatcccctatctaggccttcttacgagccaaaacctgcccctactcctcctagacctaacctgactagaaaagctattacctaaaacaatttcacagcaccaaatctccacctccatcatcacctcaacccaaaaaggcataattaaactttacttcctctctttcttcttcccactcatcctaaccctgctcctaatcacataacctattcccccgagcaatctcaattacaatatatacaccaacaaacaatgttcaaccagtaactactactaatcaacgcccataatcatacaaagcccccgcaccaataggatcctcccgaatcaaccctgacccctctccttcataaattattcagcttcctacactattaaagtttaccacaaccaccaccccatcatactctttcacccacagcaccaatcctacctccatcgctaaccccactaaaacactcaccaagacctcaacccctgacccccatgcctcaggatactcctcaatagccatcgctgtagtatatccaaagacaaccatcattccccctaaataaattaaaaaaactattaaacccatataacctcccccaaaattcagaataataacacacccgaccacaccgctaacaatcaatgctaaacccccataaataggagaaggcttagaagaaaaccccacaaaccccattactaaacccacactcaacagaaacaaagcatacatcattattctcgcacggactacaaccacgaccaatgatatgaaaaaccatcgttgtatttcaactacaagaacaccaatgaccccaatacgcaaaactaaccccctaataaaattaattaaccactcattcatcgacctccccaccccatccaacatctccgcatgatgaaacttcggctcactccttggcgcctgcctgatcctccaaatcaccacaggactattcctagccatgcactactcaccagacgcctcaaccgccttttcatcaatcgcccacatcactcgagacgtaaattatggctgaatcatccgctaccttcacgccaatggcgcctcaatattctttatctgcctcttcctacacatcgggcgaggcctatattacggatcatttctctactcagaaacctgaaacatcggcattatcctcctgcttgcaactatagcaacagccttcataggctatgtcctcccgtgaggccaaatatcattctgaggggccacagtaattacaaacttactatccgccatcccatacattgggacagacctagttcaatgaatctgaggaggctactcagtagacagtcccaccctcacacgattctttacctttcacttcatcttgcccttcattattgcagccctagcagcactccacctcctattcttgcacgaaacgggatcaaacaaccccctaggaatcacctcccattccgataaaatcaccttccacccttactacacaatcaaagacgccctcggcttacttctcttccttctctccttaatgacattaacactattctcaccagacctcctaggcgacccagacaattataccctagccaaccccttaaacacccctccccacatcaagcccgaatgatatttcctattcgcctacacaattctccgatccgtccctaacaaactaggaggcgtccttgccctattactatccatcctcatcctagcaataatccccatcctccatatatccaaacaacaaagcataatatttcgcccactaagccaatcactttattgactcctagccgcagacctcctcattctaacctgaatcggaggacaaccagtaagctacccttttaccatcattggacaagtagcatccgtactatacttcacaacaatcctaatcctaataccaactatctccctaattgaaaacaaaatactcaaatgggcctgtccttgtagtataaactaatacaccagtcttgtaaaccggagatgaaaacctttttccaaggacaaatcagagaaaaagtctttaactccaccattagcacccaaagctaagattctaatttaaactattctctgttctttcatggggaagcagatttgggtaccacccaagtattgactcacccatcaacaaccgctatgtatttcgtacattactgccagccaccatgaatattgtacggtaccataaatacttgaccacctgtagtacataaaaacccaatccacatcaaaaccccctccccatgcttacaagcaagtacagcaatcaaccctcaactatcacacatcaactgcaactccaaagccacccctcacccactaggataccaacaaacctacccacccttaacagtacatagtacataaagccatttaccgtacatagcacattacagtcaaatcccttctcgtccccatggatgacccccctcagataggggtcccttgaccaccatcctccgtgaaatcaatatcccgcacaagagtgctactctcctcgctccgggcccataacacttgggggtagctaaagtgaactgtatccgacatctggttcctacttcagggtcataaagcctaaatagcccacacgttccccttaaataagacatcacgatg

SEQ ID NO: 80 - DNA, 16571 bp, Homo sapiens mitochondrial
  3109: "n" refers to a nucleotide at position 3107 of the Cambridge Reference Sequence (CRS, Anderson et al. 1981 Nature 290:457-465), later determined to be absent from the human mtDNA sequence according to the revised CRS (rCRS, Andrews et al. 1999 Nature Genetics 23:147); "n" therefore represents a single nucleotide deletion at a position corresponding to nucleotide 3107 of SEQ ID NO:1 as provided herein.
gatcacaggtctatcaccctattaaccactcacgggagctctccatgcatttggtattttcgtctggggggtgtgcacgcgatagcattgcgagacgctggagccggagcaccttatgtcgcagtatctgtctttgattcctgcctcatcctattatttatcgcacctacgttcaatattacaggcgaacatacttactaaagtgtgttaattaattaatgcttgtaggacataataataacaattgaatgtctgcacagccgctttccacacagacatcataacaaaaaatttccaccaaaccccccctcccccccgcttctggccacagcacttaaacacatctctgccaaaccccaaaaacaaagaaccctaacaccagcctaaccagatttcaaattttatcttttggcggtatgcacttttaacagtcaccccccaactaacacattattttcccctcccactcccatactactaatctcatcaatacaaccctcgcccatcctacccagcacacacacaccgctgctaaccccataccccgaaccaaccaaaccccaaagacaccccccacagtttatgtagcttacctcctcaaagcaatacactgaaaatgtttagacgggctcacatcaccccataaacaaataggtttggtcctagcctttctattagctcttagtaagattacacatgcaagcatccccgttccagtgagttcaccctctaaatcaccacgatcaaaagggacaagcatcaagcacgcagcaatgcagctcaaaacgcttagcctagccacacccccacgggaaacagcagtgattaacctttagcaataaacgaaagtttaactaagctatactaaccccagggttggtcaatttcgtgccagccaccgcggtcacacgattaacccaagtcaatagaagccggcgtaaagagtgttttagatcaccccctccccaataaagctaaaactcacctgagttgtaaaaaactccagttgacacaaaatagactacgaaagtggctttaacatatctgaacacacaatagctaagacccaaactgggattagataccccactatgcttagccctaaacctcaacagttaaatcaacaaaactgctcgccagaacactacgagccacagcttaaaactcaaaggacctggcggtgcttcatacccctctagaggagcctgttctgtaatcgataaaccccgatcaacctcaccacctcttgctcagcctatataccgccatcttcagcaaaccctgatgaaggctacaaagtaagcgcaagtacccacgtaaagacgttaggtcaaggtgtagcccatgaggtggcaagaaatgggctacattttctaccccagaaaactacgatagcccttatgaaacttaagggtcgaaggtggatttagcagtaaactgagagtagagtgcttagttgaacagggccctgaagcgcgtacacaccgcccgtcaccctcctcaagtatacttcaaaggacatttaactaaaacccctacgcatttatatagaggagacaagtcgtaacatggtaagtgtactggaaagtgcacttggacgaaccagagtgtagcttaacacaaagcacccaacttacacttaggagatttcaacttaacttgaccgctctgagctaaacctagccccaaacccactccaccttactaccagacaaccttagccaaaccatttacccaaataaagtataggcgatagaaattgaaacctggcgcaatagatatagtaccgcaagggaaagatgaaaaattatagccaagcataatatagcaaggactaacccctataccttctgcataatgaattaactagaaataactttgcaaggagagccaaagctaagacccccgaaaccagacgagctacctaagaacagctaaaagagcacacccgtctatgtagcaaaatagtgggaagatttataggtagaggcgacaaacctaccgagcctggtgatagctggttgtccaagatagaatcttagttcaactttaaatttgcccacagaaccctctaaatccccttgtaaatttaactgttagtccaaagaggaacagctctttggacactaggaaaaaaccttgtagagagagtaaaaaatttaacacccatagtaggcctaaaagcagccaccaattaagaaagcgttcaagctcaacacccactacctaaaaaatcccaaacatataactgaactcctcacacccaattggaccaatctatcaccctatagaagaactaatgttagtataagtaacatgaaaacattctcctccgcataagcctgcgtcagattaaaacactgaactgacaattaacagcccaatatctacaatcaaccaacaagtcattattaccctcactgtcaacccaacacaggcatgctcataaggaaaggttaaaaaaagtaaaaggaactcggcaaatcttaccccgcctgtttaccaaaaacatcacctctagcatcaccagtattagaggcaccgcctgcccagtgacacatgtttaacggccgcggtaccctaaccgtgcaaaggtagcataatcacttgttccttaaatagggacctgtatgaatggctccacgagggttcagctgtctcttacttttaaccagtgaaattgacctgcccgtgaagaggcgggcatgacacagcaagacgagaagaccctatggagctttaatttattaatgcaaacagtacctaacaaacccacaggtcctaaactaccaaacctgcattaaaaatttcggttggggcgacctcggagcagaacccaacctccgagcagtacatgctaagacttcaccagtcaaagcgaactactatactcaattgatccaataacttgaccaacggaacaagttaccctagggataacagcgcaatcctattctagagtccatatcaacaatagggtttacgacctcgatgttggatcaggacatcccgatggtgcagccgctattaaaggttcgtttgttcaacgattaaagtcctacgtgatctgagttcagaccggagtaatccaggtcggtttctatctacnttcaaattcctccctgtacgaaaggacaagagaaataaggcctacttcacaaagcgccttcccccgtaaatgatatcatctcaacttagtattatacccacacccacccaagaacagggtttgttaagatggcagagcccggtaatcgcataaaacttaaaactttacagtcagaggttcaattcctcttcttaacaacatacccatggccaacctcctactcctcattgtacccattctaatcgcaatggcattcctaatgcttaccgaacgaaaaattctaggctatatacaactacgcaaaggccccaacgttgtaggcccctacgggctactacaacccttcgctgacgccataaaactcttcaccaaggagcccctaaaacccgccacatctaccatcaccctctacatcaccgccccgaccttagctctcaccatcgctcttctactatgaacccccctccccatacccaaccccctggtcaacctcaacctaggcctcctatttattctagccacctctagcctagccgtttactcaatcctctgatcagggtgagcatcaaactcaaactacgccctgatcggcgcactgcgagcagtagcccaaacaatctcatatgaagtcaccctagccatcattctactatcaacattactaataagtggctcctttaacctctccacccttatcacaacacaagaacacctctgattactcctgccatcatgacccttggccataatatgatttatctccacactagcagagaccaaccgaacccccttcgaccttgccgaaggggagtccgaactagtctcaggcttcaacatcgaatacgccgcaggccccttcgccctattcttcatagccgaatacacaaacattattataataaacaccctcaccactacaatcttcctaggaacaacatatgacgcactctcccctgaactctacacaacatattttgtcaccaagaccctacttctaacctccctgttcttatgaattcgaacagcatacccccgattccgctacgaccaactcatacacctcctatgaaaaaacttcctaccactcaccctagcattacttatatgatatgtctccatacccattacaatctccagcattccccctcaaacctaagaaatatgtctgataaaagagttactttgatagagtaaataataggagcttaaacccccttatttctaggactatgagaatcgaacccatccctgagaatccaaaattctccgtgccacctatcacaccccatcctaaagtaaggtcagctaaataagctatcgggcccataccccgaaaatgttggttatacccttcccgtactaattaatcccctggcccaacccgtcatctactctaccatctttgcaggcacactcatcacagcgctaagctcgcactgattttttacctgagtaggcctagaaataaacatgctagcttttattccagttctaaccaaaaaaataaaccctcgttccacagaagctgccatcaagtatttcctcacgcaagcaaccgcatccataatccttctaatagctatcctcttcaacaatatactctccggacaatgaaccataaccaatactaccaatcaatactcatcattaataatcataatggctatagcaataaaactaggaatagccccctttcacttctgagtcccagaggttacccaaggcacccctctgacatccggcctgcttcttctcacatgacaaaaactagcccccatctcaatcatataccaaatctctccctcactaaacgtaagccttctcctcactctctcaatcttatccatcatagcaggcagttgaggtggattaaaccaaacccagctacgcaaaatcttagcatactcctcaattacccacataggatgaataatagcagttctaccgtacaaccctaacataaccattcttaatttaactatttatattatcctaactactaccgcattcctactactcaacttaaactccagcaccacgaccctactactatctcgcacctgaaacaagctaacatgactaacacccttaattccatccaccctcctctccctaggaggcctgcccccgctaaccggctttttgcccaaatgggccattatcgaagaattcacaaaaaacaatagcctcatcatccccaccatcatagccaccatcaccctccttaacctctacttctacctacgcctaatctactccacctcaatcacactactccccatatctaacaacgtaaaaataaaatgacagtttgaacatacaaaacccaccccattcctccccacactcatcgcccttaccacgctactcctacctatctccccttttatactaataatcttatagaaatttaggttaaatacagaccaagagccttcaaagccctcagtaagttgcaatacttaatttctgtaacagctaaggactgcaaaaccccactctgcatcaactgaacgcaaatcagccactttaattaagctaagcccttactagaccaatgggacttaaacccacaaacacttagttaacagctaagcaccctaatcaactggcttcaatctacttctcccgccgccgggaaaaaaggcgggagaagccccggcaggtttgaagctgcttcttcgaatttgcaattcaatatgaaaatcacctcggagctggtaaaaagaggcctaacccctgtctttagatttacagtccaatgcttcactcagccattttacctcacccccactgatgttcgccgaccgttgactattctctacaaaccacaaagacattggaacactatacctattattcggcgcatgagctggagtcctaggcacagctctaagcctccttattcgagccgagctgggccagccaggcaaccttctaggtaacgaccacatctacaacgttatcgtcacagcccatgcatttgtaataatcttcttcatagtaatacccatcataatcggaggctttggcaactgactagttcccctaataatcggtgcccccgatatggcgtttccccgcataaacaacataagcttctgactcttacctccctctctcctactcctgctcgcatctgctatagtggaggccggagcaggaacaggttgaacagtctaccctcccttagcagggaactactcccaccctggagcctccgtagacctaaccatcttctccttacacctagcaggtgtctcctctatcttaggggccatcaatttcatcacaacaattatcaatataaaaccccctgccataacccaataccaaacgcccctcttcgtctgatccgtcctaatcacagcagtcctacttctcctatctctcccagtcctagctgctggcatcactatactactaacagaccgcaacctcaacaccaccttcttcgaccccgccggaggaggagaccccattctataccaacacctattctgatttttcggtcaccctgaagtttatattcttatcctaccaggcttcggaataatctcccatattgtaacttactactccggaaaaaaagaaccatttggatacataggtatggtctgagctatgatatcaattggcttcctagggtttatcgtgtgagcacaccatatatttacagtaggaatagacgtagacacacgagcatatttcacctccgctaccataatcatcgctatccccaccggcgtcaaagtatttagctgactcgccacactccacggaagcaatatgaaatgatctgctgcagtgctctgagccctaggattcatctttcttttcaccgtaggtggcctgactggcattgtattagcaaactcatcactagacatcgtactacacgacacgtactacgttgtagctcacttccactatgtcctatcaataggagctgtatttgccatcataggaggcttcattcactgatttcccctattctcaggctacaccctagaccaaacctacgccaaaatccatttcactatcatattcatcggcgtaaatctaactttcttcccacaacactttctcggcctatccggaatgccccgacgttactcggactaccccgatgcatacaccacatgaaacatcctatcatctgtaggctcattcatttctctaacagcagtaatattaataattttcatgatttgagaagccttcgcttcgaagcgaaaagtcctaatagtagaagaaccctccataaacctggagtgactatatggatgccccccaccctaccacacattcgaagaacccgtatacataaaatctagacaaaaaaggaaggaatcgaaccccccaaagctggtttcaagccaaccccatggcctccatgactttttcaaaaaggtattagaaaaaccatttcataactttgtcaaagttaaattataggctaaatcctatatatcttaatggcacatgcagcgcaagtaggtctacaagacgctacttcccctatcatagaagagcttatcacctttcatgatcacgccctcataatcattttccttatctgcttcctagtcctgtatgcccttttcctaacactcacaacaaaactaactaatactaacatctcagacgctcaggaaatagaaaccgtctgaactatcctgcccgccatcatcctagtcctcatcgccctcccatccctacgcatcctttacataacagacgaggtcaacgatccctcccttaccatcaaatcaattggccaccaatggtactgaacctacgagtacaccgactacgggggactaatcttcaactcctacatacttcccccattattcctagaaccaggcgacctgcgactccttgacgttgacaatcgagtagtactcccgattgaagcccccattcgtataataattacatcacaagacgtcttgcactcatgagctgtccccacattaggcttaaaaacagatgcaattcccggacgtctaaaccaaaccactttcaccgctacacgaccgggggtatactacggtcaatgctctgaaatctgtggagcaaaccacagtttcatgcccatcgtcctagaattaattcccctaaaaatctttgaaatagggcccgtatttaccctatagcaccccctctaccccctctagagcccactgtaaagctaacttagcattaaccttttaagttaaagattaagagaaccaacacctctttacagtgaaatgccccaactaaatactaccgtatggcccaccataattacccccatactccttacactattcctcatcacccaactaaaaatattaaacacaaactaccacctacctccctcaccaaagcccataaaaataaaaaattataacaaaccctgagaaccaaaatgaacgaaaatctgttcgcttcattcattgcccccacaatcctaggcctacccgccgcagtactgatcattctatttccccctctattgatccccacctccaaatatctcatcaacaaccgactaatcaccacccaacaatgactaatcaaactaacctcaaaacaaatgataaccatacacaacactaaaggacgaacctgatctcttatactagtatccttaatcatttttattgccacaactaacctcctcggactcctgcctcactcatttacaccaaccacccaactatctataaacctagccatggccatccccttatgagcgggcgcagtgattataggctttcgctctaagattaaaaatgccctagcccacttcttaccacaaggcacacctacaccccttatccccatactagttattatcgaaaccatcagcctactcattcaaccaatagccctggccgtacgcctaaccgctaacattactgcaggccacctactcatgcacctaattggaagcaccaccctagcaatatcaaccattaaccttccctctacacttatcatcttcacaattctaattctactgactatcctagaaatcgctgtcgccttaatccaagcctacgttttcacacttctagtaagcctctacctgcacgacaacacataatgacccaccaatcacatgcctatcatatagtaaaacccagcccatgacccctaacaggggccctctcagccctcctaatgacctccggcctagccatgtgatttcacttccactccataacgctcctcatactaggcctactaaccaacacactaaccatataccaatgatggcgcgatgtaacacgagaaagcacataccaaggccaccacacaccacctgtccaaaaaggccttcgatacgggataatcctatttattacctcagaagtttttttcttcgcaggatttttctgagccttttaccactccagcctagcccctaccccccaattaggagggcactggcccccaacaggcatcaccccgctaaatcccctagaagtcccactcctaaacacatccgtattactcgcatcaggagtatcaatcacctgagctcaccatagtctaatagaaaacaaccgaaaccaaataattcaagcactgctcattacaattttactgggtctctattttaccctcctacaagcctcagagtacttcgagtctcccttcaccatttccgacggcatctacggctcaacattttttgtagccacaggcttccacggacttcacgtcattattggctcaactttcctcactatctgcttcatccgccaactaatatttcactttacatccaaacatcactttggcttcgaagccgccgcctgatactggcattttgtagatgtggtttgactatttctgtatgtctccatctattgatgagggtcttactcttttagtataaatagtaccgttaacttccaattaactagttttgacaacattcaaaaaagagtaataaacttcgccttaattttaataatcaacaccctcctagccttactactaataattattacattttgactaccacaactcaacggctacatagaaaaatccaccccttacgagtgcggcttcgaccctatatcccccgcccgcgtccctttctccataaaattcttcttagtagctattaccttcttattatttgatctagaaattgccctccttttacccctaccatgagccctacaaacaactaacctgccactaatagttatgtcatccctcttattaatcatcatcctagccctaagtctggcctatgagtgactacaaaaaggattagactgagccgaattggtatatagtttaaacaaaacgaatgatttcgactcattaaattatgataatcatatttaccaaatgcccctcatttacataaatattatactagcatttaccatctcacttctaggaatactagtatatcgctcacacctcatgtcctccctactatgcctagaaggaataatactatcgctgttcattatagctactctcataaccctcaacacccactccctcttagccaatattgtgcctattgccatactagtctttgccgcctgcgaagcagcggtgggcctagccctactagtctcaatctccaacacatatggcctagactacgtacataacctaaacctactccaatgctaaaactaatcgtcccaacaattatattactaccactgacatgactttccaaaaaacacataatttgaatcaacacaaccacccacagcctaattattagcatcatccctctactattttttaaccaaatcaacaacaacctatttagctgttccccaaccttttcctccgaccccctaacaacccccctcctaatactaactacctgactcctgcccctcacaatcatggcaagccaacgccacttatccagtgaaccactatcacgaaaaaaactctacctctctatactaatctccctacaaatctccttaattataacattcacagccacagaactaatcatattttatatcttcttcgaaaccacacttatccccaccttggctatcatcacccgatgaggcaaccagccagaacgcctgaacgcaggcacatacttcctattctacaccctagtaggctcccttcccctactcatcgcactaatttacactcacaacaccctaggctcactaaacattctactactcaccctcactgcccaagaactatcaaactcctgagccaacaacttaatatgactagcttacacaatagcttttatagtaaagatacctctttacggactccacttatgactccctaaagcccatgtcgaagcccccatcgctgggtcaatagtacttgccgcagtactcttgaagctaggcggctatggtataatacgcctcacactcattctcaaccccctgacaaaacacatagcctaccccttccttgtactatccctatgaggcataattataacaagctccatctgcctacgacaaacagacctaaaatcgctcattgcatactcttcaatcagccacatagccctcgtagtaacagccattctcatccaaaccccctgaagcttcaccggcgcagtcattctcataatcgcccacggacttacatcctcattactattctgcctagcaaactcaaactacgaacgcactcacagtcgcatcataatcctctctcaaggacttcaaactctactcccactaatagctttttgatgacttctagcaagcctcgctaacctcgccttaccccccactattaacctactgggagaactctctgtgctagtaaccacattctcctgatcaaatatcactctcctacttacaggactcaacatactagtcacagccctatactccctctacatatttaccacaacacaatggggctcactcacccaccacattaacaacataaaaccctcattcacacgagaaaacaccctcatgttcatacacctatcccccattctcctcctatccctcaaccccgacatcattaccgggttttcctcttgtaaatatagtttaaccaaaacatcagattgtgaatctgacaacagaggcttacgaccccttatttaccgagaaagctcacaagaactgctaactcatgcccccatgtctaacaacatggctttctcaacttttaaaggataacagctatccattggtcttaggccccaagaattttggtgcaactccaaataaaagtaataaccatgcacactactataaccaccctaaccctaacttccctaattccccccatccttaccaccctcgttaaccctaacaaaaaaaactcatacccccattatgtaaaatccattgtcgcatccacctttattatcagtctcttccccacaacaatattcatgtgcctagaccaagaagttattatctcgaactgacactgagccacaacccaaacaacccagctctccctaagcttcaaactagactacttctccataatattcatccctgtagcattgttcgttacatggtccatcatagaattctcactgtgatatataaactcagacccaaacattaatcagttcttcaaatatctactcatcttcctaattaccatactaatcttagttaccgctaacaacctattccaactgttcatcggctgagagggcgtaggaattatatccttcttgctcatcagttgatgatacgcccgagcagatgccaacacagcagccattcaagcaatcctatacaaccgtatcggcgatatcggtttcatcctcgccttagcatgatttatcctacactccaactcatgagacccacaacaaatagcccttctaaacgccaatccaagcctcaccccactactaggcctcctcctagcagcagcaggcaaatcagcccaattaggtctccacccctgactcccctcagccatagaaggccccaccccagtctcagccctactccactcaagcactatagttgtagcaggaatcttcttactcatccgcttccaccccctagcagaaaatagcccactaatccaaactctaacactatgcttaggcgctatcaccactctgttcgcagcagtctgcgcccttacacaaaatgacatcaaaaaaatcgtagccttctccacttcaagtcaactaggactcataatagttacaatcggcatcaaccaaccacacctagcattcctgcacatctgtacccacgccttcttcaaagccatactatttatgtgctccgggtccatcatccacaaccttaacaatgaacaagatattcgaaaaataggaggactactcaaaaccatacctctcacttcaacctccctcaccattggcagcctagcattagcaggaatacctttcctcacaggtttctactccaaagaccacatcatcgaaaccgcaaacatatcatacacaaacgcctgagccctatctattactctcatcgctacctccctgacaagcgcctatagcactcgaataattcttctcaccctaacaggtcaacctcgcttccccacccttactaacattaacgaaaataaccccaccctactaaaccccattaaacgcctggcagccggaagcctattcgcaggatttctcattactaacaacatttcccccgcatcccccttccaaacaacaatccccctctacctaaaactcacagccctcgctgtcactttcctaggacttctaacagccctagacctcaactacctaaccaacaaacttaaaataaaatccccactatgcacattttatttctccaacatactcggattctaccctagcatcacacaccgcacaatcccctatctaggccttcttacgagccaaaacctgcccctactcctcctagacctaacctgactagaaaagctattacctaaaacaatttcacagcaccaaatctccacctccatcatcacctcaacccaaaaaggcataattaaactttacttcctctctttcttcttcccactcatcctaaccctactcctaatcacataacctattcccccgagcaatttcaattacaatatatacaccaacaaacaatgttcaaccagtaactactactaatcaacgcccataatcatacaaagcccccgcaccaataggatcctcccgaatcaaccctgacccctctccttcataaattattcagcttcctacactattaaagtttaccacaaccaccaccccatcatactctttcacccacagcaccaatcctacctccatcgctaaccccactaaaacactcaccaagacctcaacccctgacccccatgcctcaggatactcctcaatagccatcgctgtagtatatccaaagacaaccatcattccccctaaataaattaaaaaaactattaaacccatataacctcccccaaaattcagaataataacacacccgaccacaccgctaacaatcaatactaaacccccataaataggagaaggcttagaagaaaaccccacaaaccccattactaaacccacactcaacagaaacaaagcatacatcattattctcgcacggactacaaccacgaccaatgatatgaaaaaccatcgttgtatttcaactacaagaacaccaatgaccccaatacgcaaaattaaccccctaataaaattaattaaccactcactcatcgacctccccaccccatccaacatctccgcatgatgaaacttcggctcactccttggcgcctgcctgatcctccaaatcaccacaggactattcctagccatgcactactcaccagacgcctcaaccgccttttcatcaatcgcccacatcactcgagacgtaaattatggctgaatcatccgctaccttcacgccaatggcgcctcaatattctttatctgcctcttcctacacatcgggcgaggcctatattacggatcatttctctactcagaaacctgaaacatcggcattatcctcctgcttgcaactatagcaacagccttcataggctatgtcctcccgtgaggccaaatatcattctgaggggccacagtaattacaaacttactatccgccatcccatacattgggacagacctagttcaatgaatctgaggaggctactcagtagacagtcccaccctcacacgattctttacctttcacttcatcttgcccttcattattgcagccctagcagcactccacctcctattcttgcacgaaacgggatcaaacaaccccctaggaatcacctcccattccgataaaatcaccttccacccttactacacaatcaaagacgccctcggcttacttctcttccttctctccttaatgacattaacactattctcaccagacctcctaggcgacccagacaattataccctagccaaccccttaaacacccctccccacatcaagcccgaatgatatttcctattcgcctacacaattctccgatccgtccctaacaaactaggaggcgtccttgccctattactatccatcctcatcctagcaataatccccatcctccatatatccaaacaacaaagcataatatttcgcccactaagccaatcactttattgactcctagccgcagacctcctcattctaacctgaatcggaggacaaccagtaagctacccttttaccatcattggacaagtagcatccgtactatacttcacaacaatcctaatcctaataccaactatctccctaattgaaaacaaaatactcaaatgggcctgtccttgtagtataaactaatacaccagtcttgtaagccggagatgaaaacctttttccaaggacaaatcagagaaaaagtctttaactccaccattagcacccaaagctaagattctaatttaaactattctctgttctttcatggggaagcagatttgggtaccacccaagtattgactcacccatcaacaaccgctatgtatttcgtacattactgccagccaccatgaatattgtacggtaccataaatacttgaccacctgtagtacataaaaacccaatccacatcaaaaccccctccccatgcttacaagcaagtacagcaatcaacctccaactatcatacatcaactgcaactccaaagccacccctcacccactaggataccaacaaacctacccacccttaacagtacatagcacataaagccatttaccgtacatagcacattacagtcaaatcccttctcgtccccatggatgacccccctcagataggggtcccttgaccaccatcctccgtgaaatcaatatcccgcacaagagtgctactctcctcgctccgggcccataacacttgggggtagctaaagtgaactgtatccgacatctggttcctacttcagggccataaagcctaaatagcccacacgttccccttaaataagacatcacgatg

SEQ ID NO: 81 - DNA, 16572 bp, Homo sapiens mitochondrial
  3110: "n" refers to a nucleotide at position 3107 of the Cambridge Reference Sequence (CRS, Anderson et al. 1981 Nature 290:457-465), later determined to be absent from the human mtDNA sequence according to the revised CRS (rCRS, Andrews et al. 1999 Nature Genetics 23:147); "n" therefore represents a single nucleotide deletion at a position corresponding to nucleotide 3107 of SEQ ID NO:1 as provided herein.
gatcacaggtctatcaccctattaaccactcacgggagctctccatgcatttggtattttcgtctggggggtgtgcacgcgatagcattgcgagacgctggagccggagcaccctatgtcgcagtatctgtctttgattcctgcctcatcctattatttatcgcacctacgttcaatattacaggcgaacatacttactaaagtgtgttaattaattaatgcttgtaggacataataataacaattgaatgtctgcacagccgctttccacacagacatcataacaaaaaatttccaccaaaccccccctcccccgccttctggccacagcacttaaacacatctctgccaaaccccaaaaacaaagaaccctaacaccagcctaaccagatttcaaattttatcttttggcggtatgcacttttaacagtcaccccccaactaacacattattttcccctcccactcccatactactaatctcatcaatacaaccctcgcccatcctacccagcacacacacaccacgctgctaaccccataccccgaaccaaccaaaccccaaagacaccccccacagtttatgtagcttacctcctcaaagcaatacactgaaaatgtttagacgggctcacatcaccccataaacaaataggtttggtcctagcctttctattagctcttagtaagattacacatgcaagcatccccgttccagtgagttcaccctctaaatcaccacgatcaaaagggacaagcatcaagcacgcagcaatgcagctcaaaacgcttagcctagccacacccccacgggaaacagcagtgattaacctttagcaataaacgaaagtttaactaagctatactaaccccagggttggtcaatttcgtgccagccaccgcggtcacacgattaacccaagtcaatagaagccggcgtaaagagtgttttagatcaccccctccccaataaagctaaaactcacctgagttgtaaaaaactccagttgacacaaaatagactacgaaagtggctttaacatatctgaacacacaatagctaagacccaaactgggattagataccccactatgcttagccctaaacctcaacagttaaatcaacaaaactgctcgccagaacactacgagccacagcttaaaactcaaaggacctggcggtgcttcatacccctctagaggagcctgttctgtaatcgataaaccccgatcaacctcaccacctcttgctcagcctatataccgccatcttcagcaaaccctgatgaaggctacaaagtaagcgcaagtacccacgtaaagacgttaggtcaaggtgtagcccatgaggtggcaagaaatgggctacattttctaccccagaaaactacgatagcccttatgaaacttaagggtcgaaggtggatttagcagtaaactgagagtagagtgcttagttgaacagggccctgaagcgcgtacacaccgcccgtcaccctcctcaagtatacttcaaaggacatttaactaaaacccctacgcatttatatagaggagacaagtcgtaacatggtaagtgtactggaaagtgcacttggacgaaccagagtgtagcttaacacaaagcacccaacttacacttaggagatttcaacttaacttgaccgctctgagctaaacctagccccaaacccactccaccttactaccagacaaccttagccaaaccatttacccaaataaagtataggcgatagaaattgaaacctggcgcaatagatatagtaccgcaagggaaagatgaaaaattatagccaagcataatatagcaaggactaacccctataccttctgcataatgaattaactagaaataactttgcaaggagagccaaagctaagacccccgaaaccagacgagctacctaagaacagctaaaagagcacacccgtctatgtagcaaaatagtgggaagatttataggtagaggcgacaaacctaccgagcctggtgatagctggttgtccaagatagaatcttagttcaactttaaatttgcccacagaaccctctaaatccccttgtaaatttaactgttagtccaaagaggaacagctctttggacactaggaaaaaaccttgtagagagagtaaaaaatttaacacccatagtaggcctaaaagcagccaccaattaagaaagcgttcaagctcaacacccactacctaaaaaatcccaaacatataactgaactcctcacacccaattggaccaatctatcaccctatagaagaactaatgttagtataagtaacatgaaaacattctcctccgcataagcctgcgtcagattaaaacactgaactgacaattaacagcccaatatctacaatcaaccaacaagtcattattaccctcactgtcaacccaacacaggcatgctcataaggaaaggttaaaaaaagtaaaaggaactcggcaaatcttaccccgcctgtttaccaaaaacatcacctctagcatcaccagtattagaggcaccgcctgcccagtgacacatgtttaacggccgcggtaccctaaccgtgcaaaggtagcataatcacttgttccttaaatagggacctgtatgaatggctccacgagggttcagctgtctcttacttttaaccagtgaaattgacctgcccgtgaagaggcgggcatgacacagcaagacgagaagaccctatggagctttaatttattaatgcaaacagtacctaacaaacccacaggtcctaaactaccaaacctgcattaaaaatttcggttggggcgacctcggagcagaacccaacctccgagcagtacatgctaagacttcaccagtcaaagcgaactactatactcaattgatccaataacttgaccaacggaacaagttaccctagggataacagcgcaatcctattctagagtccatatcaacaatagggtttacgacctcgatgttggatcaggacatcccgatggtgcagccgctattaaaggttcgtttgttcaacgattaaagtcctacgtgatctgagttcagaccggagtaatccaggtcggtttctatctacnttcaaattcctccctgtacgaaaggacaagagaaataaggcctacttcacaaagcgccttcccccgtaaatgatatcatctcaacttagtattatacccacacccacccaagaacagggtttgttaagatggcagagcccggtaatcgcataaaacttaaaactttacagtcagaggttcaattcctcttcttaacaacatacccatggccaacctcctactcctcattgtacccattctaatcgcaatggcattcctaatgcttaccgaacgaaaaattctaggctatatacaactacgcaaaggccccaacgttgtaggcccctacgggctactacaacccttcgctgacgccataaaactcttcaccaaggagcccctaaaacccgccacatctaccatcaccctctacatcaccgccccgaccttagctctcaccatcgctcttctactatgaacccccctccccatacccaaccccctggtcaacctcaacctaggcctcctatttattctagccacctctagcctagccgtttactcaatcctctgatcagggtgagcatcaaactcaaactacgccctgatcggcgcactgcgagcagtagcccaaacaatctcatatgaagtcaccctagccatcattctactatcaacattactaataagtggctcctttaacctctccacccttatcacaacacaagaacacctctgattactcctgccatcatgacccttggccataatatgatttatctccacactagcagagaccaaccgaacccccttcgaccttgccgaaggggagtccgaactagtctcaggcttcaacatcgaatacgccgcaggccccttcgccctattcttcatagccgaatacacaaacattattataataaacaccctcaccactacaatcttcctaggaacaacatatgacgcactctcccctgaactctacacaacatattttgtcaccaagaccctacttctaacctccctgttcttatgaattcgaacagcatacccccgattccgctacgaccaactcatacacctcctatgaaaaaacttcctaccactcaccctagcattacttatatgatatgtctccatacccattacaatctccagcattccccctcaaacctaagaaatatgtctgataaaagagttactttgatggagtaaataataggagcttaaacccccttatttctaggactatgagaatcgaacccatccctgagaatccaaaattctccgtgccacctatcacaccccatcctaaagtaaggtcagctaaataagctatcgggcccataccccgaaaatgttggttatacccttcccgtactaattaatcccctggcccaacccgtcatctactctaccatctttgcaggcacactcatcacagcgctaagctcgcactgattttttacctgagtaggcctagaaataaacatgctagcttttattccagttctaaccaaaaaaataaaccctcgttccacagaagctgccatcaagtatttcctcacgcaagcaaccgcatccataatccttctaatagctatcctcttcaacaatatactctccggacaatgaaccataaccaatactaccaatcaatactcatcattaataatcataatggctatagcaataaaactaggaatagccccctttcacttctgagtcccagaggttacccaaggcacccctctgacatccggcctgcttcttctcacatgacaaaaactagcccccatctcaatcatataccaaatctctccctcactaaacgtaagccttctcctcactctctcaatcttatccatcatagcaggcagttgaggtggattaaaccaaacccagctacgcaaaatcttagcatactcctcaattacccacataggatgaataatagcagttctaccgtacaaccctaacataaccattcttaatttaactatttatattatcctaactactaccgcattcctactactcaacttaaactccagcaccacgaccctactactatctcgcacctgaaacaagctaacatgactaacacccttaattccatccaccctcctctccctaggaggcctgcccccgctaaccggctttttgcccaaatgggccattatcgaagaattcacaaaaaacaatagcctcatcatccccaccatcatagccaccatcaccctccttaacctctacttctacctacgcctaatctactccacctcaatcacactactccccatatctaacaacgtaaaaataaaatgacagtttgaacatacaaaacccaccccattcctccccacactcatcgcccttaccacgctactcctacctatctccccttttatactaataatcttatagaaatttaggttaaatacagaccaagagccttcaaagccctcagtaagttgcaatacttaatttctgtaacagctaaggactgcaaaaccccactctgcatcaactgaacgcaaatcagccactttaattaagctaagcccttactagaccaatgggacttaaacccacaaacacttagttaacagctaagcaccctaatcaactggcttcaatctacttctcccgccgccgggaaaaaaggcgggagaagccccggcaggtttgaagctgcttcttcgaatttgcaattcaatatgaaaatcacctcggagctggtaaaaagaggcctaacccctgtctttagatttacagtccaatgcttcactcagccattttacctcacccccactgatgttcgccgaccgttgactattctctacaaaccacaaagacattggaacactatacctattattcggcgcatgagctggagtcctaggcacagctctaagcctccttattcgagccgagctgggccagccaggcaaccttctaggtaacgaccacatctacaacgttatcgtcacagcccatgcatttgtaataatcttcttcatagtaatacccatcataatcggaggctttggcaactgactagttcccctaataatcggtgcccccgatatggcgtttccccgcataaacaacataagcttctgactcttacctccctctctcctactcctgctcgcatctgctatagtggaagccggagcaggaacaggttgaacagtctaccctcccttagcagggaactactcccaccctggagcctccgtagacctaaccatcttctccttacacctagcaggtgtctcctctatcttaggggccatcaatttcatcacaacaattatcaatataaaaccccctgccataacccaataccaaacgcccctcttcgtctgatccgtcctaatcacagcagtcctacttctcctatctctcccagtcctagctgctggcatcactatactactaacagaccgcaacctcaacaccaccttcttcgaccccgccggaggaggagaccccattctataccaacacctattctgatttttcggtcaccctgaagtttatattcttatcctaccaggcttcggaataatctcccatattgtaacttactactccggaaaaaaagaaccatttggatacataggtatggtctgagctatgatatcaattggcttcctagggtttatcgtgtgagcacaccatatatttacagtaggaatagacgtagacacacgagcatatttcacctccgctaccataatcatcgctatccccaccggcgtcaaagtatttagctgactcgccacactccacggaagcaatatgaaatgatctgctgcagtgctctgagccctaggattcatctttcttttcaccgtaggtggcctgactggcattgtattagcaaactcatcactagacatcgtactacacgacacgtactacgttgtagctcacttccactatgtcctatcaataggagctgtatttgccatcataggaggcttcattcactgatttcccctattctcaggctacaccctagaccaaacctacgccaaaatccatttcactatcatattcatcggcgtaaatctaactttcttcccacaacactttctcggcctatccggaatgccccgacgttactcggactaccccgatgcatacaccacatgaaacatcctatcatctgtaggctcattcatttctctaacagcagtaatattaataattttcatgatttgagaagccttcgcttcgaagcgaaaagtcctaatagtagaagaaccctccataaacctggagtgactatatggatgccccccaccctaccacacattcgaagaacccgtatacataaaatctagacaaaaaaggaaggaatcgaaccccccaaagctggtttcaagccaaccccatggcctccatgactttttcaaaaaggtattagaaaaaccatttcataactttgtcaaagttaaattataggctaaatcctatatatcttaatggcacatgcagcgcaagtaggtctacaagacgctacttcccctatcatagaagagcttatcacctttcatgatcacgccctcataatcattttccttatctgcttcctagtcctgtatgcccttttcctaacactcacaacaaaactaactaatactaacatctcagacgctcaggaaatagaaaccgtctgaactatcctgcccgccatcatcctagtcctcatcgccctcccatccctacgcatcctttacataacagacgaggtcaacgatccctcccttaccatcaaatcaattggccaccaatggtactgaacctacgagtacaccgactacggcggactaatcttcaactcctacatacttcccccattattcctagaaccaggcgacctgcgactccttgacgttgacaatcgagtagtactcccgattgaagcccccattcgtataataattacatcacaagacgtcttgcactcatgagctgtccccacattaggcttaaaaacagatgcaattcccggacgtctaaaccaaaccactttcaccgctacacgaccgggggtatactacggtcaatgctctgaaatctgtggagcaaaccacagtttcatgcccatcgtcctagaattaattcccctaaaaatctttgaaatagggcccgtatttaccctatagcaccccctctaccccctctagagcccactgtaaagctaacttagcattaaccttttaagttaaagattaagagaaccaacacctctttacagtgaaatgccccaactaaatactaccgtatggcccaccataattacccccatactccttacactattcctcatcacccaactaaaaatattaaacacaaactaccacctacctccctcaccaaagcccataaaaataaaaaattataacaaaccctgagaaccaaaatgaacgaaaatctgttcgcttcattcattgcccccacaatcctaggcctacccgccgcagtactgatcattctatttccccctctattgatccccacctccaaatatctcatcaacaaccgactaatcaccacccaacaatgactaatcaaactaacctcaaaacaaatgataaccatacacaacactaaaggacgaacctgatctcttatactagtatccttaatcatttttattgccacaactaacctcctcggactcctgcctcactcatttacaccaaccacccaactatctataaacctagccatggccatccccttatgagcgggcgcagtgattataggctttcgctctaagattaaaaatgccctagcccacttcttaccacaaggcacacctacaccccttatccccatactagttattatcgaaaccatcagcctactcattcaaccaatagccctggccgtacgcctaaccgctaacattactgcaggccacctactcatgcacctaattggaagcaccaccctagcaatatcaaccattaaccttccctctacacttatcatcttcacaattctaattctactgactatcctagaaatcgctgtcgccttaatccaagcctacgttttcacacttctagtaagcctctacctgcacgacaacacataatgacccaccaatcacatgcctatcatatagtaaaacccagcccatgacccctaacaggggccctctcagccctcctaatgacctccggcctagccatgtgatttcacttccactccataacgctcctcatactaggcctactaaccaacacactaaccatataccaatggtggcgcgatgtaacacgagaaagcacataccaaggccaccacacaccacctgtccaaaaaggccttcgatacgggataatcctatttattacctcagaagtttttttcttcgcaggatttttctgagccttttaccactccagcctagcccctaccccccaattaggagggcactggcccccaacaggcatcaccccgctaaatcccctagaagtcccactcctaaacacatccgtattactcgcatcaggagtatcaatcacctgagctcaccatagtctaatagaaaacaaccgaaaccaaataattcaagcactgctcattacaattttactgggtctctattttaccctcctacaagcctcagagtacttcgagtctcccttcaccatttccgacggcatctacggctcaacattttttgtagccacaggcttccacggacttcacgtcattattggctcaactttcctcactatctgcttcatccgccaactaatatttcactttacatccaaacatcactttggcttcgaagccgccgcctgatactggcattttgtagatgtggtttgactatttctgtatgtctccatctattgatgagggtcttactcttttagtataaatagtaccgttaacttccaattaactagttttgacaacattcaaaaaagagtaataaacttcgccttaattttaataatcaacaccctcctagccttactactaataattattacattttgactaccacaactcaacggctacatagaaaaatccaccccttacgagtgcggcttcgaccctatatcccccgcccgcgtccctttctccataaaattcttcttagtagctattaccttcttattatttgatctagaaattgccctccttttacccctaccatgagccctacaaacaactaacctgccactaatagttatgtcatccctcttattaatcatcatcctagccctaagtctggcctatgagtgactacaaaaaggattagactgagccgaattggtatatagtttaaacaaaacgaatgatttcgactcattaaattatgataatcatatttaccaaatgcccctcatttacataaatattatactagcatttaccatctcacttctaggaatactagtatatcgctcacacctcatgtcctccctactatgcctagaaggaataatactatcgctgttcattatagctactctcataaccctcaacacccactccctcttagccaatattgtgcctattgccatactagtctttgccgcctgcgaagcagcggtgggcctagccctactagtctcaatctccaacacatatggcctagactacgtacataacctaaacctactccaatgctaaaactaatcgtcccaacaattatattactaccactgacatgactttccaaaaaacacataatttgaatcaacacaaccacccacagcctaattattagcatcatccctctactattttttaaccaaatcaacaacaacctatttagctgttccccaaccttttcctccgaccccctaacaacccccctcctaatactaactacctgactcctacccctcacaatcatggcaagccaacgccacttatccagtgaaccactatcacgaaaaaaactctacctctctatactaatctccctacaaatctccttaattataacattcacagccacagaactaatcatattttatatcttcttcgaaaccacacttatccccaccttggctatcatcacccgatgaggcaaccagccagaacgcctgaacgcaggcacatacttcctattctacaccctagtaggctcccttcccctactcatcgcactaatttacactcacaacaccctaggctcactaaacattctactactcaccctcactgcccaagaactatcaaactcctgagccaacaacttaatatgactagcttacacaatagcttttatagtaaagatacctctttacggactccacttatgactccctaaagcccatgtcgaagcccccatcgctgggtcaatagtacttgccgcagtactcttgaaactaggcggctatggcataatacgcctcacactcattctcaaccccctgacaaaacacatagcctaccccttccttgtactatccctatgaggcataattataacaagctccatctgcctacgacaaacagacctaaaatcgctcattgcatactcttcaatcagccacatagccctcgtagtaacagccattctcatccaaaccccctgaagcttcaccggcgcagtcattctcataatcgcccacggacttacatcctcattactattctgcctagcaaactcaaactacgaacgcactcacagtcgcatcataatcctctctcaaggacttcaaactctactcccactaatagctttttgatgacttttagcaagcctcgctaacctcgccttaccccccactattaacctactgggagaactctctgtgctagtaaccacgttctcctgatcaaatatcactctcctacttacaggactcaacatactagtcacagccctatactccctctacatatttaccacaacacaatggggctcactcacccaccacattaacaacataaaaccctcattcacacgagaaaacaccctcatgttcatacacctatcccccattctcctcctatccctcaaccccgacatcattaccgggttttcctcttgtaaatatagtttaaccaaaacatcagattgtgaatctgacaacagaggcttacgaccccttatttaccgagaaagctcacaagaactgctaactcatgcccccatgtctaacaacatggctttctcaacttttaaaggataacagctatccattggtcttaggccccaagaattttggtgcaactccaaataaaagtaataaccatgcacactactataaccaccctaaccctaacttccctaattccccccatccttaccaccctcgttaaccctaacaaaaaaaactcatacccccattatgtaaaatccattgtcgcatccacctttattatcagtctcttccccacaacaatattcatgtgcctagaccaagaagttattatctcgaactgacactgagccacaacccaaacaacccagctctccctaagcttcaaactagactacttctccataatattcatccctgtagcattgttcgttacatggtccatcatagaattctcactgtgatatataaactcagacccaaacattaatcagttcttcaaatatctactcatcttcctaattaccatactaatcttagttaccgctaacaacctattccaactgttcatcggctgagagggcgtaggaattatatccttcttgctcatcagttgatgatacgcccgagcagatgccaacacagcagccattcaagcaatcctatacaaccgtatcggcgatatcggtttcatcctcgccttagcatgatttatcctacactccaactcatgagacccacaacaaatagcccttctaaacgctaatccaagcctcaccccactactaggcctcctcctagcagcagcaggcaaatcagcccaattaggtctccacccctgactcccctcagccatagaaggccccaccccagtctcagccctactccactcaagcactatagttgtagcaggaatcttcttactcatccgcttccaccccctagcagaaaatagcccactaatccaaactctaacactatgcttaggcgctatcaccactctgttcgcagcagtctgcgcccttacacaaaatgacatcaaaaaaatcgtagccttctccacttcaagtcaactaggactcataatagttacaatcggcatcaaccaaccacacctagcattcctgcacatctgtacccacgccttcttcaaagccatactatttatgtgctccgggtccatcatccacaaccttaacaatgaacaagatattcgaaaaataggaggactactcaaaaccatacctctcacttcaacctccctcaccattggcagcctagcattagcaggaatacctttcctcacaggtttctactccaaagaccacatcatcgaaaccgcaaacatatcatacacaaacgcctgagccctatctattactctcatcgctacctccctgacaagcgcctatagcactcgaataattcttctcaccctaacaggtcaacctcgcttccccacccttactaacattaacgaaaataaccccaccctactaaaccccattaaacgcctggcagccggaagcctattcgcaggatttctcatcactaacaacatttcccccgcatcccccttccaaacaacaatccccctctacctaaaactcacagccctcgctgtcactttcctaggacttctaacagccctagacctcaactacctaaccaacaaacttaaaataaaatccccactatgcacattttatttctccaacatactcggattctaccctagcatcacacaccgcacaatcccctatctaggccttcttacgagccaaaacctgcccctactcctcctagacctaacctgactagaaaagctattacctaaaacaatttcacagcaccaaatctccacctccatcatcacctcaacccaaaaaggcataattaaactttacttcctctctttcttcttcccactcatcctaaccctactcctaatcacataacctattcccccgagcaatttcaattacaatatatacaccaacaaacaatgttcaaccagtaactactactaatcaacgcccataatcatacaaagcccccgcaccaataggatcctcccgaatcaaccctgacccctctccttcataaattattcagcttcctacactattaaagtttaccacaaccaccaccccatcatactctttcacccacagcaccaatcctacctccatcgctaaccccactaaaacactcaccaagacctcaacccctgacccccatgcctcaggatactcctcaatagccatcgctgtagtatatccaaagacaaccatcattccccctaaataaattaaaaaaactattaaacccatataacctcccccaaaattcagaataataacacacccgaccacaccgctaacaatcaatactaaacccccataaataggagaaggcttagaagaaaaccccacaaaccccattactaaacccacactcaacagaaacaaagcatacatcattattctcgcacggactacaaccacgaccaatgatatgaaaaaccatcgttgtatttcaactacaagaacaccaatgaccccaatacgcaaaactaaccccctaataaaattaattaaccactcactcatcgacctccccaccccatccaacatctccgcatgatgaaacttcggctcactccttggcgcctgcctgatcctccaaatcaccacaggactattcctagccatgcactactcaccagacgcctcaaccgccttttcatcaatcgcccacatcactcgagacgtaaattatggctgaatcatccgctaccttcacgccaatggcgcctcaatattctttatctgcctcttcctacacatcgggcgaggcctatattacggatcatttctctactcagaaacctgaaacatcggcattatcctcctgcttgcaactatagcaacagccttcataggctatgtcctcccgtgaggccaaatatcattctgaggggccacagtaattacaaacttactatccgccatcccatacattgggacagacctagttcaatgaatctgaggaggctactcagtagacagtcccaccctcacacgattctttacctttcacttcatcttgcccttcattattgcagccctagcagcactccacctcctattcttgcacgaaacgggatcaaacaaccccctaggaatcacctcccattccgataaaatcaccttccacccttactacacaatcaaagacgccctcggcttacttctcttccttctctccttaatgacattaacactattctcaccagacctcctaggcgacccagacaattataccctagccaaccccttaaacacccctccccacatcaagcccgaatgatatttcctattcgcctacacaattctccgatccgtccctaacaaactaggaggcgtccttgccctattactatccatcctcatcctagcaataatccccatcctccatatatccaaacaacaaagcataatatttcgcccactaagccaatcactttattgactcctagccgcagacctcctcattctaacctgaatcggaggacaaccagtaagctacccttttaccatcattggacaagtagcatccgtactatacttcacaacaatcctaatcctaataccaactatctccctaattgaaaacaaaatactcaaatggacctgtccttgtagtataaactaatacaccagtcttgtaaaccggagatgaaaacctttttccaaggacaaatcagagaaaaagtctttaactccaccattagcacccaaagctaagattctaatttaaactattctctgttctttcatggggaagcagatttgggtaccacccaagtattgactcacccatcaacaaccgctatgtatttcgtacattactgccagccaccatgaatattgtacggtaccataaatacttgaccacctgtagtacataaaaacccaatccacatcaaaaccccctccccatgcttacaagcaagtacagcaatcaacccccaactatcacacatcaactgcaactccaaagccacccctcacccactaggataccaacaaacctacccacccttaacagtacatagcacataaagccatttaccgtacatagcacattacagtcaaatcccttctcgtccccatggatgacccccctcagataggggtcccttgaccaccatcctccgtgaaatcaatatcccgcacaagagtgctactctcctcgctccgggcccataacacttgggggtagctaaagtgaactgtatccgacatctggttcctacttcagggccataaagcctaaatagcccacacgttccccttaaataagacatcacgatg

SEQ ID NO: 82 - DNA, 16571 bp, Homo sapiens mitochondrial
  3109: "n" refers to a nucleotide at position 3107 of the Cambridge Reference Sequence (CRS, Anderson et al. 1981 Nature 290:457-465), later determined to be absent from the human mtDNA sequence according to the revised CRS (rCRS, Andrews et al. 1999 Nature Genetics 23:147); "n" therefore represents a single nucleotide deletion at a position corresponding to nucleotide 3107 of SEQ ID NO:1 as provided herein.
gatcacaggtctatcaccctattaaccactcacgggagctctccatgcatttggtattttcgcttagggggtatgcacgcgatagcattgcgagacgctggagccggagcaccctatgtcgcagtatctgtctttgattcctgcctcattctattatttatcgcacctacgttcaatattacaggcgaacatacttactaaagtgtgttaattaattaatgcttgtaggacataataataacaattgaatgtctgcacagccgctttccacacagacatcataacaaaaaatttccaccaaaccccccctcccccccgcttctggccacagcacttaaacacatctctgccaaaccccaaaaacaaagaaccctaacaccagcctaaccagatttcaaattttatcttttggcggtatgcacttttaacagtcaccccccaactaacacattattttcccctcccactcccatactactaatctcatcaatacaacccccgcccatcctacccagcacacacacaccgctgctaaccccataccccgaaccaaccaaaccccaaagacaccccccacagtttatgtagcttacctcctcaaagcaatacactgaaaatgtttagacgggctcacatcaccccataaacaaataggtttggtcctagcctttctattagctcttagtaagattacacatgcaagcatccccgttccagtgagttcaccctctaaatcaccacgatcaaaagggacaagcatcaagcacgcagcaatgcagctcaaaacgcttagcctagccacacccccacgggaaacagcagtgattaacctttagcaataaacgaaagtttaactaagctatactaaccccagggttggtcaatttcgtgccagccaccgcggtcacacgattaacccaagtcaatagaagccggcgtaaagagtgttttagatcaccccctccccaataaagctaaaactcacctgagttgtaaaaaactccagttgacacaaaatagactacgaaagtggctttaacatatctgaacacacaatagctaagacccaaactgggattagataccccactatgcttagccctaaacctcaacagttaaatcaacaaaactgctcgccagaacactacgagccacagcttaaaactcaaaggacctggcggtgcttcatatccctctagaggagcctgttctgtaatcgataaaccccgatcaacctcaccacctcttgctcagcctatataccgccatcttcagcaaaccctgatgaaggctacaaagtaagcgcaagtacccacgtaaagacgttaggtcaaggtgtagcccatgaggtggcaagaaatgggctacattttctaccccagaaaactacgatagcccttatgaaacttaagggtcgaaggtggatttagcagtaaactgagagtagagtgcttagttgaacagggccctgaagcgcgtacacaccgcccgtcaccctcctcaagtatacttcaaaggacatttaactaaaacccctacgcatttatatagaggagacaagtcgtaacatggtaagtgtactggaaagtgcacttggacgaaccagagtgtagcttaacacaaagcacccaacttacacttaggagatttcaacttaacttgaccgctctgagctaaacctagccccaaacccactccaccttactaccagacaaccttagccaaaccatttacccaaataaagtataggcgatagaaattgaaacctggcgcaatagatatagtaccgcaagggaaagatgaaaaattataaccaagcataatatagcaaggactaacccctataccttctgcataatgaattaactagaaataactttgcaaggagagccaaagctaagacccccgaaaccagacgagctacctaagaacagctaaaagagcacacccgtctatgtagcaaaatagtgggaagatttataggtagaggcgacaaacctaccgagcctggtgatagctggttgtccaagatagaatcttagttcaactttaaatttgcccacagaaccctctaaatccccttgtaaatttaactgttagtccaaagaggaacagctctttggacactaggaaaaaaccttgtagagagagtaaaaaatttaacacccatagtaggcctaaaagcagccaccaattaagaaagcgttcaagctcaacacccactacctaaaaaatcccaaacatataactgaactcctcacacccaattggaccaatctatcaccctatagaagaactaatgttagtataagtaacatgaaaacattctcctccgcataagcctgcgtcagattaaaacactgaactgacaattaacagcccaatatctacaatcaaccaacaagtcattattaccctcactgtcaacccaacacaggcatgctcataaggaaaggttaaaaaaagtaaaaggaactcggcaaatcttaccccgcctgtttaccaaaaacatcacctctagcatcaccagtattagaggcaccgcctgcccagtgacacatgtttaacggccgcggtaccctaaccgtgcaaaggtagcataatcacttgttccttaaatagggacctgtatgaatggctccacgagggttcagctgtctcttacttttaaccagtgaaattgacctgcccgtgaagaggcgggcataacacagcaagacgagaagaccctatggagctttaatttattaatgcaaacagtacctaacaaacccacaggtcctaaactaccaaacctgcattaaaaatttcggttggggcgacctcggagcagaacccaacctccgagcagtacatgctaagacttcaccagtcaaagcgaactactatactcaattgatccaataacttgaccaacggaacaagttaccctagggataacagcgcaatcctattctagagtccatatcaacaatagggtttacgacctcgatgttggatcaggacatcccgatggtgcagccgctattaaaggttcgtttgttcaacgattaaagtcctacgtgatctgagttcagaccggagtaatccaggtcggtttctatctacnttcaaattcctccctgtacgaaaggacaagagaaataaggcctacttcacaaagcgccttcccccgtaaatgatatcatctcaacttagtattatacccacacccacccaagaacagggtttgttaagatggcagagcccggtaatcgcataaaacttaaaactttacagtcagaggttcaattcctcttcttaacaacatacccatggccaacctcctactcctcattgtacccattctaatcgcaatggcattcctaatgcttaccgaacgaaaaattctaggctatatacaactacgcaaaggccccaacgttgtaggcccctacgggctactacaacccttcgctgacgccataaaactcttcaccaaagagcccctaaaacccgccacatctaccatcaccctctacatcaccgccccgaccttagctctcaccatcgctcttctactatgaacccccctccccatacccaaccccctggtcaacctcaacctaggcctcctatttattctagccacctctagcctagccgtttactcaatcctctgatcagggtgagcatcaaactcaaactacgccctgatcggcgcactgcgagcagtagcccaaacaatctcatatgaagtcaccctagccatcattctactatcaacattactaataagtggctcctttaacctctccacccttatcacaacacaagaacacctctgattactcctgccatcatgacccttggccataatatgatttatctccacactagcagagaccaaccgaacccccttcgaccttgccgaaggggagtccgaactagtctcaggcttcaacatcgaatacgccgcaggccccttcgccctattcttcatagccgaatacacaaacattattataataaacaccctcaccactacaatcttcctaggaacaacatatgacgcactctcccctgaactctacacaacatattttgtcaccaagaccctacttctaacctccctgttcttatgaattcgaacagcatacccccgattccgctacgaccaactcatacacctcctatgaaaaaacttcctaccactcaccctagcattacttatatgatatgtctccatacccattacaatctccagcattccccctcaaacctaagaaatatgtctgataaaagagttactttgatagagtaaataataggagcttaaacccccttatttctaggactatgagaatcgaacccatccctgagaatccaaaattctccgtgccacctatcacaccccatcctaaagtaaggtcagctaaataagctatcgggcccataccccgaaaatgttggttatacccttcccgtactaattaatcccctggcccaacccgtcatctactctaccatctttgcaggcacactcatcacagtgctaagctcgcactgattttttacctgagtaggcctagaaataaacatgctagcttttattccagttctaaccaaaaaaataaaccctcgttccacagaagctgccatcaagtatttcctcacgcaagcaaccgcatccataatccttctaatagctatcctcttcaacaatatactctccggacaatgaaccataaccaatactaccaatcaatactcatcattaataatcataatggctatagcaataaaactaggaatagccccctttcacttctgagtcccagaggttacccaaggcacccctctgacatccggcctgcttcttctcacatgacaaaaactagcccccatctcaatcatataccaaatctctccctcactaaacgtaagccttctcctcactctctcaatcttatccatcatagcaggcagttgaggtggattaaaccaaacccagctacgcaaaatcttagcatactcctcaattacccacataggatgaataatagcagttctaccgtacaaccctaacataaccattcttaatttaactatttatattatcctaactactaccgcattcctactactcaacttaaactccagcaccacgaccctactactatctcgcacctgaaacaagctaacatgactaacacccttaattccatccaccctcctctccctaggaggcctgcccccgctaaccggctttttgcccaaatgggccattatcgaagaattcacaaaaaacaatagcctcatcatccccaccatcatagccaccatcaccctccttaacctctacttctacctacgcctaatctactccacctcaatcacactactccccatatctaacaacgtaaaaataaaatgacagtttgaacatacaaaacccaccccattcctccccacactcatcgcccttaccacgctactcctacctatctccccttttatactaataatcttatagaaatttaggttaaatacagaccaagagccttcaaagccctcagtaagttgcaatacttaatttctgtaacagctaaggactgcaaaaccccactctgcatcaactgaacgcaaatcagccactttaattaagctaagcccttactagaccaatgggacttaaacccacaaacacttagttaacagctaagcaccctaatcaactggcttcaatctacttctcccgccgccgggaaaaaaggcgggagaagccccggcaggtttgaagctgcttcttcgaatttgcaattcaatatgaaaatcacctcggagctggtaaaaagaggcctaacccctgtctttagatttacagtccaatgcttcactcagccattttacctcacccccactgatgttcgccgaccgttgactattctctacaaaccacaaagacattggaacactatacctattattcggcgcatgagctggagtcctaggcacagctctaagcctccttattcgagccgagctgggccagccaggcaaccttctaggtaacgaccacatctacaacgttatcgtcacagcccatgcatttgtaataatcttcttcatagtaatacccatcataatcggaggctttggcaactgactagttcccctaataatcggtgcccccgatatggcgtttccccgcataaacaacataagcttctgactcttacctccctctctcctactcctgctcgcatctgctatagtggaggccggagcaggaacaggttgaacagtctaccctcccttagcagggaactactcccaccctggagcctccgtagacctaaccatcttctccttacacctagcaggtgtctcctctatcttaggggccatcaatttcatcacaacaattatcaatataaaaccccctgccataacccaataccaaacgcccctcttcgtctgatccgtcctaatcacagcagtcctacttctcctatctctcccagtcctagctgctggcatcactatactactaacagaccgcaacctcaacaccaccttcttcgaccccgccggaggaggagaccccattctataccaacacctattctgatttttcggtcaccctgaagtttatattcttatcctaccaggcttcggaataatctcccatattgtaacttactactccggaaaaaaagaaccatttggatacataggtatggtctgagctatgatatcaattggcttcctagggtttatcgtgtgagcacaccatatatttacagtaggaatagacgtagacacacgagcatatttcacctccgctaccataatcatcgctatccccaccggcgtcaaagtatttagctgactcgccacactccacggaagcaatatgaaatgatctgctgcagtgctctgagccctaggattcatctttcttttcaccgtaggtggcctgactggcattgtattagcaaactcatcactagacatcgtactacacgacacgtactacgttgtagcccacttccactatgtcctatcaataggagctgtatttgccatcataggaggcttcattcactgatttcccctattctcaggctacaccctagaccaaacctacgccaaaatccatttcactatcatattcatcggcgtaaatctaactttcttcccacaacactttctcggcctatccggaatgccccgacgttactcggactaccccgatgcatacaccacatgaaacatcctatcatctgtaggctcattcatttctctaacagcagtaatattaataattttcatgatttgagaagccttcgcttcgaagcgaaaagtcctaatagtagaagaaccctccataaacctggagtgactatatggatgccccccaccctaccacacattcgaagaacccgtatacataaaatctagacaaaaaaggaaggaatcgaaccccccaaagctggtttcaagccaaccccatggcctccatgactttttcaaaaaggtattagaaaaaccatttcataactttgtcaaagttaaattataggctaaatcctatatatcttaatggcacatgcagcgcaagtaggtctacaagacgctacttcccctatcatagaagagcttatcacctttcatgatcacgccctcataatcattttccttatctgcttcctagtcctgtatgcccttttcctaacactcacaacaaaactaactaatactaacatctcagacgctcaggaaatagaaaccgtctgaactatcctgcccgccatcatcctagtcctcatcgccctcccatccctacgcatcctttacataacagacgaggtcaacgatccctcccttaccatcaaatcaattggccaccaatggtactgaacctacgagtacaccgactacggcggactaatcttcaactcctacatacttcccccattattcctagaaccaggcgacctgcgactccttgacgttgacaatcgagtagtactcccgattgaagcccccattcgtataataattacatcacaagacgtcttgcactcatgagctgtccccacattaggcttaaaaacagatgcaattcccggacgtctaaaccaaaccactttcaccgctacacgaccgggggtatactacggtcaatgctctgaaatctgtggagcaaaccacagtttcatgcccatcgtcctagaattaattcccctaaaaatctttgaaatagggcccgtatttaccctatagcaccccctctaccccctctagagcccactgtaaagctaacttagcattaaccttttaagttaaagattaagagaaccaacacctctttacagtgaaatgccccaactaaatactaccgtatggcccaccataattacccccatactccttacactattcctcatcacccaactaaaaatattaaacacaaactaccacctacctccctcaccaaagcccataaaaataaaaaattataacaaaccctgagaaccaaaatgaacgaaaatctgttcgcttcattcattgcccccacaatcctaggcctacccgccgcagtactgatcattctatttccccctctattgatccccacctccaaatatctcatcaacaaccgactaatcaccacccaacaatgactaatcaaactaacctcaaaacaaatgataaccatacacaacactaaaggacgaacctgatctcttatactagtatccttaatcatttttattgccacaactaacctcctcggactcctgcctcactcatttacaccaaccacccaactatctataaacctagccatggccatccccttatgagcgggcgcagtgattataggctttcgctctaagattaaaaatgccctagcccacttcttaccacaaggcacacctacaccccttatccccatactagttattatcgaaaccatcagcctactcattcaaccaatagccctggccgtacgcctaaccgctaacattactgcaggccacctactcatgcacctaattggaagcgccaccctagcaatatcaaccattaaccttccctctacacttatcatcttcacaattctaattctactgactatcctagaaatcgctgtcgccttaatccaagcctacgttttcacacttctagtaagcctctacctgcacgacaacacataatgacccaccaatcacatgcctatcatatagtaaaacccagcccatgacccctaacaggggccctctcagccctcctaatgacctccggcctagccatgtgatttcacttccactccataacgctcctcatactaggcctactaaccaacacactaaccatataccaatgatggcgcgatgtaacacgagaaagcacataccaaggccaccacacaccacctgtccaaaaaggccttcgatacgggataatcctatttattacctcagaagtttttttcttcgcaggatttttctgagccttttaccactccagcctagcccctaccccccaattaggagggcactggcccccaacaggcatcaccccgctaaatcccctagaagtcccactcctaaacacatccgtattactcgcatcaggagtatcaatcacctgagctcaccatagtctaatagaaaacaaccgaaaccaaataattcaagcactgcttattacaattttactgggtctctattttaccctcctacaagcctcagagtacttcgagtctcccttcaccatttccgacggcatctacggctcaacattttttgtagccacaggcttccacggacttcacgtcattattggctcaactttcctcactatctgcttcatccgccaactaatatttcactttacatccaaacatcactttggcttcgaagccgccgcctgatactggcattttgtagatgtggtttgactatttctgtatgtctccatctattgatgagggtcttactcttttagtataaatagtaccgttaacttccaattaactagttttgacaacattcaaaaaagagtaataaacttcgccttaattttaataatcaacaccctcctagccttactactaataattattacattttgactaccacaactcaacggctacatagaaaaatccaccccttacgagtgcggcttcgaccctatatcccccgcccgcgtccctttctccataaaattcttcttagtagctattaccttcttattatttgatctagaaattgccctccttttacccctaccatgagccctacaaacaactaacctgccactaatagttatgtcatccctcttattaatcatcatcctagccctaagtctggcctatgagtgactacaaaaaggattagactgaaccgaattggtatatagtttaaacaaaacgaatgatttcgactcattaaattatgataatcatatttaccaaatgcccctcatttacataaatattatactagcatttaccatctcacttctaggaatactagtatatcgctcacacctcatatcctccctactatgcctagaaggaataatactatcgctgttcattatagctactctcataaccctcaacacccactccctcttagccaatattgtgcctattgccatactagtctttgccgcctgcgaagcagcggtgggcctagccctactagtctcaatctccaacacatatggcctagactacgtacataacctaaacctactccaatgctaaaactaatcgtcccaacaattatattactaccactgacatgactttccaaaaaacacataatttgaatcaacacaaccacccacagcctaattattagcatcatccctctactattttttaaccaaatcaacaacaacctatttagctgttccccaaccttttcctccgaccccctaacaacccccctcctaatactaactacctgactcctacccctcacaatcatggcaagccaacgccacttatccagtgaaccactatcacgaaaaaaactctacctctctatactaatctccctacaaatctccttaattataacattcacagccacagaactaatcatattttatatcttcttcgaaaccacacttatccccaccttggctatcatcacccgatgaggcaaccagccagaacgcctgaacgcaggcacatacttcctattctacaccctagtaggctcccttcccctactcatcgcactaatttacactcacaacaccctaggctcactaaacattctactactcactctcactgcccaagaactatcaaactcctgagccaacaacttaatatgactagcctacacaatagcttttatagtaaagatacctctttacggactccacttatgactccctaaagcccatgtcgaagcccccatcgctgggtcaatagtacttgccgcagtactcttaaaactaggcggctatggtataatacgcctcacactcattctcaaccccctgacaaaacacatagcctaccccttccttgtactatccctatgaggcataattataacaagctccatctgcctacgacaaacagacctaaaatcgctcattgcatactcttcaatcagccacatagccctcgtagtaacagccattctcatccaaaccccctgaagcttcaccggcgcagtcattctcataatcgcccacggacttacatcctcattactattctgcctagcaaactcaaactacgaacgcactcacagtcgcatcataatcctctctcaaggacttcaaactctactcccactaatagctttttgatgacttctagcaagcctcgctaacctcgccttaccccccactattaacctactgggagaactctctgtgctagtaaccacgttctcctgatcaaatatcactctcctacttacaggactcaacatactagtcacagccctatactccctctacatatttaccacaacacaatggggctcactcacccaccacattaacaacataaaaccctcattcacacgagaaaacaccctcatgttcatacacctatcccccattctcctcctatccctcaaccccgacatcattaccgggttttcctcttgtaaatatagtttaaccaaaacatcagattgtgaatctgacaacagaggcttacgaccccttatttaccgagaaagctcacaagaactgctaactcatgcccccatgtctaacaacatggctttctcaacttttaaaggataacagctatccattggtcttaggccccaaaaattttggtgcaactccaaataaaagtaataaccatgcacactactataaccaccctaaccctgacttccctaattccccccatccttaccaccctcgttaaccctaacaaaaaaaactcatacccccattatgtaaaatccattgtcgcatccacctttattatcagtctcttccccacaacaatattcatgtgcctagaccaagaagttattatctcgaactgacactgagccacaacccaaacaacccagctctccctaagcttcaaactagactacttctccataatattcatccctgtagcattgttcgttacatggtccatcatagaattctcactgtgatatataaactcagacccaaacattaatcagttcttcaaatatctactcatcttcctaattaccatactaatcttagttaccgctaacaacctattccaactgttcatcggctgagagggcgtaggaattatatccttcttgctcatcagttgatgatacgcccgagcagatgccaacacagcagccattcaagcaatcctatacaaccgtatcggcgatatcggtttcatcctcgccttagcatgatttatcctacactccaactcatgagacccacaacaaatagcccttctaaacgctaatccaagcctcaccccactactaggcctcctcctagcagcagcaggcaaatcagcccaattaggtctccacccctgactcccctcagccatagaaggccccaccccagtctcagccctactccactcaagcactatagttgtagcaggaatcttcttactcatccgcttccaccccctagcagaaaatagcccactaatccaaactctaacactatgcttaggcgctatcaccactctgttcgcagcagtctgcgcccttacacaaaatgacatcaaaaaaatcgtagccttctccacttcaagtcaactaggactcataatagttacaatcggcatcaaccaaccacacctagcattcctgcacatctgtacccacgccttcttcaaagccatactatttatgtgctccgggtccatcatccacaaccttaacaatgaacaagatattcgaaaaataggaggactactcaaaaccatacctctcacttcaacctccctcaccattggcagcctagcattagcaggaatacctttcctcacaggtttctactccaaagaccacatcatcgaaaccgcaaacatatcatacacaaacgcctgagccctatctattactctcatcgctacctccctgacaagcgcctatagcactcgaataattcttctcaccctaacaggtcaacctcgcttccccacccttactaacattaacgaaaataaccccaccctactaaaccccattaaacgcctggcagccggaagcctattcgcaggatttctcattactaacaacatttcccccgcatcccccttccaaacaacaatccccctctacctaaaactcacagccctcgctgtcactttcctaggacttctaacagccctagacctcaactacctaaccaacaaacttaaaataaaatccccactatgcacattttatttctccaacatactcggattctaccctagcatcacacaccgcacaatcccctatctaggccttcttacgagccaaaacctgcccctactcctcctagacctaacctgactagaaaagctattacctaaaacaatttcacagcaccaaatctccacctccatcatcacctcaacccaaaaaggcataattaaactttacttcctctctttcttcttcccactcatcctaaccctactcctaatcacataacctattcccccgagcaatctcaattacaatatatacaccaacaaacaatgttcaaccagtaactactactaatcaacgcccataatcatacaaagcccccgcaccaataggatcctcccgaatcaaccctgacccctctccttcataaattattcagcttcctacactattaaagtttaccacaaccaccaccccatcatactctttcacccacagcaccaatcctacctccatcgctaaccccactaaaacactcaccaagacctcaacccctgacccccatgcctcaggatactcctcaatagccatcgctgtagtatatccaaagacaaccatcattccccctaaataaattaaaaaaactattaaacccatataacctcccccaaaattcagaataataacacacccgaccacaccgctaacaatcaatactaaacccccataaataggagaaggcttagaagaaaaccccacaaaccccattactaaacccacactcaacagaaacaaagcatacatcattattctcgcacggactacaaccacgaccaatgatatgaaaaaccatcgttgtatttcaactacaagaacaccaatgaccccaatacgcaaaactaaccccctaataaaattaattaaccactcattcatcgacctccccaccccatccaacatctccgcatgatgaaacttcggctcactccttggcgcctgcctgatcctccaaatcaccacaggactattcctagccatgcactactcaccagacgcctcaaccgccttttcatcaatcgcccacatcactcgagacgtaaattatggctgaatcatccgctaccttcacgccaatggcgcctcaatattctttatctgcctcttcctacacatcgggcgaggcctatattacggatcatttctctactcagaaacctgaaacatcggcattatcctcctgcttgcaactatagcaacagccttcataggctatgtcctcccgtgaggccaaatatcattctgaggggccacagtaattacaaacttactatccgccatcccatacattgggacagacctagttcaatgaatctgaggaggctactcagtagacagtcccaccctcacacgattctttacctttcacttcatcttgcccttcattattgcagccctagcagcactccacctcctattcttgcacgaaacgggatcaaacaaccccctaggaatcacctcccattccgataaaatcaccttccacccttactacacaatcaaagacgccctcggcttacttctcttccttctctccttaatgacattaacactattctcaccagacctcctaggcgacccagacaattataccctagccaaccccttaaacacccctccccacatcaagcccgaatgatatttcctattcgcctacacaattctccgatccgtccctaacaaactaggaggcgtccttgccctattactatccatcctcatcctagcaataatccccatcctccatatatccaaacaacaaagcataatatttcgcccactaagccaatcactttattgactcctagccgcagacctcctcattctaacctgaatcggaggacaaccagtaagctacccttttaccatcattggacaagtagcatccgtactatacttcacaacaatcctaatcctaataccaactatctccctaattgaaaacaaaatactcaaatgggcctgtccttgtagtataaactaatacaccagtcttgtaaaccggagatgaaaacctttttccaaggacaaatcagagaaaaagtctttaactccaccattagcacccaaagctaagattctaatttaaactattctctgttctttcatggggaagcagatttgggtaccacccaagtattgactcacccatcaacaaccgctatgtatttcgtacattactgccagccaccatgaatattgtacagtaccataaatacttgaccacctgtagtacataaaaacccaatccacatcaaaaccccctccccatgcttacaagcaagtacagcaatcaaccctcaactatcacacatcaactgcaactccaaagccacccctcacccactaggataccaacaaacctacccacccttaacagtacatagtacatgaagccatttaccgtacatagcacattacagtcaaatcccttctcgtccccatggatgacccccctcagataggggtcccttgaccaccatcctccgtgaaatcaatatcccgcacaagagtgctactctcctcgctccgggcccataacacttgggggtagctaaagtgaactgtatccgacatctggttcctacttcagggccataaagcctaaatagcccacacgttccccttaaataagacatcacgatg

SEQ ID NO: 83 - DNA, 16570 bp, Homo sapiens mitochondrial
  3108: "n" refers to a nucleotide at position 3107 of the Cambridge Reference Sequence (CRS, Anderson et al. 1981 Nature 290:457-465), later determined to be absent from the human mtDNA sequence according to the revised CRS (rCRS, Andrews et al. 1999 Nature Genetics 23:147); "n" therefore represents a single nucleotide deletion at a position corresponding to nucleotide 3107 of SEQ ID NO:1 as provided herein.
gatcacaggtctatcaccctattaaccactcacgggagctctccatgcatttggtattttcgtctggggggtgtgcacgcgatagcattgcgagacgctggagccggagcaccctatgtcgcagtatctgtctttgattcctgcctcatcctattatttatcgcacctacgttcaatattacaggcgaacatacttactaaagtgtgttaattaattaatgcttgtaggacataataataacaattgaatgtctgcacagccgctttccacacagacatcataacaaaaaatttccaccaaaccccccctcccccgccttctggccacagcacttaaacacatctctgccaaaccccaaaaacaaagaaccctaacaccagcctaaccagatttcaaattttatcttttggcggtatgcacttttaacagtcaccccccaactaacacattattttcccctcccactcccatactactaatctcatcaatacaacccccgcccatcctacccagcacacacacaccgctgctaaccccataccccgaaccaaccaaaccccaaagacaccccccacagtttatgtagcttacctcctcaaagcaatacactgaaaatgtttagacgggctcacatcaccccataaacaaataggtttggtcctagcctttctattagctcttagtaagattacacatgcaagcatccccattccagtgagttcaccctctaaatcaccacgatcaaaagggacaagcatcaagcacgcagcaatgcagctcaaaacgcttagcctagccacacccccacgggaaacagcagtgattaacctttagcaataaacgaaagtttaactaagctatactaaccccagggttggtcaatttcgtgccagccaccgcggtcacacgattaacccaagtcaatagaaaccggcgtaaagagtgttttagatcaccccctccccaataaagctaaaactcacctgagttgtaaaaaactccagttgacacaaaatagactacgaaagtggctttaacatatctgaacacacaatagctaagacccaaactgggattagataccccactatgcttagccctaaacctcaacagttaaatcaacaaaactgctcgccagaacactacgagccacagcttaaaactcaaaggacctggcggtgcttcatatccctctagaggagcctgttctgtaatcgataaaccccgatcaacctcaccacctcttgctcagcctatataccgccatcttcagcaaaccctgatgaaggctacaaagtaagcgcaagtacccacgtaaagacgttaggtcaaggtgtagcccatgaggtggcaagaaatgggctacattttctaccccagaaaactacgatagcccttatgaaacttaagggtcgaaggtggatttagcagtaaactgagagtagagtgcttagttgaacagggccctgaagcgcgtacacaccgcccgtcaccctcctcaagtatacttcaaaggacatttaactaaaacccctacgcatttatatagaggagacaagtcgtaacatggtaagtgtactggaaagtgcacttggacgaaccagagtgtagcttaacacaaagcacccaacttacacttaggagatttcaacttaacttgaccgctctgagctaaacctagccccaaacccactccaccttactaccagacaaccttagccaaaccatttacccaaataaagtataggcgatagaaattgaaacctggcgcaatagatatagtaccgcaagggaaagatgaaaaattataaccaagcataatatagcaaggactaacccctataccttctgcataatgaattaactagaaataactttgcaaggagaaccaaagctaagacccccgaaaccagacgagctacctaagaacagctaaaagagcacacccgtctatgtagcaaaatagtgggaagatttataggtagaggcgacaaacctaccgagcctggtgatagctggttgtccaagatagaatcttagttcaactttaaatttgcccacagaaccctctaaatccccttgtaaatttaactgttagtccaaagaggaacagctctttggacactaggaaaaaaccttgtagagagagtaaaaaatttaacacccatagtaggcctaaaagcagccaccaattaagaaagcgttcaagctcaacacccactacctaaaaaatcccaaacatataactgaactcctcacacccaattggaccaatctatcaccctatagaagaactaatgttagtataagtaacatgaaaacattctcctccgcataagcctgcgtcagattaaaacactgaactgacaattaacagcccaatatctacaatcaaccaacaagtcattattaccctcactgtcaacccaacacaggcatgctcataaggaaaggttaaaaaaagtaaaaggaactcggcaaatcttaccccgcctgtttaccaaaaacatcacctctagcatcaccagtattagaggcaccgcctgcccagtgacacatgtttaacggccgcggtaccctaaccgtgcaaaggtagcataatcacttgttccttaaatagggacctgtatgaatggctccacgagggttcagctgtctcttacttttaaccagtgaaattgacctgcccgtgaagaggcgggcatgacacagcaagacgagaagaccctatggagctttaatttattaatgcaaacagtacctaacaaacccacaggtcctaaactaccaaacctgcattaaaaatttcggttggggcgacctcggagcagaacccaacctccgagcagtacatgctaagacttcaccagtcaaagcgaactactatactcaattgatccaataacttgaccaacggaacaagttaccctagggataacagcgcaatcctattctagagtccatatcaacaatagggtttacgacctcgatgttggatcaggacatcccgatggtgcagccgctattaaaggttcgtttgttcaacgattaaagtcctacgtgatctgagttcagaccggagtaatccaggtcggtttctatctacnttcaaattcctccctgtacgaaaggacaagagaaataaggcctacttcacaaagcgccttcccccgtaaatgatatcatctcaacttagtattatacccacacccacccaagaacagggtttgttaagatggcagagcccggtaatcgcataaaacttaaaactttacagtcagaggttcaattcctcttcttaacaacatacccatggccaacctcctactcctcattgtacccattctaatcgcaatggcattcctaatgcttaccgaacgaaaaattctaggctatatacaactacgcaaaggccccaacgttgtaggcccctacgggctactacaacccttcgctgacgccataaaactcttcaccaaagagcccctaaaacccgccacatctaccatcaccctctacatcaccgccccgaccttagctctcaccatcgctcttctactatgaacccccctccccatacccaaccccctggtcaacctcaacctaggcctcctatttattctagccacctctagcctagccgtttactcaatcctctgatcagggtgagcatcaaactcaaactacgccctgatcggcgcactgcgagcagtagcccaaacaatctcatatgaagtcaccctagccatcattctactatcaacattactaataagtggctcctttaacctctccacccttatcacaacacaagaacacctctgactactcctgccatcatgacccttggccataatatgatttatctccacactagcagagaccaaccgaacccccttcgaccttgccgaaggggagtccgaactagtctcaggcttcaacatcgaatacgccgcaggccccttcgccctattcttcatagccgaatacacaaacattattataataaacaccctcaccactacaatcttcctaggaacaacatatgacgcactctcccctgaactctacacaacatattttgtcaccaagaccctacttctaacctccctgttcttatgaattcgaacagcatacccccgattccgctacgaccaactcatacacctcctatgaaaaaacttcctaccactcaccctagcattacttatatgacatgtctccatacccattacaatctccagcattccccctcaaacctaagaaatatgtctgataaaagagttactttgatagagtaaataataggagcttaaacccccttatttctaggactatgagaatcgaacccatccctgagaatccaaaattctccgtgccacctatcacaccccatcctaaagtaaggtcagctaaataagctatcgggcccataccccgaaaatgttggttatacccttcccgtactaattaatcccctggcccaacccgtcatctactctaccatctttgcaggcacactcatcacagcgctaagctcgcactgattttttacctgagtaggcctagaaataaacatgctagcttttattccagttctaaccaaaaaaataaaccctcgttccacagaagctgccatcaagtatttcctcacgcaagcaaccgcatccataatccttctaatagctatcctcttcaacaatatactctccggacaatgaaccataaccaatactaccaatcaatactcatcattaataatcataatggctatagcaataaaactaggaatagccccctttcacttctgagtcccagaggttacccaaggcacccctctgacatccggcctgcttcttctcacatgacaaaaactagcccccatctcaatcatataccaaatctctccctcactagacgtaagccttctcctcactctctcaatcttatccatcatagcaggcagttgaggtggattaaaccaaacccagctacgcaaaatcttagcatactcctcaattacccacataggatgaataatagcagttctaccgtacaaccctaacataaccattcttaatttaactatttatattatcctaactactaccgcattcctactactcaacttaaactccagcaccacaaccctactactatctcgcacctgaaacaagctaacatgactaacacccttaattccatccaccctcctctccctaggaggcctgcccccgctaaccggctttttgcccaaatgggccattatcgaagaattcacaaaaaacaatagcctcatcatccccaccatcatagccaccatcaccctccttaacctctacttctacctacgcctaatctactccacctcaatcacactactccccatatctaacaacgtaaaaataaaatgacagtttgaacatacaaaacccaccccattcctccccacactcatcgcccttaccacgctactcctacctatctccccttttatactaataatcttatagaaatttaggttaaatacagaccaagagccttcaaagccctcagtaagttgcaatacttaatttctgtaacagctaaggactgcaaaaccccactctgcatcaactgaacgcaaatcagccactttaattaagctaagcccttactagaccaatgggacttaaacccacaaacacttagttaacagctaagcaccctaatcaactggcttcaatctacttctcccgccgccgggaaaaaaggcgggagaagccccggcaggtttgaagctgcttcttcgaatttgcaattcaatatgaaaatcacctcggagctggtaaaaagaggcctaacccctgtctttagatttacagtccaatgcttcactcagccattttacctcacccccactgatgttcgccgaccgttgactattctctacaaaccacaaagacattggaacactatacctattattcggcgcatgagctggagtcctaggcacagctctaagcctccttattcgagccgagctgggccagccaggcaaccttctaggtaacgaccacatctacaacgttatcgtcacagcccatgcatttgtaataatcttcttcatagtaatacccatcataatcggaggctttggcaactgactagttcccctaataatcggtgcccccgatatggcgtttccccgcataaacaacataagcttctgactcttacctccctctctcctactcctgctcgcatctgctatagtggaggccggagcaggaacaggttgaacagtctaccctcccttagcagggaactactcccaccctggagcctccgtagacctaaccatcttctccttacacctagcaggtgtctcctctatcttaggggccatcaatttcatcacaacaattatcaatataaaaccccctgccataacccaataccaaacgcccctcttcgtctgatccgtcctaatcacagcagtcctacttctcctatctctcccagtcctagctgctggcatcactatactactaacagaccgcaacctcaacaccaccttcttcgaccccgccggaggaggagaccccattctataccaacacctattctgatttttcggtcaccctgaagtttatattcttatcctaccaggcttcggaataatctcccatattgtaacttactactccggaaaaaaagaaccatttggatacataggtatggtctgagctatgatatcaattggcttcctagggtttatcgtgtgagcacaccatatatttacagtaggaatagacgtagacacacgagcatatttcacctccgctaccataatcatcgctatccccaccggcgtcaaagtatttagctgactcgccacactccacggaagcaatatgaaatgatctgctgcagtgctctgagccctaggattcatctttcttttcaccgtaggtggcctgactggcattgtattagcaaactcatcactagacatcgtactacacgacacgtactacgttgtagctcacttccactatgtcctatcaataggagctgtatttgccatcataggaggcttcattcactgatttcccctattctcaggctacaccctagaccaaacctacgccaaaatccatttcactatcatattcatcggcgtaaatctaactttcttcccacaacactttctcggcctatccggaatgccccgacgttactcggactaccccgatgcatacaccacatgaaacatcctatcatctgtaggctcattcatttctctaacagcagtaatattaataattttcatgatttgagaagccttcgcttcgaagcgaaaagtcctaatagtagaagaaccctccataaacctggagtgactatatggatgccccccaccctaccacacattcgaagaacccgtatacataaaatctagacaaaaaaggaaggaatcgaaccccccaaagctggtttcaagccaaccccatggcctccatgactttttcaaaaaggtattagaaaaaccatttcataactttgtcaaagttaaattataggctaaatcctatatatcttaatggcacatgcagcgcaagtaggtctacaagacgctacttcccctatcatagaagagcttatcacctttcatgatcacgccctcataatcattttccttatctgcttcctagtcctgtatgcccttttcctaacactcacaacaaaactaactaatactaacatctcagacgctcaggaaatagaaaccgtctgaactatcctgcccgccatcatcctagtcctcatcgccctcccatccctacgcatcctttacataacagacgaggtcaacgatccctcccttaccatcaaatcaattggccaccaatggtactgaacctacgagtacaccgactacggcggactaatcttcaactcctacatacttcccccattattcctagaaccaggcgacctgcgactccttgacgttgacaatcgagtagtactcccgattgaagcccccattcgtataataattacatcacaagacgtcttgcactcatgagctgtccccacattaggcttaaaaacagatgcaattcccggacgtctaaaccaaaccactttcaccgctacacgaccgggggtatactacggtcaatgctctgaaatctgtggagcaaaccacagtttcatgcccatcgtcctagaattaattcccctaaaaatctttgaaatagggcccgtatttaccctatagcaccccctctaccccctctagagcccactgtaaagctaacttagcattaaccttttaagttaaagattaagagaaccaacacctctttacagtgaaatgccccaactaaatactaccgtatggcccaccataattacccccatactccttacactattcctcatcacccaactaaaaatattaaacacaaactaccacctacctccctcaccaaagcccataaaaataaaaaattataacaaaccctgagaaccaaaatgaacgaaaatctgttcgcttcattcattgcccccacaatcctaggcctacccgccgcagtactgatcattctatttccccctctattgatccccacctccaaatatctcatcaacaaccgactaatcaccacccaacaatgactaatcaaactaacctcaaaacaaataataaccatacacaacactaaaggacgaacctgatctcttatactagtatccttaatcatttttattgccacaactaacctcctcggactcctgcctcactcatttacaccaaccacccaactatctataaacctagccatggccatccccttatgagcgggcgcagtgattataggctttcgctctaagattaaaaatgccctagcccacttcttaccacaaggcacacctacaccccttatccccatactagttattatcgaaaccatcagcctactcattcaaccaatagccctggccgtacgcctaaccgctaacattactgcaggccacctactcatgcacctaattggaagcgccaccctagcaatatcaaccattaaccttccctctacacttatcatcttcacaattctaattctactgactatcctagaaatcgctgtcgccttaatccaagcctacgttttcacacttctagtaagcctctacctgcacgacaacacataatgacccaccaatcacatgcctatcatatagtaaaacccagcccatgacccctaacaggggccctctcagccctcctaatgacctccggcctagccatgtgatttcacttccactccataacgctcctcatactaggcctactaaccaacacactaaccatataccaatgatggcgcgatgtaacacgagaaagcacataccaaggccaccacacaccacctgtccaaaaaggccttcgatacgggataatcctatttattacctcagaagtttttttcttcgcaggatttttctgagccttttaccactccagcctagcccctaccccccaattaggagggcactggcccccaacaggcatcaccccgctaaatcccctagaagtcccactcctaaacacatccgtattactcgcatcaggagtatcaatcacctgagctcaccatagtctaatagaaaacaaccgaaaccaaataattcaagcactgcttattacaattttactgggtctctattttaccctcctacaagcctcagagtacttcgagtctcccttcaccatttccgacggcatctacggctcaacattttttgtagccacaggcttccacggacttcacgtcattattggctcaactttcctcactatctgcttcatccgccaactaatatttcactttacatccaaacatcactttggcttcgaagccgccgcctgatactggcattttgtagatgtggtttgactatttctgtatgtctccatctattgatgagggtcttactcttttagtataaatagtaccgttaacttccaattaactagttttgacaacattcaaaaaagagtaataaacttcgccttaattttaataatcaacaccctcctagccttactactaataattattacattttgactaccacaactcaacggctacatagaaaaatccaccccttacgagtgcggcttcgaccctatatcccccgcccgcgtccctttctccataaaattcttcttagtagctattaccttcttattatttgatctagaaattgccctccttttacccctaccatgagccctacaaacaactaacctgccactaatagttatgtcatccctcttattaatcatcatcctagccctaagtctggcctatgagtgactacaaaaaggattagactgaaccgaattggtatatagtttaaacaaaacgaatgatttcgactcattaaattatgataatcatatctaccaaatgcccctcatttacataaatattatactagcatttaccatctcacttctaggaatactagtatatcgctcacacctcatatcctccctactatgcctagaaggaataatactatcgctgttcattatagctactctcataaccctcaacacccactccctcttagccaatattgtgcctattgccatactagtctttgccgcctgcgaagcagcggtgggcctagccctactagtctcaatctccaacacatatggcctagactacgtacataacctaaacctactccaatgctaaaactaatcgtcccaacaattatattactaccactgacatgactttccaaaaaacacataatttgaatcaacacaaccacccacagcctaattattagcatcatccctctactattttttaaccaaatcaacaacaacctatttagctgttccccaaccttttcctccgaccccctaacaacccccctcctaatactaactacctgactcctacccctcacaatcatggcaagccaacgccacttatccagtgaaccactatcacgaaaaaaactctacctctctatactaatctccctacaaatctccttaattataacattcacagccacagaactaatcatattttatatcttcttcgaaaccacacttatccccaccttggctatcatcacccgatgaggcaaccagccagaacgcctgaacgcaggcacatacttcctattctacaccctagtaggctcccttcccctactcatcgcactgatttacactcacaacaccctaggctcactaaacattctactactcactctcactgcccaagaactatcaaactcctgagccaacaacttaatatgactagcttacacaatagcttttatagtaaagatacctctttacggactccacttatgactccctaaagcccatgtcgaagcccccatcgctgggtcaatagtacttgccgcagtactcttaaaactaggcggctatggtataatacgcctcacactcattctcaaccccctgacaaaacacatagcctaccccttccttgtactatccctatgaggcataattataacaagctccatctgcctacgacaaacagacctaaaatcgctcattgcatactcttcaatcagccacatagccctcgtagtaacagccattctcatccaaaccccctgaagcttcaccggcgcagtcattctcataatcgcccacggacttacatcctcattactattctgcctagcaaactcaaactacgaacgcactcacagtcgcatcataatcctctctcaaggacttcaaactctgctcccactaatagctttttgatgacttctagcaagcctcgctaacctcgccttaccccccactattaacctactgggagaactctctgtgctagtaaccacgttctcctgatcaaatatcactctcctacttacaggactcaacatactagtcacagccctatactccctctacatatttaccacaacacaatggggctcactcacccaccacattaacaacataaaaccctcattcacacgagaaaacaccctcatgttcatacacctatcccccattctcctcctatccctcaaccccgacatcattaccgggttttcctcttgtaaatatagtttaaccaaaacatcagattgtgaatctgacaacagaggcttacgaccccttatttaccgagaaagctcacaagaactgctaactcatgcccccatgtctaacaacatggctttctcaacttttaaaggataacagctatccattggtcttaggccccaaaaattttggtgcaactccaaataaaagtaataaccatgcacactactataaccaccctaaccctgacttccctaattccccccatccttaccaccctcgttaaccctaacaaaaaaaactcatacccccattatgtaaaatccattgtcgcatccacctttattatcagtctcttccccacaacaatattcatgtgcctagaccaagaagttattatctcgaactgacactgagccacaacccaaacaacccagctctccctaagcttcaaactagactacttctccataatattcatccctgtagcattgttcgttacatggtccatcatagaattctcactgtgatatataaactcagacccaaacattaatcagttcttcaaatatctactcatcttcctaattaccatactaatcttagttaccgctaacaacctattccaactgttcatcggctgagagggcgtaggaattatatccttcttgctcatcagttgatgatacgcccgagcagatgccaacacagcagccattcaagcaatcctatacaaccgtatcggcgatatcggtttcatcctcgccttagcatgatttatcctacactccaactcatgagacccacaacaaatagcccttctaaacgctaatccaagcctcaccccactactaggcctcctcctagcagcagcaggcaaatcagcccaattaggtctccacccctgactcccctcagccatagaaggccccaccccagtctcagccctactccactcaagcactatagttgtagcaggaatcttcttactcatccgcttccaccccctagcagaaaatagcccactaatccaaactctaacactatgcttaggcgctatcaccactctgttcgcagcagtctgcgcccttacacaaaatgacatcaaaaaaatcgtagccttctccacttcaagtcaactaggactcataatagttacaatcggcatcaaccaaccacacctagcattcctgcacatctgtacccacgccttcttcaaagccatactatttatgtgctccggatccatcatccacaaccttaacaatgaacaagatattcgaaaaataggaggactactcaaaaccatacctctcacttcaacctccctcaccattggcagcctagcattagcaggaatacctttcctcacaggtttctactccaaagaccacatcatcgaaaccgcaaacatatcatacacaaacgcctgagccctatctattactctcatcgctacctccctgacaagcgcctatagcactcgaataattcttctcaccctaacaggtcaacctcgcttccccacccttactaacattaacgaaaataaccccaccctactaaaccccattaaacgcctggcagccggaagcctattcgcaggatttctcattactaacaacatttcccccgcatcccccttccaaacaacaatccccctctacctaaaactcacagccctcgctgtcactttcctaggacttctaacagccctagacctcaactacctaaccaacaaacttaaaataaaatccccactatgcacattttatttctccaacatactcggattctaccctagcatcacacaccgcacaatcccctatctaggccttcttacgagccaaaacctgcccctactcctcctagacctaacctgactagaaaagctattacctaaaacaatttcacagcaccaaatctccacctccatcatcacctcaacccaaaaaggcataattaaactttacttcctctctttcttcttcccactcatcctaaccctactcctaatcacataacctattcccccgagcaatctcaattacaatatatacaccaacaaacaatgttcaaccagtaactactactaatcaacgcccatagtcatacaaagcccccgcaccaataggatcctcccgaatcaaccctaacccctctccttcataaattattcagcttcctacactattaaagtttaccacaaccaccaccccatcatactctttcacccacagcaccaatcctacctccatcgctaaccccactaaaacactcaccaagacctcaacccctgacccccatgcctcaggatactcctcaatagccatcgctgtagtatatccaaagacaaccatcattccccctaaataaattaaaaaaactattaaacccatataacctcccccaaaattcagaataataacacacccgaccacaccgctaacaatcaatactaaacccccataaataggagaaggcttagaagaaaaccccacaaaccccattactaaacccacactcaacagaaacaaagcatacatcattattctcgcacggactacaaccacgaccaatgatatgaaaaaccatcgttgtatttcaactacaagaacaccaatgaccccaatacgcaaaattaaccccctaataaaattaattaaccactcattcatcgacctccccaccccatccaacatctccgcatgatgaaacttcggctcactccttggcgcctgcctgatcctccaaatcaccacaggactattcctagccatacactactcaccagacgcctcaaccgccttttcatcaatcgcccacatcactcgagacgtaaattatggctgaatcatccgctaccttcacgccaatggcgcctcaatattctttatctgcctcttcctacacatcgggcgaggcctatattacggatcatttctctactcagaaacctgaaacatcggcattatcctcctgcttgcaactatagcaacagccttcataggctatgtcctcccgtggggccaaatatcattctgaggggccacagtaattacaaacttactatccgccatcccatacattgggacagacctagttcaatgaatctgaggaggctactcagtagacagtcccaccctcacacgattctttacctttcacttcatcttgcctttcattattgcagccctagcagcactccacctcctattcttgcacgaaacgggatcaaacaaccccctaggaatcacctcccattccgataaaatcaccttccacccttactacacaatcaaagacgccctcggcttacttctcttcattctctccttaatgacattaacactattctcaccagacctcctaggcgacccagacaattataccctagccaaccccttaaacacccctccccacatcaagcccgaatgatatttcctattcgcctacacaattctccgatccgtccctaacaagctaggaggcgtccttgccctattactatccatcctcatcctagcaataatccccatcctccatatatccaaacaacaaagcataatatttcgcccactaagccaatcactttattgactcctagccgcagacctcctcattctaacctgaatcggaggacaaccagtaagctacccttttaccatcattggacaagtagcatccgtactatacttcacaacaatcctaatcctaataccaactatctccctaattgaaaacaaaatactcaaatgggcctgtccttgtagtataaactaatacaccagtcttgtaaaccgaagatgaaaacctttttccaaggacaaatcagagaaaaagtctttaactccaccattagcacccaaagctaagattctaatttaaactattctctgttctttcatggggaagcagatttgggtgccacccaagtattgactcacccatcaacaaccgctatgtatttcgtacattactgccagccaccatgaatattgcacggtaccataaatacttgaccacctgtagtacataaaaacccaatccacatcaaaaccccctccccatgcttacaagcaagtacagcaatcaaccctcaactatcacacatcaactgcaactccaaagccacccctcacccactaggataccaacaaacctacccatctttaacagcacatagtacataaagccatttaccgtacatagcacattacagtcaaatcccttctcgtccccatggatgacccccctcagataggggtcccttgaccaccatcctccgtgaaatcaatatcccgcacaagagtgctactctcctcgctccgggcccataacacttgggggtagctaaagtgaactgtatccgacatctggttcctacttcagggccataaagcctaaatagcccacacgttccccttaaataagacatcacgatg

SEQ ID NO: 84 - DNA, 16568 bp, Homo sapiens mitochondrial
  3106: "n" refers to a nucleotide at position 3107 of the Cambridge Reference Sequence (CRS, Anderson et al. 1981 Nature 290:457-465), later determined to be absent from the human mtDNA sequence according to the revised CRS (rCRS, Andrews et al. 1999 Nature Genetics 23:147); "n" therefore represents a single nucleotide deletion at a position corresponding to nucleotide 3107 of SEQ ID NO:1 as provided herein.
gatcacaggtctatcaccctattaaccactcacgggagctctccatgcatttggtattttcgtctggggggtatgcacgcgatagcattgcgagacgctggagccggagcaccctatgtcgcagtatctgtctttgattcctgcctcatcctattatttatcgcacctacgttcaatattacaggcgaacatacttactaaagtgtgttaattaattaatgcttgtaggacataataataacaattgaatgtctgcacagccgctttccacacagacatcataacaaaaaatttccaccaaaccccccctcccccgccttctggccacagcacttaaacacatctctgccaaaccccaaaaacaaagaaccctaacaccagcctaaccagatttcaaattttatcttttggcggtatgcacttttaacagtcaccccccaactaacacattattttcccctcccactcccatactactaatctcatcaatacaacccccgcccatcctacccagcacacacaccgctgctaaccccataccccgaaccaaccaaaccccaaagacaccccccacagtttatgtagcttacctcctcaaagcaatacactgaaaatgtttagacgggctcacatcaccccataaacaaataggtttggtcctagcctttctattagctcttagtaagattacacatgcaagcatccccgttccagtgagttcaccctctaaatcaccacgatcaaaagggacaagcatcaagcacgcagcaatgcagctcaaaacgcttagcctagccacacccccacgggaaacagcagtgattaacctttagcaataaacgaaagtttaactaagctatactaaccccagggttggtcaatttcgtgccagccaccgcggtcacacgattaacccaagtcaatagaagccggcgtaaagagtgttttagatcaccccctccccaataaagctaaaactcacctgagttgtaaaaaactccagttgacacaaaatagactacgaaagtggctttaacatatctgaacacacaatagctaagacccaaactgggattagataccccactatgcttagccctaaacctcaacagttaaatcaacaaaactgctcgccagaacactacgagccacagcttaaaactcaaaggacctggcggtgcttcatatccctctagaggagcctgttctgtaatcgataaaccccgatcaacctcaccacctcttgctcagcctatataccgccatcttcagcaaaccctgatgaaggctacaaagtaagcgcaagtacccacgtaaagacgttaggtcaaggtgtagcccatgaggtggcaagaaatgggctacattttctaccccagaaaactacgatagcccttatgaaacttaagggtcgaaggtggatttagcagtaaactgagagtagagtgcttagttgaacagggccctgaagcgcgtacacaccgcccgtcaccctcctcaagtatacttcaaaggacatttaactaaaacccctacgcatttatatagaggagacaagtcgtaacatggtaagtgtactggaaagtgcacttggacgaaccagagtgtagcttaacacaaagcacccaacttacacttaggagatttcaacttaacttgaccgctctgagctaaacctagccccaaacccactccaccttactaccagacaaccttagccaaaccatttacccaaataaagtataggcgatagaaattgaaacctggcgcaatagatatagtaccgcaagggaaagatgaaaaattataaccaagcataatatagcaaggactaacccctataccttctgcataatgaattaactagaaataactttgcaaggagagccaaagctaagacccccgaaaccagacgagctacctaagaacagctaaaagagcacacccgtctatgtagcaaaatagtgggaagatttataggtagaggcgacaaacctaccgagcctggtgatagctggttgtccaagatagaatcttagttcaactttaaatttgcccacagaaccctctaaatccccttgtaaatttaactgttagtccaaagaggaacagctctttggacactaggaaaaaaccttgtagagagagtaaaaaatttaacacccatagtaggcctaaaagcagccaccaattaagaaagcgttcaagctcaacacccactacctaaaaaatcccaaacatataactgaactcctcacacccaattggaccaatctatcaccctatagaagaactaatgttagtataagtaacatgaaaacattctcctccgcataagcctgcgtcagattaaaacactgaactgacaattaacagcccaatatctacaatcaaccaacaagtcattattaccctcactgtcaacccaacacaggcatgctcataaggaaaggttaaaaaaagtaaaaggaactcggcaaatcttaccccgcctgtttaccaaaaacatcacctctagcatcaccagtattagaggcaccgcctgcccagtgacacatgtttaacggccgcggtaccctaaccgtgcaaaggtagcataatcacttgttccttaaatagggacctgtatgaatggctccacgagggttcagctgtctcttacttttaaccagtgaaattgacctgcccgtgaagaggcgggcataacacagcaagacgagaagaccctatggagctttaatttattaatgcaaacagtacctaacaaacccacaggtcctaaactaccaaacctgcattaaaaatttcggttggggcgacctcggagcagaacccaacctccgagcagtacatgctaagacttcaccagtcaaagcgaactactatactcaattgatccaataacttgaccaacggaacaagttaccctagggataacagcgcaatcctattctagagtccatatcaacaatagggtttacgacctcgatgttggatcaggacatcccaatggtgcagccgctattaaaggttcgtttgttcaacgattaaagtcctacgtgatctgagttcagaccggagtaatccaggtcggtttctatctacnttcaaattcctccctgtacgaaaggacaagagaaataaggcctacttcacaaagcgccttcccccgtaaatgatatcatctcaacttagtattatacccacacccacccaagaacagggtttgttaagatggcagagcccggtaatcgcataaaacttaaaactttacagtcagaggttcaattcctcttcttaacaacatacccatggccaacctcctactcctcattgtacccattctaatcgcaatggcattcctaatgcttaccgaacgaaaaattctaggctatatacaactacgcaaaggccccaacgttgtaggcccctacgggctactacaacccttcgctgacgccataaaactcttcaccaaagagcccctaaaacccgccacatctaccatcaccctctacatcaccgccccgaccttagctctcaccatcgctcttctactatgaacccccctccccatacccaaccccctggtcaacctcaacctaggcctcctatttattctagccacctctagcctagccgtttactcaatcctctgatcagggtgagcatcaaactcaaactacgccctgatcggcgcactgcgagcagtagcccaaacaatctcatatgaagtcaccctagccatcattctactatcaacattactaataagtggctcctttaacctctccgcccttatcacaacacaagaacacctctgattactcctgccatcatgacccttggccataatatgatttatctccacactagcagagaccaaccgaacccccttcgaccttgccgaaggggagtccgaactagtctcaggcttcaacatcgaatacgccgcaggccccttcgccctattcttcatagccgaatacacaaacattattataataaacaccctcaccactacaatcttcctaggaacaacatatgacgcactctcccctgaactctacacaacatattttgtcaccaagaccctacttctaacctccctgttcttatgaattcgaacagcatacccccgattccgctacgaccaactcatacacctcctatgaaaaaacttcctaccactcaccctagcattacttatatgatatgtctccatacccattacaatctccagcattccccctcaaacctaagaaatatgtctgataaaagagttactttgatagagtaaataataggagcttaaacccccttatttctaggactatgagaatcgaacccatccctgagaatccaaaattctccgtgccacctatcacaccccatcctaaagtaaggtcagctaaataagctatcgggcccataccccgaaaatgttggttatacccttcccgtactaattaatcccctggcccaacccgtcatctactctaccatctttgcaggcacactcatcacagcgctaagctcgcactgattttttacctgagtaggcctagaaataaacatgctagcttttattccagttctaaccaaaaaaataaaccctcgttccacagaagctgccatcaagtatttcctcacgcaagcaaccgcatccataatccttctaatagctatcctcttcaacaatatactctccggacaatgaaccataaccaatactaccaatcaatactcatcattaataatcataatggctatagcaataaaactaggaatagccccctttcacttctgagtcccagaggttacccaaggcacccctctgacatccggcctgcttcttctcacatgacaaaaactagcccccatctcaatcatataccaaatctctccctcactaaacgtaagccttctcctcactctctcaatcttatccatcatagcaggcagttgaggtggattaaaccaaacccagctacgcaaaatcttagcatactcctcaattacccacataggatgaataatagcagttctaccgtacaaccctaacataaccattcttaatttaactatttatattatcctaactactaccgcattcctactactcaacttaaactccagcaccacgaccctactactatctcgcacctgaaacaagctaacatgactaacacccttaattccatccaccctcctctccctaggaggcctgcccccgctaaccggctttttgcccaaatgggccattatcgaagaattcacaaaaaacaatagcctcatcatccccaccatcatagccaccatcaccctccttaacctctacttctacctacgcctaatctactccacctcaatcacactactccccatatctaacaacgtaaaaataaaatgacagtttgaacatacaaaacccaccccattcctccccacactcatcgcccttaccacgctactcctacctatctccccttttatactaataatcttatagaaatttaggttaaatacagaccaagagccttcaaagccctcagtaagttgcaatacttaatttctgtaacagctaaggactgcaaaaccccactctgcatcaactgaacgcaaatcagccactttaattaagctaagcccttactagaccaatgggacttaaacccacaaacacttagttaacagctaagcaccctaatcaactggcttcaatctacttctcccgccgccgggaaaaaaggcgggagaagccccggcaggtttgaagctgcttcttcgaatttgcaattcaatatgaaaatcacctcggagctggtaaaaagaggcctaacccctgtctttagatttacagtccaatgcttcactcagccattttacctcacccccactgatgttcgccgaccgttgactattctctacaaaccacaaagacattggaacactatacctattattcggcgcatgagctggagtcctaggcacagctctaagcctccttattcgagccgagctgggccagccaggcaaccttctaggtaacgaccacatctacaacgttatcgtcacagcccatgcatttgtaataatcttcttcatagtaatacccatcataatcggaggctttggcaactgactagttcccctaataatcggtgcccccgatatggcgtttccccgcataaacaacataagcttctgactcttacctccctctctcctactcctgctcgcatctgctatagtggaggccggagcaggaacaggttgaacagtctaccctcccttagcagggaactactcccaccctggagcctccgtagacctaaccatcttctccttacacctagcaggtgtctcctctatcttaggggccatcaatttcatcacaacaattatcaatataaaaccccctgccataacccaataccaaacgcccctcttcgtctgatccgtcctaatcacagcagtcctacttctcctatctctcccagtcctagctgctggcatcactatactactaacagaccgcaacctcaacaccaccttcttcgaccccgccggaggaggagaccccattctataccaacacctattctgatttttcggtcaccctgaagtttatattcttatcctaccaggcttcggaataatctcccatattgtaacttactactccggaaaaaaagaaccatttggatacataggtatggtctgagctatgatatcaattggcttcctagggtttatcgtgtgagcacaccatatatttacagtaggaatagacgtagacacacgagcatatttcacctccgctaccataatcatcgctatccccaccggcgtcaaagtatttagctgactcgccacactccacggaagcaatatgaaatgatctgctgcagtgctctgagccctaggattcatctttcttttcaccgtaggtggcctgactggcattgtattagcaaactcatcactagacatcgtactacacgacacgtactacgttgtagcccacttccactatgtcctatcaataggagctgtatttgccatcataggaggcttcattcactgatttcccctattctcaggctacaccctagaccaaacctacgccaaaatccatttcactatcatattcatcggcgtaaatctaactttcttcccacaacactttctcggcctatccggaatgccccgacgttactcggactaccccgatgcatacaccacatgaaacatcctatcatctgtaggctcattcatttctctaacagcagtaatattaataattttcatgatttgagaagccttcgcttcgaagcgaaaagtcctaatagtagaagaaccctccataaacctggagtgactatatggatgccccccaccctaccacacattcgaagaacccgtatacataaaatctagacaaaaaaggaaggaatcgaaccccccaaagctggtttcaagccaaccccatggcctccatgactttttcaaaaaggtattagaaaaaccatttcataactttgtcaaagttaaattataggctaaatcctatatatcttaatggcacatgcagcgcaagtaggtctacaagacgctacttcccctatcatagaagagcttatcacctttcatgatcacgccctcataatcattttccttatctgcttcctagtcctgtatgcccttttcctaacactcacaacaaaactaactaatactaacatctcagacgctcaggaaatagaaaccgtctgaactatcctgcccgccatcatcctagtcctcatcgccctcccatccctacgcatcctttacataacagacgaggtcaacgatccctcccttaccatcaaatcaattggccaccaatggtactgaacctacgagtacaccgactacggcggactaatcttcaactcctacatacttcccccattattcctagaaccaggcgacctgcgactccttgacgttgacaatcgagtagtactcccgattgaagcccccattcgtataataattacatcacaagacgtcttgcactcatgagctgtccccacattaggcttaaaaacagatgcaattcccggacgtctaaaccaaaccactttcaccgctacacgaccgggggtatactacggtcaatgctctgaaatctgtggagcaaaccacagtttcatgcccatcgtcctagaattaattcccctaaaaatctttgaaatagggcccgtatttaccctatagcaccccctctaccccctctagagcccactgtaaagctaacttagcattaaccttttaagttaaagattaagagaaccaacacctctttacagtgaaatgccccaactaaatactaccgtatggcccaccataattacccccatactccttacactattcctcatcacccaactaaaaatattaaacacaaactaccacctacctccctcaccaaagcccataaaaataaaaaattataacaaaccctgagaaccaaaatgaacgaaaatctgttcgcttcattcattgcccccacaatcctaggcctacccgccgcagtactgatcattctatttccccctctattgatccccacctccaaatatctcatcaacaaccgactaatcaccacccaacaatgactaatcaaactaacctcaaaacaaatgataaccatacacaacactaaaggacgaacctgatctcttatactagtatccttaatcatttttattgccacaactaacctcctcggactcctgcctcactcatttacaccaaccacccaactatctataaacctagccatggccatccccttatgagcgggcgcagtgattataggctttcgctctaagattaaaaatgccctagcccacttcttaccacaaggcacacctacaccccttatccccatactagttattatcgaaaccatcagcctactcattcaaccaatagccctggccgtacgcctaaccgctaacattactgcaggccacctactcatgcacctaattggaagcgccaccctagcaatatcaaccattaaccttccctctacacttatcatcttcacaattctaattctactgactatcctagaaatcgctgtcgccttaatccaagcctacgttttcacacttctagtaagcctctacctgcacgacaacacataatgacccaccaatcacatgcctatcatatagtaaaacccagcccatgacccctaacaggggccctctcagccctcctaatgacctccggcctagccatgtgatttcacttccactccataacgctcctcatactaggcctactaaccaacacactaaccatataccaatgatggcgcgatgtaacacgagaaagcacataccaaggccaccacacaccacctgtccaaaaaggccttcgatacgggataatcctatttattacctcagaagtttttttcttcgcaggatttttctgagccttttaccactccagcctagcccctaccccccaattaggagggcactggcccccaacaggcatcaccccgctaaatcccctagaagtcccactcctaaacacatccgtattactcgcatcaggagtatcaatcacctgagctcaccatagtctaatagaaaacaaccgaaaccaaataattcaagcactgcttattacaattttactgggtctctattttaccctcctacaagcctcagagtacttcgagtctcccttcaccatttccgacggcatctacggctcaacattttttgtagccacaggcttccacggacttcacgtcattattggctcaactttcctcactatctgcttcatccgccaactaatatttcactttacatccaaacatcactttggcttcgaagccgccgcctgatactggcattttgtagatgtggtttgactatttctgtatgtctccatctattgatgagggtcttactcttttagtataaatagtaccgttaacttccaattaactagttttgacaacattcaaaaaagagtaataaacttcgccttaattttaataatcaacaccctcctagccttactactaataattattacattttgactaccacaactcaacggctacatagaaaaatccaccccttacgagtgcggcttcgaccctatatcccccgcccgcgtccctttctccataaaattcttcttagtagctattaccttcttattatttgatctagaaattgccctccttttacccctaccatgagccctacaaacaactaacctgccactaatagttatgtcatccctcttattaatcatcatcctagccctaagtctggcctatgagtgactacaaaaaggattagactgaaccgaattggtatatagtttaaacaaaacgaatgatttcgactcattaaattatgataatcatatttaccaaatgcccctcatttacataaatattatactagcatttaccatctcacttctaggaatactagtatatcgctcacacctcatatcctccctactatgcctagaaggaataatactatcgctgttcattatagctactctcataaccctcaacacccactccctcttagccaatattgtgcctattgccatactagtctttgccgcctgcgaagcagcggtgggcctagccctactagtctcaatctccaacacatatggcctagactacgtacataacctaaacctactccaatgctaaaactaatcgtcccaacaattatattactaccactgacatgactttccaaaaaacacataatttgaatcaacacaaccacccacagcctaattattagcatcatccctctactattttttaaccaaatcaacaacaacctatttagctgttccccaaccttttcctccgaccccctaacaacccccctcctaatactaactacctgactcctacccctcacaatcatggcaagccaacgccacttatccagtgaaccactatcacgaaaaaaactctacctctctatactaatctccctacaaatctccttaattataacattcacagccacagaactaatcatattttatatcttcttcgaaaccacacttatccccaccttggctatcatcacccgatgaggcaaccagccagaacgcctgaacgcaggcacatacttcctattctacaccctagtaggctcccttcccctactcatcgcactaatttacactcacaacaccctaggctcactaaacattctactactcactctcactgcccaagaactatcaaactcctgagccaacaacttaatatgactagcttacacaatagcttttatagtaaagatacctctttacggactccacttatgactccctaaagcccatgtcgaagcccccatcgctgggtcaatagtacttgccgcagtactcttaaaactaggcggctatggtataatacgcctcacactcattctcaaccccctgacaaaacacatagcctaccccttccttgtactatccctatgaggcataattataacaagctccatctgcctacgacaaacagacctaaaatcgctcattgcatactcttcaatcagccacatagccctcgtagtaacagccattctcatccaaaccccctgaagcttcaccggcgcagtcattctcataatcgcccacgggcttacatcctcattactattctgcctagcaaactcaaactacgaacgcactcacagtcgcatcataatcctctctcaaggacttcaaactctactcccactaatagctttttgatgacttctagcaagcctcgctaacctcgccttaccccccactattaacctactgggagaactctctgtgctagtaaccacgttctcctgatcaaatatcactctcctacttacaggactcaacatactagtcacagccctatactccctctacatatttaccacaacacaatggggctcactcacccaccacattaacaacataaaaccctcattcacacgagaaaacaccctcatgttcatacacctatcccccattctcctcctatccctcaaccccgacatcattaccgggttttcctcttgtaaatatagtttaaccaaaacatcagattgtgaatctgacaacagaggcttacgaccccttatttaccgagaaagctcacaagaactgctaactcatgcccccatgtctaacaacatggctttctcaacttttaaaggataacagctatccattggtcttaggccccaaaaattttggtgcaactccaaataaaagtaataaccatgcacactactataaccaccctaaccctgacttccctaattccccccatccttaccaccctcgttaaccctaacaaaaaaaactcatacccccattatgtaaaatccattgtcgcatccacctttattatcagtctcttccccacaacaatattcatgtgcctagaccaagaagttattatctcgaactgacactgagccacaacccaaacaacccagctctccctaagcttcaaactagactacttctccataatattcatccctgtagcattgttcgttacatggtccatcatagaattctcactgtgatatataaactcagacccaaacattaatcagttcttcaaatatctactcatcttcctaattaccatactaatcttagttaccgctaacaacctattccaactgttcatcggctgagagggcgtaggaattatatccttcttgctcatcagttgatgatacgcccgagcagatgccaacacagcagccattcaagcaatcctatacaaccgtatcggcgatatcggtttcatcctcgccttagcatgatttatcctacactccaactcatgagacccacaacaaatagcccttctaaacgctaatccaagcctcaccccactactaggcctcctcctagcagcagcaggcaaatcagcccaattaggtctccacccctgactcccctcagccatagaaggccccaccccagtctcagccctactccactcaagcactatagttgtagcaggaatcttcttactcatccgcttccaccccctagcagaaaatagcccactaatccaaactctaacactatgcttaggcgctatcaccactctgttcgcagcagtctgcgcccttacacaaaatgacatcaaaaaaatcgtagccttctccacttcaagtcaactaggactcataatagttacaatcggcatcaaccaaccacacctagcattcctgcacatctgtacccacgccttcttcaaagccatactatttatgtgctccgggtccatcatccacaaccttaacaatgaacaagatattcgaaaaataggaggactactcaaaaccatacctctcacttcaacctccctcaccattggcagcctagcattagcaggaatacctttcctcacaggtttctactccaaagaccacatcatcgaaaccgcaaacatatcatacacaaacgcctgagccctatctattactctcatcgctacctccctgacaagcgcctatagcactcgaataattcttctcaccctaacaggtcaacctcgcttccccacccttactaacattaacgaaaataaccccaccctactaaaccccattaaacgcctggcagccggaagcctattcgcaggatttctcattactaacaacatttcccccgcatcccccttccaaacaacaatccccctctacctaaaactcacagccctcgctgtcactttcctaggacttctaacagccctagacctcaactacctaaccaacaaacttaaaataaaatccccactatgcacattttatttctccaacatactcggattctaccccagcatcacacaccgcacaatcccctatctaggccttcttacgagccaaaacctgcccctactcctcctagacctaacctgactagaaaagctattacctaaaacaatttcacagcaccaaatctccacctccatcatcacctcaacccaaaaaggcataattaaactttacttcctctctttcttcttcccactcatcctaaccctactcctaatcacataacctattcccccgagcaatctcaattacaatatatacaccaacaaacaatgttcaaccagtaactactactaatcaacgcccataatcatacaaagcccccgcaccaataggatcctcccgaatcaaccctgacccctctccttcataaattattcagcttcctacactattaaagtttaccacaaccaccaccccatcatactctttcacccacagcaccaatcctacctccatcgctaaccccactaaaacactcaccaagacctcaacccctgacccccatgcctcaggatactcctcaatagccatcgctgtagtatatccaaagacaaccatcattccccctaaataaattaaaaaaactattaaacccatataacctcccccaaaattcagaataataacacacccgaccacaccgctaacaatcaatactaaacccccataaataggagaaggcttagaagaaaaccccacaaaccccattactaaacccacactcaacagaaacaaagcatacatcattattctcgcacggactacaaccacgaccaatgatatgaaaaaccatcgttgtatttcaactacaagaacaccaatgaccccaatacgcaaaactaaccccctaataaaattaattaaccactcattcatcgacctccccaccccatccaacatctccgcatgatgaaacttcggctcactccttggcgcctgcctgatcctccaaatcaccacaggactattcctagccatgcactactcaccagacgcctcaaccgccttttcatcaatcgcccacatcactcgagacgtaaattatggctgaatcatccgctaccttcacgccaatggcgcctcaatattctttatctgcctcttcctacacatcgggcgaggcctatattacggatcatttctctactcagaaacctgaaacatcggcattatcctcctgcttgcaactatagcaacagccttcataggctatgtcctcccgtgaggccaaatatcattctgaggggccacagtaattacaaacttactatccgccatcccatacattgggacagacctagttcaatgaatctgaggaggctactcagtagacagtcccaccctcacacgattctttacctttcacttcatcttgcccttcattattgcagccctagcagcactccacctcctattcttgcacgaaacgggatcaaacaaccccctaggaatcacctcccattccgataaaatcaccttccacccttactacacaatcaaagacgccctcggcttacttctcttccttctctccttaatgacattaacactattctcaccagacctcctaggcgacccagacaattataccctagccaaccccttaaacacccctccccacatcaagcccgaatgatatttcctattcgcctacacaattctccgatccgtccctaacaaactaggaggcgtccttgccctattactatccatcctcatcctagcaataatccccatcctccatatatccaaacaacaaagcataatatttcgcccactaagccaatcactttattgactcctagccgcagacctcctcattctaacctgaatcggaggacaaccagtaagctaccctttcaccatcattggacaagtagcatccgtactatacttcacaacaatcctaatcctaataccaactatctccctaattgaaaacaaaatactcaaatgggcctgtccttgtagtataaactaatacaccagtcttgtaaaccggagatgaaaacctttttccaaggacaaatcagagaaaaagtctttaactccaccattagcacccaaagctaagattctaatttaaactattctctgttctttcatggggaagcagatttgggtaccacccaagtattgactcacccatcaacaaccgctatgtatttcgtacattactgccagccaccatgaatattgtacggtaccataaatacttgaccacctgtagtacataaaaacccaatccacatcaaaaccccccccccatgcttacaagcaagtacagcaatcaaccctcaactatcacacatcaactgcaactccaaagccacccctcacccactaggataccaacaaacctacccacccttaacagtacatagtacataaagccatttaccgtacatagcacattacagtcaaatcccctctcgcccccatggatgacccccctcagataggggtcccttgaccaccatcctccgtgaaatcaatatcccgcacaagagtgctactctcctcgctccgggcccataacacttgggggtagctaaagtgaactgtatccgacatctggttcctacttcagggccataaagcctaaatagcccacacgttccccttaaataagacatcacgatg

SEQ ID NO: 85 - DNA, 16569 bp, Homo sapiens mitochondrial
  3107: "n" refers to a nucleotide at position 3107 of the Cambridge Reference Sequence (CRS, Anderson et al. 1981 Nature 290:457-465), later determined to be absent from the human mtDNA sequence according to the revised CRS (rCRS, Andrews et al. 1999 Nature Genetics 23:147); "n" therefore represents a single nucleotide deletion at a position corresponding to nucleotide 3107 of SEQ ID NO:1 as provided herein.
gatcacaggtctatcaccctattaaccactcacgggagctctccatgcatttggtattttcgtctggggggtgtgcacgcgatagcattgcgagacgctggagccggagcaccctatgtcgcagtatctgtctttgattcctgccccatcctattatttatcgcacctacgttcaatattacaggcgaacatacttactaaagtgtgttaattaattaatgcttgtaggacataataataacaattgaatgtctgcacagccgctttccacacagacatcataacaaaaaaatttccaccaaaccccccctcccccccgcttctggccacagcacttaaacacatctctgccaaaccccaaaaacaaagaaccctaacaccagcctaaccagatttcaaattttatcttttggcggtatgcacttttaacagtcaccccccaactaacacattattttcccctcccactcccatactactaatctcatcaatacaacccccgcccatcctacccagcacacacaccgctgctaaccccataccccgaaccaaccaaaccccaaagacaccccccacagtttatgtagcttacctcctcaaagcaatacactgaaaatgtttagacgggctcacatcaccccataaacaaataggtttggtcctagcctttctattagctcttagtaagattacacatgcaagcatccccgttccagtgagttcaccctctaaatcaccacgatcaaaagggacaagcatcaagcacgcagcaatgcagctcaaaacgcttagcctagccacacccccacgggaaacagcagtgattaacctttagcaataaacgaaagtttaactaagctatactaaccccagggttggtcaatttcgtgccagccaccgcggtcacacgattaacccaagtcaatagaagccggcgtaaagagtgttttagatcacccctccccaataaagctaaaactcacctgagttgtaaaaaactccagttgacacaaaatagactacgaaagtggctttaacatatctgaacacacaatagctaagacccaaactgggattagataccccactatgcttagccctaaacctcaacagttaaatcaacaaaactgctcgccagaacactacgagccacagcttaaaactcaaaggacctggcggtgcttcatatccctctagaggagcctgttctgtaatcgataaaccccgatcaacctcaccacctcttgctcagcctatataccgccatcttcagcaaaccctgatgaaggctacaaagtaagcgcaagtacccacgtaaagacgttaggtcaaggtgtagcccatgaggtggcaagaaatgggctacattttctaccccagaaaactacgatagcccttatgaaacttaagggtcgaaggtggatttagcagtaaactgagagtagagtgcttagttgaacagggccctgaagcgcgtacacaccgcccgtcaccctcctcaagtatacttcaaaggacatttaactaaaacccctacgcatttatatagaggagacaagtcgtaacatggtaagtgtactggaaagtgcacttggacgaaccagagtgtagcttaacacaaagcacccaacttacacttaggagatttcaacttaacttgaccgctctgagctaaacctagccccaaacccactccaccttactaccagacaaccttagccaaaccatttacccaaataaagtataggcgatagaaattgaaacctggcgcaatagatatagtaccgcaagggaaagatgaaaaattacaaccaagcataatatagcaaggactaacccctataccttctgcataatgaattaactagaaataactttgcaaggagagccaaagctaagacccccgaaaccagacgagctacctaagaacagctaaaagagcacacccgtctatgtagcaaaatagtgggaagatttataggtagaggcgacaaacctaccgagcctggtgatagctggttgtccaagatagaatcttagttcaactttaaatttgcccacagaaccctctaaatccccttgtaaatttaactgttagtccaaagaggaacagctctttggacactaggaaaaaaccttgtagagagagtaaaaaatttaacacccatagtaggcctaaaagcagccaccaattaagaaagcgttcaagctcaacacccactacctaaaaaatcccaaacatataactgaactcctcacacccaattggaccaatctatcaccctatagaagaactaatgttagtataagtaacatgaaaacattctcctccgcataagcctgcgtcagattaaaacactgaactgacaattaacagcccaatatctacaatcaaccaacaagtcattattaccctcactgtcaacccaacacaggcatgctcataaggaaaggttaaaaaaagtaaaaggaactcggcaaatcttaccccgcctgtttaccaaaaacatcacctctagcatcaccagtattagaggcaccgcctgcccagtgacacatgtttaacggccgcggtaccctaaccgtgcaaaggtagcataatcacttgttccttaaatagggacctgtatgaatggctccacgagggttcagctgtctcttacttttaaccagtgaaattgacctgcccgtgaagaggcgggcatgacacagcaagacgagaagaccctatggagctttaatttattaatgcaaacagtacctaacaaacccacaggtcctaaactaccaaacctgcattaaaaatttcggttggggcgacctcggagcagaacccaacctccgagcagtacatgctaagacttcaccagtcaaagcgaactactatactcaattgatccaataacttgaccaacggaacaagttaccctagggataacagcgcaatcctattctagagtccatatcaacaatagggtttacgacctcgatgttggatcaggacatcccgatggtgcagccgctattaaaggttcgtttgttcaacgattaaagtcctacgtgatctgagttcagaccggagtaatccaggtcggtttctatctacnttcaaattcctccctgtacgaaaggacaagagaaataaggcctacttcacaaagcgccttcccccgtaaatgatatcatctcaacttagtattatacccacacccacccaagaacagggtttgttaagatggcagagcccggtaatcgcataaaacttaaaactttacagtcagaggttcaattcctcttcttaacaacatacccatggccaacctcctactcctcattgtacccattctgatcgcaatggcattcctaatgcttaccgaacgaaaaattctaggctatatacaactacgcaaaggccccaacgttgtaggcccctacgggctactacaacccttcgctgacgccataaaactcttcaccaaagagcccctaaaacccgccacatctaccatcaccctctacatcaccgccccgaccttagctctcaccatcgctcttctactatgaacccccctccccatacccaaccccctggtcaacctcaacctaggcctcctatttattctagccacctctagcctagccgtttactcaatcctctgatcagggtgagcatcaaactcaaactacgccctgatcggcgcactgcgagcagtagcccaaacaatctcatatgaagtcaccctagccatcattctactatcaacattactaataagtggctcctttaacctctccacccttatcacaacacaagaacacctctgattactcctgccatcatgacccttggccataatatgatttatctccacactagcagagaccaaccgaacccccttcgaccttgccgaaggggagtccgaactagtctcaggcttcaacatcgaatacgccgcaggccccttcgccctattcttcatagccgaatacacaaacattattataataaacaccctcaccactacaatcttcctaggaacaacatatgacgcactctcccctgaactctacacaacatattttgtcaccaagaccctacttctaacctccctgttcttatgaattcgaacagcatacccccgattccgctacgaccaactcatacacctcctatgaaaaaacttcctaccactcaccctagcattacttatatgatatgtctccatacccattacaatctccagcattccccctcaaacctaagaaatatgtctgataaaagagttactttgatagagtaaataataggagcttaaacccccttatttctaggactatgagaatcgaacccatccctgagaatccaaaattctccgtgccacctatcacaccccatcctaaagtaaggtcagctaaataagctatcgggcccataccccgaaaatgttggttatacccttcccgtactaattaatcccctggcccaacccgtcatctactctaccatctttgcaggcacactcatcacagcgctaagctcgcactgattttttacctgagtaggcctagaaataaacatgctagcttttattccagttctaaccaaaaaaataaaccctcgttccacagaagctgccatcaagtatttcctcacgcaagcaaccgcatccataatccttctaatagctatcctcttcaacaatatactctccggacaatgaaccataaccaatactaccaatcaatactcatcattaataatcataatggctatagcaataaaactaggaatagccccctttcacttctgagtcccagaggttacccaaggcacccctctgacatccggcctgcttcttctcacatgacaaaaactagcccccatctcaatcatataccaaatctctccctcactaaacgtaagccttctcctcactctctcaatcttatccatcatagcaggcagttgaggtggattaaaccaaacccagctacgcaaaatcttagcatactcctcaattacccacataggatgaataatagcagttctaccgtacaaccctaacataaccattcttaatttaactatttatattatcctaactactaccgcattcctactactcaacttaaactccagcaccacgaccctactactatctcgcacctgaaacaagctaacatgactaacacccttaattccatccaccctcctctccctaggaggcctgcccccgctaaccggctttttgcccaaatgggccattatcgaagaattcacaaaaaacaatagcctcatcatccccaccatcatagccaccatcaccctccttaacctctacttctacctacgcctaatctactccacctcaatcacactactccccatatctaacaacgtaaaaataaaatgacagtttgaacatacaaaacccaccccattcctccccacactcatcgcccttaccacgctactcctacctatctccccttttatactaataatcttatagaaatttaggttaaatacagaccaagagccttcaaagccctaagtaagttgcaatacttaatttctgtaacagctaaggactgcaaaaccccactctgcatcaactgaacgcaaatcagccactttaattaagctaagcccttactagaccaatgggacttaaacccacaaacacttagttaacagctaagcaccctaatcaactggcttcaatctacttctcccgccgccgggaaaaaaggcgggagaagccccggcaggtttgaagctgcttcttcgaatttgcaattcaatatgaaaatcacctcggagctggtaaaaagaggcctaacccctgtctttagatttacagtccaatgcttcactcagccattttacctcacccccactgatgttcgccgaccgttgactattctctacaaaccacaaagacattggaacactatacctattattcggcgcatgagctggagtcctaggcacagctctaagcctccttattcgagccgagctgggccagccaggcaaccttctaggtaacgaccacatctacaacgttatcgtcacagcccatgcatttgtaataatcttcttcatagtaatacccatcataatcggaggctttggcaactgactagttcccctaataatcggtgcccccgatatggcatttccccgcataaacaacataagcttctgactcttacctccctctctcctactcctgctcgcatctgctatagtggaggccggagcaggaacaggttgaacagtctaccctcccttagcagggaactactcccaccctggagcctccgtagacctaaccatcttctccttacacctagcaggtgtctcctctatcttaggggccatcaatttcatcacaacaattatcaatataaaaccccctgccataacccaataccaaacgcccctcttcgtctgatccgtcctaatcacagcagtcctacttctcctatctctcccagtcctagctgctggcatcactatactactaacagaccgcaacctcaacaccaccttcttcgaccccgccggaggaggagaccccattctataccaacacctattctgatttttcggtcaccctgaagtttatattcttatcctaccaggcttcggaataatctcccatattgtaacttactactccggaaaaaaagaaccatttggatacataggtatggtctgagctatgatatcaattggcttcctagggtttatcgtgtgagcacaccatatatttacagtaggaatagacgtagacacacgagcatatttcacctccgctaccataatcatcgctatccccaccggcgtcaaagtatttagctgactcgccacactccacggaagcaatatgaaatgatctgctgcagtgctctgagccctaggattcatctttcttttcaccgtaggtggcctgactggcattgtattagcaaactcatcactagacatcgtactacacgacacgtactacgttgtagctcacttccactatgtcctatcaataggagctgtatttgccatcataggaggcttcattcactgatttcccctattctcaggctacaccctagaccaaacctacgccaaaatccatttcactatcatattcatcggcgtaaatctaactttcttcccacaacactttctcggcctatccggaatgccccgacgttactcggactaccccgatgcatacaccacatgaaacatcctatcatctgtaggctcattcatttctctaacagcagtaatattaataattttcatgatttgagaagccttcgcttcgaagcgaaaagtcctaatagtagaagaaccctccataaacctggagtgactatatggatgccccccaccctaccacacattcgaagaacccgtatacataaaatctagacaaaaaaggaaggaatcgaaccccccaaagctggtttcaagccaaccccatggcctccatgactttttcaaaaaggtattagaaaaaccatttcataactttgtcaaagttaaattataggctaaatcctatatatcttaatggcacatgcagcgcaagtaggtctacaagacgctacttcccctatcatagaagagcttatcacctttcatgatcacgccctcataatcattttccttatctgcttcctagtcctgtatgcccttttcctaacactcacaacaaaactaactaatactaacatctcagacgctcaggaaatagaaaccgtctgaactatcctgcccgccatcatcctaatcctcatcgccctcccatccctacgcatcctttacataacagacgaggtcaacgatccctcccttaccatcaaatcaattggccaccaatggtactgaacctacgagtacaccgactacggcggactaatcttcaactcctacatacttcccccattattcctagaaccaggcgacctgcgactccttgacgttgacaatcgagtagtactcccgattgaagcccccattcgtataataattacatcacaagacgtcttgcactcatgagctgtccccacattaggcttaaaaacagatgcaattcccggacgtctaaaccaaaccactttcaccgctacacgaccgggggtatactacggtcaatgctctgaaatctgtggagcaaaccacagtttcatgcccatcgtcctagaattaattcccctaaaaatctttgaaatagggcccgtatttaccctatagcaccccctctaccccctctagagcccactgtaaagctaacttagcattaaccttttaagttaaagattaagagaaccaacacctctttacagtgaaatgccccaactaaatactaccgtatggcccaccataattacccccatactccttacactattcctcatcacccaactaaaaatattaaacacaaactaccacctacctccctcaccaaagcccataaaaataaaaaattataacaaaccctgagaaccaaaatgaacgaaaatctgttcgcttcattcattgcccccacaatcctaggcctacccgccgcagtactgatcattctatttccccctctattgatccccacctccaaatatctcatcaacaaccgactaatcaccacccaacaatgactaatcaaactaacctcaaaacaaatgataaccatacacaacactaaaggacgaacctgatctcttatactagtatccttaatcatttttattgccacaactaacctcctcggactcctgcctcactcatttacaccaaccacccaactatctataaacctagccatggccatccccttatgagcgggcgcagtgattataggctttcgctctaagattaaaaatgccctagcccacttcttaccacaaggcacacctacaccccttatccccatactagttattatcgaaaccatcagcctactcattcaaccaatagccctggccgtacgcctaaccgctaacattactgcaggccacctactcatgcacctaattggaagcgccaccctagcaatatcaaccattaaccttccctctacacttatcatcttcacaattctaattctactgactatcctagaaatcgctgtcgccttaatccaagcctacgttttcacacttctagtaagcctctacctgcacgacaacacataatgacccaccaatcacatgcctatcatatagtaaaacccagcccatgacccctaacaggggccctctcagccctcctaatgacctccggcctagccatgtgatttcacttccactccataacgctcctcatactaggcctactaaccaacacactaaccatataccaatgatggcgcgatgtaacacgagaaagcacataccaaggccaccacacaccacctgtccaaaaaggccttcgatacgggataatcctatttattacctcagaagtttttttcttcgcaggatttttctgagccttttaccactccagcctagcccctaccccccaattaggagggcactggcccccaacaggcatcaccccgctaaatcccctagaagtcccactcctaaacacatccgtattactcgcatcaggagtatcaatcacctgagctcaccatagtctaatagaaaacaaccgaaaccaaataattcaagcactgcttattacaattttactgggtctctattttaccctcctacaagcctcagagtacttcgagtctcccttcaccatttccgacggcatctacggctcaacattttttgtagccacaggcttccacggacttcacgtcattattggctcaactttcctcactatctgcttcatccgccaactaatatttcactttacatccaaacatcactttggcttcgaagccgccgcctgatactggcattttgtagatgtggtttgactatttctgtatgtctccatctattgatgagggtcttactcttttagtataaatagtaccgttaacttccaattaactagttttgacaacattcaaaaaagagtaataaacttcgccttaattttaataatcaacaccctcctagccttactactaataattattacattttgactaccacaactcaacggctacatagaaaaatccaccccttacgagtgcggcttcgaccctatatcccccgcccgcgtccctttctccataaaattcttcttagtagctattaccttcttattatttgatctagaaattgccctccttttacccctaccatgagccctacaaacaactaacctgccactaatagttatgtcatccctcttattaatcatcatcctagccctaagtctggcctatgagtgactacaaaaaggattagactgaaccgaattggtatatagtttaaacaaaacgaatgatttcgactcattaaattatgataatcatatttaccaaatgcccctcatttacataaatattatactagcatttaccatctcacttctaggaatactagtatatcgctcacacctcatatcctccctactatgcctagaaggaataatactatcgctgttcattatagctactctcataaccctcaacacccactccctcttagccaatattgtgcctattgccatactagtctttgccgcctgcgaagcagcggtgggcctagccctactagtctcaatctccaacacatatggcctagactacgtacataacctaaacctactccaatgctaaaactaatcgtcccaacaattatattactaccactgacatgactttccaaaaaacacataatttgaatcaacacaaccacccacagcctaattattagcatcatccctctactattttttaaccaaatcaacaacaacctatttagctgttccccaaccttttcctccgaccccctaacaacccccctcctaatactaactacctgactcctacccctcacaatcatggcaagccaacgccacttatccagtgaaccactatcacgaaaaaaactctacctctctatactaatctccctacaaatctccttaattataacattcacagccacagaactaatcatattttatatcttcttcgaaaccacacttatccccaccttggctatcatcacccgatgaggcaaccagccagaacgcctgaacgcaggcacatacttcctattctacaccctagtaggctcccttcccctactcatcgcactaatttacactcacaacaccctgggctcactaaacattctactactcactctcactgcccaagaactatcaaactcctgagccaacaacttaatatgactagcttacacaatagcttttatagtaaagatacctctttacggactccacttatgactccctaaagcccatgtcgaagcccccatcgctgggtcaatagtacttgccgcagtactcttgaaactaggcggctatggtataatacgcctcacactcattctcaaccccctgacaaaacacatagcctaccccttccttgtactatccctatgaggcataattataacaagctccatctgcctacgacaaacagacctaaaatcgctcattgcatactcttcaatcagccacatagccctcgtagtaacagccattctcatccaaaccccctgaagcttcaccggcgcagtcattctcataatcgcccacggacttacatcctcattactattctgcctagcaaactcaaactacgaacgcactcacagtcgcatcataatcctctctcaaggacttcaaactctactcccactaatagctttttgatgacttctagcaagcctcgctaacctcgccttaccccccactattaacctactgggagaactctctgtgctagtaaccacgttctcctgatcaaatatcactctcctacttacaggactcaacatactagtcacagccctatactccctctacatatttaccacaacacaatggggctcactcacccaccacattaacaacataaaaccctcattcacacgagaaaacaccctcatgttcatacacctatcccccattctcctcctatccctcaaccccgacatcattaccgggttttcctcttgtaaatatagtttaaccaaaacatcagattgtgaatctgacaacagaggcttacgaccccttatttaccgagaaagctcacaagaactgctaactcatgcccccatgtctaacaacatggctttctcaacttttaaaggataacagctatccattggtcttaggccccaagaattttggtgcaactccaaataaaagtaataaccatgcacactactataaccaccctaaccctaacttccctaattccccccatccttaccaccctcgttaaccctaacaaaaaaaactcatacccccattatgtaaaatccattgtcgcatccacctttattatcagtctcttccccacaacaatattcatgtgcctagaccaagaagttattatctcgaactgacactgagccacaacccaaacaacccagctctccctaagcttcaaactagactacttctccataatattcatccccgtagcattgttcgttacatggtccatcatagaattctcactgtgatatataaactcagacccaaacattaatcagttcttcaaatatctactcatcttcctaattaccatactaatcttagttaccgctaacaacctattccaactgttcatcggctgagagggcgtaggaattatatccttcttgctcatcagttgatgatacgcccgagcagatgccaacacagcagccattcaagcaatcctatacaaccgtatcggcgatatcggtttcatcctcgccttagcatgatttatcctacactccaactcatgagacccacaacaaatagcccttctaaacgctaatccaagcctcaccccactactaggcctcctcctagcagcagcaggcaaatcagcccaattaggtctccacccctgactcccctcagccatagaaggccccaccccagtctcagccctactccactcaagcactatagttgtagcaggaatcttcttactcatccgcttccaccccctagcagaaaatagcccactaatccaaactctaacactatgcttaggcgctatcaccactctgttcgcagcagtctgcgcccttacacaaaatgacatcaaaaaaatcgtagccttctccacttcaagtcaactaggactcataatagttacaatcggcatcaaccaaccacacctagcattcctgcacatctgtacccacgccttcttcaaagccatactatttatgtgctccgggtccatcatccacaaccttaacaatgaacaagatattcgaaaaataggaggactactcaaaaccatacctctcacttcaacctccctcaccattggcagcctagcattagcaggaatacctttcctcacaggtttctactccaaagaccacatcatcgaaaccgcaaacatatcatacacaaacgcctgagccctatctattactctcatcgctacctccctgacaagcgcctatagcactcgaataattcttctcaccctaacaggtcaacctcgcttccccacccttactaacattaacgaaaataaccccaccctactaaaccccattaaacgcctggcagccggaagcctattcgcaggatttctcattactaacaacatttcccccgcatcccccttccaaacaacaatccccctctacctaaaactcacagccctcgctgtcactttcctaggacttctaacagccctagacctcaactacctaaccaacaaacttaaaataaaatccccactatgcacattttatttctccaacatactcggattctaccctagcatcacacaccgcacaatcccctatctaggccttcttacgagccaaaacctgcccctactcctcctagacctaacctgactagaaaagctattacctaaaacaatttcacagcaccaaatctccacctccatcatcacctcaacccaaaaaggcataattaaactttacttcctctctttcttcttcccactcatcctaaccctactcctaatcacataacctattcccccgagcaatctcaattacaatgtatacaccaacaaacaatgttcaaccagtaactactactaatcaacgcccataatcatacaaagcccccgcaccaataggatcctcccgaatcaaccctgacccctctccttcataaattattcagcttcctacactattaaagtttaccacaaccaccaccccatcatactctttcacccacagcaccaatcctacctccatcgctaaccccactaaaacactcaccaagacctcaacccctgacccccatgcctcaggatactcctcaatagccatcgctgtagtatatccaaagacaaccatcattccccctaaataaattaaaaaaactattaaacccatataacctcccccaaaattcagaataataacacacccgaccacaccgctaacaatcaatactaaacccccataaataggagaaggcttagaagaaaaccccacaaaccccattactaaacccacactcaacagaaacaaagcatacatcattattctcgcacggactacaaccacgaccaatgatatgaaaaaccatcgttgtatttcaactacaagaacaccaatgaccccaatacgcaaaattaaccccctaataaaattaattaaccactcattcatcgacctccccaccccatccaacatctccgcatgatgaaacttcggctcactccttggcgcctgcctgatcctccaaatcaccacaggactattcctagccatgcactactcaccagacgcctcaaccgccttttcatcaatcgcccacatcactcgagacgtaaattatggctgaatcatccgctaccttcacgccaatggcgcctcaatattctttatctgcctcttcctacacatcgggcgaggcctatattacggatcatttctctactcagaaacctgaaacatcggcattatcctcctgcttgcaactatagcaacagccttcataggctatgtcctcccgtgaggccaaatatcattctgaggggccacagtaattacaaacttactatccgccatcccatacattgggacagacctagttcaatgaatctgaggaggctactcagtagacagtcccaccctcacacgattctttacctttcacttcatcttgcccttcattattgcagccctagcagcactccacctcctattcttgcacgaaacgggatcaaacaaccccctaggaatcgcctcccattccgataaaatcaccttccacccttactacacaatcaaagacgccctcggcttacttctcttccttctctccttaatgacattaacactattctcaccagacctcctaggcgacccagacaattataccctagccaaccccttaaacacccctccccacatcaagcccgaatgatatttcctattcgcctacacaattctccgatccgtccctaacaaactaggaggcgtccttgccctattactatccatcctcatcctagcaataatccccatcctccatatatccaaacaacaaagcataatatttcgcccactaagccaatcactttattgactcctagccgcagacctcctcattctaacctgaatcggaggacaaccagtaagctacccttttactatcattggacaagtagcatccgtactatacttcacaacaatcctaatcctaataccaactatctccctaattgaaaacaaaatactcaaatgggcctgtccttgtagtataaactaatacaccagtcttgtaaaccggagatgaaaacctttttccaaggacaaatcagagaaaaagtctttaactccaccattagcacccaaagctaagattctaatttaaactattctctgttctttcatggggaagcagatttgggtaccacccaagtattgactcacccatcaacaaccgctatgtatttcgtacattactgccagccaccatgaatattgtacggtaccataaatacttgaccacctgtagtacataaaaacccaacccacatcaaacccccccccccatgcttacaagcaagtacagcaatcgaccctcaactatcacacatcaactgcaactccaaagccacccctcacccactaggatatcaacaaacctacccacccttaacagtacatagtacataaagccatttaccgtacatagcacattacagtcaaatcccttctcgtccccatggatgacccccctcagataggggtcccttgaccaccatcctccgtgaaatcaatatcccgcacaagagtgctactctcctcgctccgggcccataacacttgggggtagctaaagtgaactgtatccgacatctggttcctacttcagggtcataaagcctaaatagcccacacgttccccttaaataagacatcacgatg

SEQ ID NO: 86 - DNA, 16571 bp, Homo sapiens mitochondrial
  3109: "n" refers to a nucleotide at position 3107 of the Cambridge Reference Sequence (CRS, Anderson et al. 1981 Nature 290:457-465), later determined to be absent from the human mtDNA sequence according to the revised CRS (rCRS, Andrews et al. 1999 Nature Genetics 23:147); "n" therefore represents a single nucleotide deletion at a position corresponding to nucleotide 3107 of SEQ ID NO:1 as provided herein.
gatcacaggtctatcaccctattaaccactcacgggagctctccatgcatttggtattttcgtctggggggtatgcacgcgatagcattgcgagacgctggagccggagcaccctatgtcgcagtatctgtctttgattcctgcctcatcctattatttatcgcacctacgttcaatattacaggcgaacatacttactaaagtgtgttaattaattaatgcttgtaggacataataataacaattgaatgtctgcacagccgctttccacacagacatcataacaaaaaatttccaccaaaccccccctcccccccgcttctggccacagcacttaaacacatctctgccaaaccccaaaaacaaagaaccctaacaccagcctaaccagatttcaaattttatcttttggcggtatgcacttttaacagtcaccccccaactaacacattattttcccctcccactcccatactactaatctcatcaatacaacccccgcccatcctacccagcacacacacaccgctgctaaccccataccccgaaccaaccaaaccccaaagacaccccccacagtttatgtagcttacctcctcaaagcaatacactgaaaatgtttagacgggctcacatcaccccataaacaaataggtttggtcctagcctttctattagctcttagtaagattacacatgcaagcatccccgttccagtgagttcaccctctaaatcaccacgatcaaaagggacaagcatcaagcacgcagcaatgcagctcaaaacgcttagcctagccacacccccacgggaaacagcagtgattaacctttagcaataaacgaaagtttaactaagctatactaaccccagggttggtcaatttcgtgccagccaccgcggtcacacgattaacccaagtcaatagaagccggcgtaaagagtgttttagatcaccccctccccaataaagctaaaactcacctgagttgtaaaaaactccagttgacacaaaatagactacgaaagtggctttaacatatctgaacacacaatagctaagacccaaactgggattagataccccactatgcttagccctaaacctcaacagttaaatcaacaaaactgctcgccagaacactacgagccacagcttaaaactcaaaggacctggcggtgcttcatatccctctagaggagcctgttctgtaatcgataaaccccgatcaacctcaccacctcttgctcagcctatataccgccatcttcagcaaaccctgatgaaggctacaaagtaagcgcaagtacccacgtaaagacgttaggtcaaggtgtagcccatgaggtggcaagaaatgggctacattttctaccccagaaaactacgatagcccttatgaaacttaagggtcgaaggtggatttagcagtaaactgagagtagagtgcttagttgaacagggccctgaagcgcgtacacaccgcccgtcaccctcctcaagtatacttcaaaggacatttaactaaaacccctacgcatttatatagaggagacaagtcgtaacatggtaagtgtactggaaagtgcacttggacgaaccagagtgtagcttaacacaaagcacccaacttacacttaggagatttcaacttaacttgaccgctctgagctaaacctagccccaaacccactccaccttactaccagacaaccttagccaaaccatttacccaaataaagtataggcgatagaaattgaaacctggcgcaatagatatagtaccgcaagggaaagatgaaaaattataaccaagcataatatagcaaggactaacccctataccttctgcataatgaattaactagaaataactttgcaaggagagccaaagctaagacccccgaaaccagacgagctacctaagaacagctaaaagagcacacccgtctatgtagcaaaatagtgggaagatttataggtagaggcgacaaacctaccgagcctggtgatagctggttgtccaagatagaatcttagttcaactttaaatttgcccacagaaccctctaaatccccttgtaaatttaactgttagtccaaagaggaacagctctttggacactaggaaaaaaccttgtagagagagtaaaaaatttaacacccatagtaggcctaaaagcagccaccaattaagaaagcgttcaagctcaacacccactacctaaaaaatcccaaacatataactgaactcctcacacccaattggaccaatctatcaccctatagaagaactaatgttagtataagtaacatgaaaacattctcctccgcataagcctgcgtcagatcaaaacactgaactgacaattaacagcccaatatctacaatcaaccaacaagtcattattaccctcactgtcaacccaacacaggcatgctcataaggaaaggttaaaaaaagtaaaaggaactcggcaaatcttaccccgcctgtttaccaaaaacatcacctctagcatcaccagtattagaggcaccgcctgcccagtgacacatgtttaacggccgcggtaccctaaccgtgcaaaggtagcataatcacttgttccttaaatagggacctgtatgaatggctccacgagggttcagctgtctcttacttttaaccagtgaaattgacctgcccgtgaagaggcgggcataacacagcaagacgagaagaccctatggagctttaatttattaatgcaaacagtacctaacaaacccacaggtcctaaactaccaaacctgcattaaaaatttcggttggggcgacctcggagcagaacccaacctccgagcagtacatgctaagacttcaccagtcaaagcgaactactatactcaattgatccaataacttgaccaacggaacaagttaccctagggataacagcgcaatcctattctagagtccatatcaacaatagggtttacgacctcgatgttggatcaggacatcccaatggtgcagccgctattaaaggttcgtttgttcaacgattaaagtcctacgtgatctgagttcagaccggagtaatccaggtcggtttctatctacnttcaaattcctccctgtacgaaaggacaagagaaataaggcctacttcacaaagcgccttcccccgtaaatgatatcatctcaacttagtattatacccacacccacccaagaacagggtttgttaagatggcagagcccggtaatcgcataaaacttaaaactttacagtcagaggttcaattcctcttcttaacaacatacccatggccaacctcctactcctcattgtacccattctaatcgcaatggcattcctaatgcttaccgaacgaaaaattctaggctatatacaactacgcaaaggccccaacgttgtaggcccctacgggctactacaacccttcgctgacgccataaaactcttcaccaaagagcccctaaaacccgccacatctaccatcaccctctacatcaccgccccgaccttagctctcaccatcgctcttctactatgaacccccctccccatacccaaccccctggtcaacctcaacctaggcctcctatttattctagccacctctagcctagccgtttactcaatcctctgatcagggtgagcatcaaactcaaactacgccctgatcggcgcactgcgagcagtagcccaaacaatctcatatgaagtcaccctagccatcattctactatcaacattactaataagtggctcctttaacctctccacccttatcacaacacaagaacacctctgattactcctgccatcatgacccttggccataatatgatttatctccacactagcagagaccaaccgaacccccttcgaccttgccgaaggggagtccgaactagtctcaggcttcaacatcgaatacgccgcaggccccttcgccctattcttcatagccgaatacacaaacattattataataaacaccctcaccactacaatcttcctaggaacaacatatgacgcactctcccctgaactctacacaacatattttgtcaccaagaccctacttctaacctccctgttcttatgaattcgaacagcatacccccgattccgctacgaccaactcatacacctcctatgaaaaaacttcctaccactcaccctagcattacttatatgatatgtctccatacccattacaatctccagcattccccctcaaacctaagaaatatgtctgataaaagagttactttgatagagtaaataataggagcttaaacccccttatttctaggactatgagaatcgaacccatccctgagaatccaaaattctccgtgccacctatcacaccccatcctaaagtaaggtcagctaaataagctatcgggcccataccccgaaaatgttggttatacccttcccgtactaattaatcccctggcccaacccgtcatctactctaccatctttgcaggcacactcatcacagcgctaagctcgcactgattttttacctgagtaggcctagaaataaacatgctagcttttattccagttctaaccaaaaaaataaaccctcgttccacagaagctgccatcaagtatttcctcacgcaagcaaccgcatccataatccttctaatagctatcctcttcaacaatatactctccggacaatgaaccataaccaatactaccaatcaatactcatcattaataatcataatggctatagcaataaaactaggaatagccccctttcacttctgagtcccagaggttacccaaggcacccctctgacatccggcctgcttcttctcacatgacaaaaactagcccccatctcaatcatataccaaatctctccctcactaaacgtaagccttctcctcactctctcaatcttatccatcatagcaggcagttgaggtggattaaaccaaacccagctacgcaaaatcttagcatactcctcaattacccacataggatgaataatagcagttctaccgtacaaccctaacataaccattcttaatttaactatttatattatcctaactactaccgcattcctactactcaacttaaactccagcaccacgaccctactactatctcgcacctgaaacaagctaacatgactaacacccttaattccatccaccctcctctccctaggaggcctgcccccgctaaccggctttttgcccaaatgggccattatcgaagaattcacaaaaaacaatagcctcatcatccccaccatcatagccaccatcaccctccttaacctctacttctacctacgcctaatctactccacctcaatcacactactccccatatctaacaacgtaaaaataaaatgacagtttgaacatacaaaacccaccccattcctccccacactcatcgcccttaccacgctactcctacctatctccccttttatactaataatcttatagaagtttaggttaaatacagaccaagagccttcaaagccctcagtaagttgcaatacttaatttctgtaacagctaaggactgcaaaaccccactctgcatcaactgaacgcaaatcagccactttaattaagctaagcccttactagaccaatgggacttaaacccacaaacacttagttaacagctaagcaccctaatcaactggcttcaatctacttctcccgccgccgggaaaaaaggcgggagaagccccggcaggtttgaagctgcttcttcgaatttgcaattcaatatgaaaatcacctcggagctggtaaaaagaggcctaacccctgtctttagatttacagtccaatgcttcactcagccattttacctcacccccactgatgttcgccgaccgttgactattctctacaaaccacaaagacattggaacactatacctattattcggcgcatgagctggagtcctaggcacagctctaagcctccttattcgagccgagctgggccagccaggcaaccttctaggtaacgaccacatctacaacgttatcgtcacagcccatgcatttgtaataatcttcttcatagtaatacccatcataatcggaggctttggcaactgactagttcccctaataatcggtgcccccgatatggcgtttccccgcataaacaacataagcttctgactcttacctccctctctcctactcctgctcgcatctgctatagtggaggccggagcaggaacaggttgaacagtctaccctcccttagcagggaactactcccaccctggagcctccgtagacctaaccatcttctccttacacctagcaggtgtctcctctatcttaggggccatcaatttcatcacaacaattatcaatataaaaccccctgccataacccaataccaaacgcccctcttcgtctgatccgtcctaatcacagcagtcctacttctcctatctctcccagtcctagctgctggcatcactatactactaacagaccgcaacctcaacaccaccttcttcgaccccgccggaggaggagaccccattctataccaacacctattctgatttttcggtcaccctgaagtttatattcttatcctaccaggcttcggaataatctcccatattgtaacttactactccggaaaaaaagaaccatttggatacataggtatggtctgagctatgatatcaattggcttcctagggtttatcgtgtgagcacaccatatatttacagtaggaatagacgtagacacacgagcatatttcacctccgctaccataatcatcgctatccccaccggcgtcaaagtatttagctgactcgccacactccacggaagcaatatgaaatgatctgctgcagtgctctgagccctaggattcatctttcttttcaccgtaggtggcctgactggcattgtattagcaaactcatcactagacatcgtactacacgacacgtactacgttgtagcccacttccactatgtcctatcaataggagctgtatttgccatcataggaggcttcattcactgatttcccctattctcaggctacaccctagaccaaacctacgccaaaatccatttcactatcatattcatcggcgtaaatctaactttcttcccacaacactttctcggcctatccggaatgccccgacgttactcggactaccccgatgcatacaccacatgaaacatcctatcatctgtaggctcattcatttctctaacagcagtaatattaataattttcatgatttgagaagccttcgcttcgaagcgaaaagtcctaatagtagaagaaccctccataaacctggagtgactatatggatgccccccaccctaccacacattcgaagaacccgtatacataaaatctagacaaaaaaggaaggaatcgaaccccccaaagctggtttcaagccaaccccatggcctccatgactttttcaaaaaggtattagaaaaaccatttcataactttgtcaaagttaaattataggctaaatcctatatatcttaatggcacatgcagcgcaagtaggtctacaagacgctacttcccctatcatagaagagcttatcacctttcatgatcacgccctcataatcattttccttatctgcttcctagtcctgtatgcccttttcctaacactcacaacaaaactaactaatactaacatctcagacgctcaggaaatagaaaccgtctgaactatcctgcccgccatcatcctagtcctcatcgccctcccatccctacgcatcctttacataacagacgaggtcaacgatccctcccttaccatcaaatcaattggccaccaatggtactgaacctacgagtacaccgactacggcggactaatcttcaactcctacatacttcccccattattcctagaaccaggcgacctgcgactccttgacgttgacaatcgagtagtactcccgattgaagcccccattcgtataataattacatcacaagacgtcttgcactcatgagctgtccccacattaggcttaaaaacagatgcaattcccggacgtctaaaccaaaccactttcaccgctacacggccgggggtatactacggtcaatgctctgaaatctgtggagcaaaccacagtttcatgcccatcgtcctagaattaattcccctaaaaatctttgaaatagggcccgtatttaccctatagcaccccctctaccccctctagagcccactgtaaagctaacttagcattaaccttttaagttaaagattaagagaaccaacacctctttacagtgaaatgccccaactaaatactaccgtatggcccaccataattacccccatactccttacactattcctcatcacccaactaaaaatattaaacacaaactaccacctacctccctcaccaaagcccataaaaataaaaaattataacaaaccctgagaaccaaaatgaacgaaaatctgttcgcttcattcattgcccccacaatcctaggcctacccgccgcagtactgatcattctatttccccctctattgatccccacctccaaatatctcatcaacaaccgactaatcaccacccaacaatgactaatcaaactaacctcaaaacaaatgataaccatacacaacactaaaggacgaacctgatctcttatactagtatccttaatcatttttattgccacaactaacctcctcggactcctgcctcactcatttacaccaaccacccaactatctataaacctagccatggccatccccttatgagcgggcgcagtgattataggctttcgctctaagattaaaaatgccctagcccacttcttaccacaaggcacacctacaccccttatccccatactagttattatcgaaaccatcagcctactcattcaaccaatagccctggccgtacgcctaaccgctaacattactgcaggccacctactcatgcacctaattggaagcgccaccctagcaatatcaaccattaaccttccctctacacttatcatcttcacaattctaattctactgactatcctagaaatcgctgtcgccttaatccaagcctacgttttcacacttctagtaagcctctacctgcacgacaacacataatgacccaccaatcacatgcctatcatatagtaaaacccagcccatgacccctaacaggggccctctcagccctcctaatgacctccggcctagccatgtgatttcacttccactccataacgctcctcatactaggcctactaaccaacacactaaccatataccaatgatggcgcgatgtaacacgagaaagcacataccaaggccaccacacaccacctgtccaaaaaggccttcgatacgggataatcctatttattacctcagaagtttttttcttcgcaggatttttctgagccttttaccactccagcctagcccctaccccccaattaggagggcactggcccccaacaggcatcaccccgctaaatcccctagaagtcccactcctaaacacatccgtattactcgcatcaggagtatcaatcacctgagctcaccatagtctaatagaaaacaaccgaaaccaaataattcaagcactgcttattacaattctactgggtctctattttaccctcctacaagcctcagagtacttcgagtctcccttcaccatttccgacggcatctacggctcaacattttttgtaaccacaggcttccacggacttcacgtcattattggctcaactttcctcactatctgcctcatccgccaactaatatttcactttacatccaaacatcactttggcttcgaagccgccgcctgatactggcattttgtagatgtggtttgactatttctgtatgtctccatctattgatgagggtcttactcttttagtataaatagtaccgttaacttccaattaactagttttgacaacattcaaaaaagagtaataaacttcgccttaattttaataatcaacaccctcctagccttactactaataattattacattttgactaccacaactcaacggctacatagaaaaatccaccccttacgagtgcggcttcgaccctatatcccccgcccgcgtccctttctccataaaattcttcttagtagctattaccttcttattatttgatctagaaattgccctccttttacccctaccatgagccctacaaacaactaacctgccactaatagttatgtcatccctcttattaatcatcatcctagccctaagtctggcctatgagtgactacaaaaaggattagactgaaccgaattggtatatagtttaaacaaaacgaatgatttcgactcattaaattatgataatcatatttaccaaatgcccctcatttacataaatattatactagcatttaccatctcacttctaggaatactagtatatcgctcacacctcatatcctccctactatgcctagaaggaataatactatcgctgttcattatagctactctcataaccctcaacacccactccctcttagccaatattgtgcctattgccatactagtctttgccgcctgcgaagcagcggtgggcctagccctactagtctcaatctccaacacatatggcctagactacgtacataacctaaacctactccaatgctaaaactaatcgtcccaacaattatattactaccactgacatgactttccaaaaaacacataatttgaatcaacacaaccacccacagcctaattattagcatcatccctctactattttttaaccaaatcaacaacaacctatttagctgttccccaaccttttcctccgaccccctaacaacccccctcctaatactaactacctgactcctacccctcacaatcatggcaagccaacgccacttatccagtgaaccactatcacgaaaaaaactctacctctctatactaatctccctacaaatctccttaattataacattcacagccacagaactaatcatattttatatcttcttcgaaaccacacttatccccaccttggctatcatcacccgatgaggcaaccagccagaacgcctgaacgcaggcacatacttcctattctacaccctagtaggctcccttcccctactcatcgcactaatttacactcacaacaccctaggctcactaaacattctactactcactctcactgcccaagaactatcaaactcctgagccaacaacttaatatgactagcttacacaatagcttttatagtaaagatacctctttacggactccacttatgactccctaaagcccatgtcgaagcccccatcgctgggtcaatagtacttgccgcagtactcttaaaactaggcggctatggtataatacgcctcacactcattctcaaccccctgacaaaacacatagcctaccccttccttgtactatccctatgaggcataattataacaagctccatctgcctacgacaaacagacctaaaatcgctcattgcatactcttcaatcagccacatagccctcgtagtaacagccattctcatccaaaccccctgaagcttcaccggcgcagtcattctcataatcgcccacgggcttacatcctcattactattctgcctagcaaactcaaactacgaacgcactcacagtcgcatcataatcctctctcaaggacttcaaactctactcccactaatagctttttgatgacttctagcaagcctcgctaacctcgccttaccccccactattaacctactgggagaactctctgtgctagtaaccacgttctcctgatcaaatatcactctcctacttacaggactcaacatactagtcacagccctatactccctctacatatttaccacaacacaatggggctcactcacccaccacattaacaacataaaaccctcattcacacgagaaaacaccctcatgttcatacacctatcccccattctcctcctatccctcaaccccgacatcattaccgggttttcctcttgtaaatatagtttaaccaaaacatcagattgtgaatctgacaacagaggcttacgaccccttatttaccgagaaagctcacaagaactgctaactcatgcccccatgtctaacaacatggctttctcaacttttaaaggataacagctatccattggtcttaggccccaaaaattttggtgcaactccaaataaaagtaataaccatgcacactactataaccaccctaaccctgacttccctaattccccccatccttaccaccctcgttaaccctaacaaaaaaaactcatacccccattatgtaaaatccattgtcgcatccacctttattatcagtctcttccccacaacaatattcatgtgcctagaccaagaagttattatctcgaactgacactgagccacaacccaaacaacccagctctccctaagcttcaaactagactacttctccataatattcatccctgtagcattgttcgttacatggtccatcatagaattctcactgtgatatataaactcagacccaaacattaatcagttcttcaaatatctactcatcttcctaattaccatactaatcttagttaccgctaacaacctattccaactgttcatcggctgagagggcgtaggaattatatccttcttgctcatcagttgatgatacgcccgagcagatgccaacacagcagccattcaagcaatcctatacaaccgtatcggcgatatcggtttcatcctcgccttagcatgatttatcctacactccaactcatgagacccacaacaaatagcccttctaaacgctaatccaagcctcaccccactactaggcctcctcctagcagcagcaggcaaatcagcccaattaggtctccacccctgactcccctcagccatagaaggccccaccccagtctcagccctactccactcaagcactatagttgtagcaggaatcttcttactcatccgcttccaccccctagcagaaaatagcccactaatccaaactctaacactatgcttaggcgctatcaccactctgttcgcagcagtctgcgcccttacacaaaatgacatcaaaaaaatcgtagccttctccacttcaagtcaactaggactcataatagttacaatcggcatcaaccaaccacacctagcattcctgcacatctgtacccacgccttcttcaaagccatactatttatgtgctccgggtccatcatccacaaccttaacaatgaacaagatattcgaaaaataggaggactactcaaaaccatacctctcacttcaacctccctcaccattggcagcctagcattagcaggaatacctttcctcacaggtttctactccaaagaccacatcatcgaaaccgcaaacatatcatacacaaacgcctgagccctatctattactctcatcgctacctccctgacaagcgcctatagcactcgaataattcttctcaccctaacaggtcaacctcgcttccccacccttactaacattaacgaaaataaccccaccctactaaaccccattaaacgcctggcagccggaagcctattcgcaggatttctcattactaacaacatttcccccgcatcccccttccaaacaacaatccccctctacctaaaactcacagccctcgctgtcactttcctaggacttctaacagccctagacctcaactacctaaccaacaaacttaaaataaaatccccactatgcacattttatttctccaacatactcggattctaccctagcatcacacaccgcacaatcccctatctaggccttcttacgagccaaaacctgcccctactcctcctagacctaacctgactagaaaagctattacctaaaacaatttcacagcaccaaatctccacctccatcatcacctcaacccaaaaaggcataattaaactttacttcctctctttcttcttcccactcatcctaaccctactcctaatcacataacctattcccccgagcaatctcaattacaatatatacaccaacaaacaatgttcaaccagtaactactactaatcaacgcccataatcatacaaagcccccgcaccaataggatcctcccgaatcaaccctgacccctctccttcataaattattcagcttcctacactattaaagtttaccacaaccaccaccccatcatactctttcacccacagcaccaatcctacctccatcgctaaccccactaaaacactcaccaagacctcaacccctgacccccatgcctcaggatactcctcaatagccatcgctgtagtatatccaaagacaaccatcattccccctaaataaattaaaaaaactattaaacccatataacctcccccaaaattcagaataataacacacccgaccacaccgctaacaatcaatactaaacccccataaataggagaaggcttagaagaaaaccccacaaaccccattactaaacccacactcaacagaaacaaagcatacatcattattctcgcacggactacaaccacgaccaatgatatgaaaaaccatcgttgtatttcaactacaagaacaccaatgaccccaatacgcaaaactaaccccctaataaaattaattaaccactcattcatcgacctccccaccccatccaacatctccgcatgatgaaacttcggctcactccttggcgcctgcctgatcctccaaatcaccacaggactattcctagccatgcactactcaccagacgcctcaaccgccttttcatcaatcgcccacatcactcgagacgtaaattatggctgaatcatccgctaccttcacgccaatggcgcctcaatattctttatctgcctcttcctacacatcgggcgaggcctatattacggatcatttctctactcagaaacctgaaacatcggcattatcctcctgcttgcaactatagcaacagccttcataggctatgtcctcccgtgaggccaaatatcattctgaggggccacagtaattacaaacttactatccgccatcccatacattgggacagacctagttcaatgaatctgaggaggctactcagtagacagtcccaccctcacacgattctttacctttcacttcatcttgcccttcattattgcagccctagcagcactccacctcctattcttgcacgaaacgggatcaaacaaccccctaggaatcacctcccattccgataaaatcaccttccacccttactacacaatcaaagacgccctcggcttacttctcttccttctctccttaatgacattaacactattctcaccagacctcctaggcgacccagacaattataccctagccaaccccttaaacacccctccccacatcaagcccgaatgatatttcctattcgcctacacaattctccgatccgtccctaacaaactaggaggcgtccttgccctattactatccatcctcatcctagcaataatccccatcctccatatatccaaacaacaaagcataatatttcgcccactaagccaatcactttattgactcctagccgcagacctcctcattctaacctgaatcggaggacaaccagtaagctacccttttaccatcattggacaagtagcatccgtactatacttcacaacaatcctaatcctaataccaactatctccctaattgaaaacaaaatactcaaatgggcctgtccttgtagtataaactaatacaccagtcttgtaaaccggagatgaaaacctttttccaaggacaaatcagagaaaaagtctttaactccaccattagcacccaaagctaagattctaatttaaactattctctgttctttcatggggaagcagatttgggtaccacccaagtattgactcacccatcaacaaccgctatgtatttcgtacattactgccagccaccatgaatattgtacggtaccataaatacttgaccacctgtagtacataaaaacccaatccacatcaaaaccccctccccatgcttacaagcaagtacagcaatcaaccctcaactatcacacattaactgcaactccaaagccacccctcacccactaggataccaacaaacctacccacccttaacagtacatagtacataaagccatttaccgtacatagcacattacagtcaaatcccttctcgtccccatggatgacccccctcagataggggtcccttgaccaccatcctccgtgaaatcaatatcccgcacaagagtgctactctcctcgctccgggcccataacacttgggggtagctaaagtgaactgtatccgacatctggttcctacttcagggccataaagcctaaatagcccacacgttccccttaaataagacatcacgatg

SEQ ID NO: 87 - DNA, 16569 bp, Homo sapiens mitochondrial
  3107: "n" refers to a nucleotide at position 3107 of the Cambridge Reference Sequence (CRS, Anderson et al. 1981 Nature 290:457-465), later determined to be absent from the human mtDNA sequence according to the revised CRS (rCRS, Andrews et al. 1999 Nature Genetics 23:147); "n" therefore represents a single nucleotide deletion at a position corresponding to nucleotide 3107 of SEQ ID NO:1 as provided herein.
gatcacaggtctatcaccctattaaccactcacgggagctctccatgcatttggtattttcgtctggggggtgtgcacgcgatagcattgcgagacgctggagccggagcaccctatgtcgcagtatctgtctttgattcctgcctcatcctattatttatcgcacctacgttcaatattacaggcgaacatacttactaaagtgtgttaattaattaatgcttgtaggacataataataacaattgaatgtctgcacagccgctttccacacagacatcataacaaaaaatttccaccaaaccccccctcccccccgcttctggccacagcacttaaacacatctctgccaaaccccaaaaacaaagaaccctaacaccagcctaaccagatttcaaattttatcttttggcggtatgcacttttaacagtcaccccccaactaacacattattttcccctcccactcccatactactaatctcatcaatacaacccccggccatcctacccagcacacacaccgctgctaaccccataccccgaaccaaccaaaccccaaagacaccccccacagtttatgtagcttacctcctcaaagcaatacactgaaaatgtttagacgggctcacatcaccccataaacaaataggtttggtcctagcctttctattagctcttagtaagattacacatgcaagcatccccattccagtgagttcaccctctaaatcaccacgatcaaaagggacaagcatcaagcacgcagcaatgcagctcaaaacgcttagcctagccacacccccacgggaaacagcagtgattaacctttagcaataaacgaaagtttaactaagctatactaaccccagggttggtcaatttcgtgccagccaccgcggtcacacgattaacccaagtcaatagaagccggcgtaaagagtgttttagatcaccccctccccaataaagctaaaactcacctgagttgtaaaaaactccagttgacacaaaatagactacgaaagtggctttaacatatctgaacacacaatagctaagacccaaactgggattagataccccactatgcttagccctaaacctcaacagttaaatcaacaaaactgctcgccagaacactacgagccacagcttaaaactcaaaggacctggcggtgcttcatatccctctagaggagcctgttctgtaatcgataaaccccgatcaacctcaccacctcttgctcagcctatataccgccatcttcagcaaaccctgatgaaggctacaaagtaagcgcaagtacccacgtaaagacgttaggtcaaggtgtagcccatgaggtggcaagaaatgggctacattttctaccccagaaaactacgatagcccttatgaaacttaagggtcgaaggtggatttagcagtaaactgagagtagagtgcttagttgaacagggccctgaagcgcgtacacaccgcccgtcaccctcctcaagtatacttcaaaggacatttaactaaaacccctacgcatttatatagaggagacaagtcgtaacatggtaagtgtactggaaagtgcacttggacgaaccagagtgtagcttaacacaaagcacccaacttacacttaggagatttcaacttaacttgaccgctctgagctaaacctagccccaaacccactccaccttactaccagacaaccttagccaaaccatttacccaaataaagtataggcgatagaaattgaaacctggcgcaatagatatagtaccgcaagggaaagatgaaaaattataaccaagcataatatagcaaggactaacccctataccttctgcataatgaattaactagaaataactttgcaaggagagccaaagctaagacccccgaaaccagacgagctacctaagaacagctaaaagagcacacccgtctatgtagcaaaatagtgggaagatttataggtagaggcgacaaacctaccgagcctggtgatagctggttgtccaagatagaatcttagttcaactttaaatttgcccacagaaccctctaaatccccttgtaaatttaactgttagtccaaagaggaacagctctttggacactaggaaaaaaccttgtagagagagtaaaaaatttaacacccatagtaggcctaaaagcagccaccaattaagaaagcgttcaagctcaacacccactacctaaaaaatcccaaacatataactgaactcctcacacccaattggaccaatctatcaccctatagaagaactaatgttagtataagtaacatgaaaacattctcctccgcataagcctgcgtcagattaaaacactgaactgacaattaacagcccaatatctacaatcaaccaacaagtcattattaccctcactgtcaacccaacacaggcatgctcataaggaaaggttaaaaaaagtaaaaggaactcggcaaatcttaccccgcctgtttaccaaaaacatcacctctagcatcaccagtattagaggcaccgcctgcccagtgacacatgtttaacggccgcggtaccctaaccgtgcaaaggtagcataatcacttgttccttaaatagggacctgtatgaatggctccacgagggttcagctgtctcttacttttaaccagtgaaattgacctgcccgtgaagaggcgggcataacacagcaagacgagaagaccctatggagctttaatttattaatgcaaacagtacctaacaaacccacaggtcctaaactaccaaacctgcattaaaaatttcggttggggcgacctcggagcagaacccaacctccgagcagtacatgctaagacttcaccagtcaaagcgaactactatactcaattgatccaataacttgaccaacggaacaagttaccctagggataacagcgcaatcctattctagagtccatatcaacaatagggtttacgacctcgatgttggatcaggacatcccgatggtgcagccgctattaaaggttcgtttgttcaacgattaaagtcctacgtgatctgagttcagaccggagtaatccaggtcggtttctatctacnttcaaattcctccctgtacgaaaggacaagagaaataaggcctacttcacaaagcgccttcccccgtaaatgatatcatctcaacttagtattatacccacacccacccaagaacagggtttgttaagatggcagagcccggtaatcgcataaaacttaaaactttacagtcagaggttcaattcctcttcttaacaacatacccatggccaacctcctactcctcattgtacccattctaatcgcaatggcattcctaatgcttaccgaacgaaaaattctaggctatatacaactacgcaaaggccccaacgttgtaggcccctacgggctactacaacccttcgctgacgccataaaactcttcaccaaagagcccctaaaacccgccacatctaccatcaccctctacatcaccgccccgaccttagctctcaccatcgctcttctactatgaacccccctccccatacccaaccccctggtcaacctcaacctaggcctcctatttattctagccacctctagcctagccgtttactcaatcctctgatcagggtgagcatcaaactcaaactacgccctgatcggcgcactgcgagcagtagcccaaacaatctcatatgaagtcaccctagccatcattctactatcaacattactaataagtggctcctttaacctctccacccttatcacaacacaagaacacctctgattactcctgccatcatgacccttggccataatatgatttatctccacactagcagagaccaaccgaacccccttcgaccttgccgaaggggagtccgaactagtctcaggcttcaacatcgaatacgccgcaggccccttcgccctattcttcatagccgaatacataaacattattataataaacaccctcaccactgcaatcttcctaggaacaacatatgacgcactctcccctgaactctacacaacatattttgtcaccaagaccctacttctaacctccctgttcttatgaattcgaacagcatacccccgattccgctacgaccaactcatacacctcctatgaaaaaacttcctaccactcaccctagcattacttatatgatatgtctccatacccattacaatctccagcattccccctcaaacctaagaaatatgtctgataaaagagttactttgatagagtaaataataggagcttaaacccccttatttctaggactatgagaatcgaacccatccctgagaatccaaaattctccgtgccacctatcacaccccatcctaaagtaaggtcagctaaataagctatcgggcccataccccgaaaatgttggttatacccttcccgtactaattaatcccctggcccaacccgtcatctactctaccatctttgcaggcacactcatcacagcgctaagctcgcactgattttttacctgagtaggcctagaaataaacatgctagcttttattccagttctaaccaaaaaaataaaccctcgttccacagaagctgccatcaagtatttcctcacgcaagcaaccgcatccataatccttctaatagctatcctcttcaacaatatactctccggacaatgaaccataaccaatactaccaatcaatactcatcattaataatcataatggctatagcaataaaactaggaatagccccctttcacttctgagtcccagaggttacccaaggcacccctctgacatccggcctgcttcttctcacatgacaaaaactagcccccatctcaatcatataccaaatctctccctcactaaacgtaagccttctcctcactctctcaatcttatccatcatagcaggcagttgaggtggattaaaccaaacccagctacgcaaaatcctagcatactcctcaattacccacataggatgaataatagcagttctaccgtacaaccctaacataaccattcttaatttaactatttatattatcctaactactaccgcattcctactactcaacttaaactccagcaccacgaccctactactatctcgcacctgaaacaagctaacatgactaacacccttaattccatccaccctcctctccctaggaggcctgcccccgctaaccggctttttgcccaaatgggccattatcgaagaattcacaaaaaacaatagcctcatcatccccaccatcatagccaccatcaccctccttaacctctacttctacctacgcctaatctactccacctcaatcacactactccccatatctaacaacgtaaaaataaaatgacagtttgaacatacaaaacccaccccattcctccccacactcatcgcccttaccacgctactcctacctatctccccttttatactaataatcttatagaaatttaggttaaatacagaccaagagccttcaaagccctcagtaagttgcaatacttaatttctgtaacagctaaggactgcaaaaccccactctgcatcaactgaacgcaaatcagccactttaattaagctaagcccttactagaccaatgggacttaaacccacaaacacttagttaacagctaagcaccctaatcaactggcttcaatctacttctcccgccgccgggaaaaaaggcgggagaagccccggcaggtttgaagctgcttcttcgaatttgcaattcaatatgaaaatcacctcggagctggtaaaaagaggcctaacccctgtctttagatttacagtccaatgcttcactcagccattttacctcacccccactgatgttcgccgaccgttgactattctctacaaaccacaaagacattggaacactatacctattattcggcgcatgagctggagtcctaggcacagctctaagcctccttattcgagccgagctgggccagccaggcaaccttctaggtaacgaccacatctacaacgttatcgtcacagcccatgcatttgtaataatcttcttcatagtaatacccatcataatcggaggctttggcaactgactagttcccctaataatcggtgcccccgatatggcgtttccccgcataaacaacataagcttctgactcttacctccctctctcctactcctgctcgcatctgctatagtggaggccggagcaggaacaggttgaacagtctaccctcccttagcagggaactactcccaccctggagcctccgtagacctaaccatcttctccttacacctagcaggtgtctcctctatcttaggggccatcaatttcatcacaacaattatcaatataaaaccccctgccataacccaataccaaacgcccctcttcgtctgatccgtcctaatcacagcagtcctacttctcctatctctcccagtcctagctgctggcatcactatactactaacagaccgcaacctcaacaccaccttcttcgaccccgccggaggaggagaccccattctataccaacacctattctgatttttcggtcaccctgaagtttatattcttatcctaccaggcttcggaataatctcccatattgtaacttactactccggaaaaaaagaaccatttggatacataggtatggtctgagctatgatatcaattggcttcctagggtttatcgtgtgagcacaccatatatttacagtaggaatagacgtagacacacgagcatatttcacctccgctaccataatcatcgctatccccaccggcgtcaaagtatttagctgactcgccacactccacggaagcaatatgaaatgatctgctgcagtgctctgagccctaggattcatctttcttttcaccgtaggtggcctgactggcattgtattagcaaactcatcactagacatcgtactacacgacacgtactacgttgtagcccacttccactatgtcctatcaataggagctgtatttgccatcataggaggcttcattcactgatttcccctattctcaggctacaccctagaccaaacctacgccaaaatccatttcactatcatattcatcggcgtaaatctaactttcttcccacaacactttctcggcctatccggaatgccccgacgttactcggactaccccgatgcatacaccacatgaaacatcctatcatctgtaggctcattcatttctctaacagcagtaatattaataattttcatgatttgagaagccttcgcttcgaagcgaaaagtcctaatagtagaagaaccctccataaacctggagtgactatatggatgccccccaccctaccacacattcgaagaacccgtatacataaaatctagacaaaaaaggaaggaatcgaaccccccaaagctggtttcaagccaaccccatggcctccatgactttttcaaaaaggtattagaaaaaccatttcataactttgtcaaagttaaattataggctaaatcctatatatcttaatggcacatgcagcgcaagtaggtctacaagacgctacttcccctatcatagaagagcttatcacctttcatgatcacgccctcataatcattttccttatctgcttcctagtcctgtatgcccttttcctaacactcacaacaaaactaactaatactaacatctcagacgctcaggaaatagaaaccgtctgaactatcctgcccgccatcatcctagtcctcatcgccctcccatccctacgcatcctttacataacagacgaggtcaacgatccctcccttaccatcaaatcaattggccaccaatggtactgaacctacgagtacaccgactacggcggactaatcttcaactcctacatacttcccccattattcctagaaccaggcgacctgcgactccttgacgttgacaatcgagtagtactcccgattgaagcccccattcgtataataattacatcacaagacgtcttgcactcatgagctgtccccacattaggcttaaaaacagatgcaattcccggacgtctaaaccaaaccactttcaccgctacacgaccgggggtatactacggtcaatgctctgaaatctgtggagcaaaccacagtttcatgcccatcgtcctagaattaattcccctaaaaatctttgaaatagggcccgtatttaccctataacaccccctctaccccctctagagcccactgtaaagctaacttagcattaaccttttaagttaaagattaagagaaccaacacctctttacagtgaaatgccccaactaaatactaccgtatggcccaccataattacccccatactccttacactattcctcatcacccaactaaaaatattaaacacaaactaccacctacctccctcaccaaagcccataaaaataaaaaattataacaaaccctgagaaccaaaatgaacgaaaatctgttcgcttcattcattgcccccacaatcctaggcctacccgccgcagtactgatcattctatttccccctctattgatccccacctccaaatatctcatcaacaaccgactaatcaccacccaacaatgactaatcaaactaacctcaaaacaaatgataaccatacacaacactaaaggacgaacctgatctcttatactagtatccttaatcatttttattgccacaactaacctcctcggactcctgcctcactcatttacaccaaccacccaactatctataaacctagccatggccatccccttatgagcgggcgcagtgattataggctttcgctctaagattaaaaatgccctagcccacttcttaccacaaggcacacctacaccccttatccccatactagttattatcgaaaccatcagcctactcattcaaccaatagccctggccgtacgcctaaccgctaacattactgcaggccacctactcatgcacctaattggaagcgccaccctagcaatatcaaccattaaccttccctctacacttatcatcttcacaattctaattctactaactatcctagaaatcgctgtcgccttaatccaagcctacgttttcacacttctagtaagcctctacctgcacgacaacacataatgacccaccaatcacatgcctatcatatagtaaaacccagcccatgacccctaacaggggccctctcagccctcctaatgacctccggcctagccatgtgatttcacttccactccataacgctcctcatactaggcctactaaccaacacactaaccatataccaatgatggcgcgatgtaacacgagaaagcacataccaaggccaccacacaccacctgtccaaaaaggccttcgatacgggataatcctatttattacctcagaagtttttttcttcgcaggatttttctgagccttttaccactccagcctagcccctaccccccaattaggagggcactggcccccaacaggcatcaccccgctaaatcccctagaagtcccactcctaaacacatccgtattactcgcatcaggagtatcaatcacctgagctcaccatagtctaatagaaaacaaccgaaaccaaataattcaagcactgcttattacaattttactgggtctctattttaccctcctacaagcctcagagtacttcgagtctcccttcaccatttccgacggcatctacggctcaacattttttgtagccacaggcttccacggacttcacgtcattattggctcaactttcctcactatctgcttcatccgccaactaatatttcactttacatccaaacatcactttggcttcgaagccgccgcctgatactggcattttgtagatgtggtttgactatttctgtatgtctccatctattgatgagggtcttactcttttagtataaatagtaccgttaacttccaattaactagttttgacaacgttcaaaaaagagtaataaacttcgccttaattttaataatcaacaccctcctagccttactactaataattattacattttgactaccacaactcaacggctacatagaaaaatccaccccttacgagtgcggcttcgaccctatatcccccgcccgcgtccctttctccataaaattcttcttagtagctattaccttcttattatttgatctagaaattgccctccttttacccctaccatgagccctacaaacaactaacctgccactaatagttatgtcatccctcttattaatcatcatcctagccctaagtctggcctatgagtgactacaaaaaggattagactgaaccgaattggtatatagtttaaacaaaacgaatgatttcgactcattaaattatgataatcatatttaccaaatgcccctcatttacataaatattatactagcatttaccatctcacttctaggaatactagtatatcgctcacacctcatatcctccctactatgcctagaaggaataatactatcgctgttcattatagctactctcataaccctcaacacccactccctcttagccaatattgtgcctattgccatactagtctttgccgcctgcgaagcagcggtgggcctagccctactagtctcaatctccaacacatatggcctagactacgtacataacctaaacctactccaatgctaaaactaatcgtcccaacaattatattactaccactgacatgactttccaaaaaacacataatttgaatcaacacaaccacccacagcctaattattagcatcatccctctactattttttaaccaaatcaacaacaacctatttagctgttccccaaccttttcctccgaccccctaacaacccccctcctaatactaactacctgactcctacccctcacaatcatggcaagccaacgccacttatccagtgaaccactatcacgaaaaaaactctacctctctatactaatctccctacaaatctccttaattataacattcacagccacagaactaatcatattttatatcttcttcgaaaccacacttatccccaccttggctatcatcacccgatgaggcaaccagccagaacgcctgaacgcaggcacatacttcctattctacaccctagtaggctcccttcccctactcatcgcactaatttacactcacaacaccctaggctcactaaacattctactactcactctcactgcccaagaactatcaaactcctgagccaacaacttaatatgactagcttacacaatagcttttatagtaaagatacctctttacggactccacttatgactccctaaagcccatgtcgaagcccccatcgctgggtcaatagtacttgccgcagtactcttaaaactaggcggctatggtataatacgcctcacactcattctcaaccccctgacaaaacacatagcctaccccttccttgtactatccctatgaggcataattataacaagctccatctgcctacgacaaacagacctaaaatcgctcattgcatactcttcaatcagccacatagccctcgtagtaacagccattctcatccaaaccccctgaagcttcaccggcgcagtcattctcataatcgcccacgggcttacatcctcattactattctgcctagcaaactcaaactacgaacgcactcacagtcgcatcataatcctctctcaaggacttcaaactctactcccactaatagctttttgatgacttctagcaagcctcgctaacctcgccttaccccccactattaacctactgggagaactctctgtgctagtaaccacgttctcctgatcaaatatcactctcctacttacaggactcaacatactagtcacagccctatactccctctacatatttaccacaacacaatggggctcactcacccaccacattaacaacataaaaccctcattcacacgagaaaacaccctcatgttcatacacctatcccccattctcctcctatccctcaaccccgacatcattaccgggttttcctcttgtaaatatagtttaaccaaaacatcagattgtgaatctgacaacagaggcttacgaccccttatttaccgagaaagctcacaagaactgctaactcatgcccccatgtctaacaacatggctttctcaacttttaaaggataacagctatccattggtcttaggccccaaaaattttggtgcaactccaaataaaagtaataaccatgcacactactataaccaccctaaccctgacttccctaattccccccatccttaccaccctcgttaaccctaacaaaaaaaactcatacccccattatgtaaaatccattgtcgcatccacctttattatcagtctcttccccacaacaatattcatgtgcctagaccaagaagttattatctcgaactgacactgagccacaacccaaacaacccagctctccctaagcttcaaactagactacttctccataatattcatccctgtagcattgttcgttacatggtccatcatagaattctcactgtgatatataaactcagacccaaacattaatcagttcttcaaatatctactcatcttcctaattaccatactaatcttagttaccgctaacaacctattccaactgttcatcggctgagagggcgtaggaattatatccttcttgctcatcagttgatgatacgcccgagcagatgccaacacagcagccattcaagcaatcctatacaaccgtatcggcgatatcggtttcatcctcgccttagcatgatttatcctacactccaactcatgagacccacaacaaatagcccttctaaacgctaatccaagcctcaccccactactaggcctcctcctagcagcagcaggcaaatcagcccaattaggtctccacccctgactcccctcagccatagaaggccccaccccagtctcagccctactccactcaagcactatagttgtagcaggaatcttcttactcatccgcttccaccccctagcagaaaatagcccactaatccaaactctaacactatgcttaggcgctatcaccactctgttcgcagcagtctgcgcccttacacaaaatgacatcaaaaaaatcgtagccttctccacttcaagtcaactaggactcataatagttacaatcggcatcaaccaaccacacctagcattcctgcacatctgtacccacgccttcttcaaagccatactatttatgtgctccgggtccatcatccacaaccttaacaatgaacaagatattcgaaaaataggaggactactcaaaaccatacctctcacttcaacctccctcaccattggcagcctagcattagcaggaatacctttcctcacaggtttctactccaaagaccacatcatcgaaaccgcaaacatatcatacacaaacgcctgagccctatctattactctcatcgctacctccctgacaagcgcctatagcactcgaataattcttctcaccctaacaggtcaacctcgcttccccacccttactaacattaacgaaaataaccccaccctactaaaccccattaaacgcctggcagccggaagcctattcgcaggatttctcattactaacaacatttcccccgcatcccccttccaaacaacaatccccctctacctaaaactcacagccctcgctgtcactttcctaggacttctaacagccctagacctcaactacctaaccaacaaacttaaaataaaatccccactatgcacattttatttctccaacatactcggattctaccctagcatcacacaccgcacaatcccctatctaggccttcttacgagccaaaacctgcccctactcctcctagacctaacctgactagaaaagctattacctaaaacaatttcacagcaccaaatctccacctccatcatcacctcaacccaaaaaggcataattaaactttacttcctctctttcttcttcccactcatcctaaccctactcctaatcacataacctattcccccgagcaatctcaattacaatatatacaccaacaaacaatgttcaaccagtaactactactaatcaacgcccataatcatacaaagcccccgcaccaataggatcctcccgaatcaaccctgacccctctccttcataaattattcagcttcctacactattaaagtttaccacaaccaccaccccatcatactctttcacccacagtaccaatcctacctccatcgctaaccccactaaaacactcaccaagacctcaacccctgacccccatgcctcaggatactcctcaatagccatcgctgtagtatatccaaagacaaccatcattccccctaaataaattaaaaaaactattaaacccatataacctcccccaaaattcagaataataacacacccgaccacaccgctaacaatcaatgctaaacccccataaataggagaaggcttagaagaaaaccccacaaaccccattactaaacccacactcaacagaaacaaagcatacatcattattctcgcacggactacaaccacgaccaatgatatgaaaaaccatcgttgtatttcaactacaagaacaccaatgaccccaatacgcaaaactaaccccctaataaaattaattaaccactcattcatcgacctccccaccccatccaacatctccgcatgatgaaacttcggctcactccttggcgcctgcctgatcctccaaatcaccacaggactattcctagccatgcactactcaccagacgcctcaaccgccttttcatcaatcgcccacatcactcgagacgtaaattatggctgaatcatccgctaccttcacgccaatggcgcctcaatattctttatctgcctcttcctacacatcgggcgaggcctatattacggatcatttctctactcagaaacctgaaacatcggcattatcctcctgcttgcaactatagcaacagccttcataggctatgtcctcccgtgaggccaaatatcattctgaggggccacagtaattacaaacttactatccgccatcccatacattgggacagacctagttcaatgaatctgaggaggctactcagtagacagtcccaccctcacacgattctttacctttcacttcatcttgcccttcattattgcagccctagcagcactccacctcctattcttgcacgaaacgggatcaaacaaccccctaggaatcacctcccattccgataaaatcaccttccacccttactacacaatcaaagacgccctcggcttacttctcttccttctctccttaatgacattaacactattctcaccagacctcctaggcgacccagacaattataccctagccaaccccttaaacacccctccccacatcaagcccgaatgatatttcctattcgcctacacaattctccgatccgtccctaacaaactaggaggcgtccttgccctattactatccatcctcatcctagcaataatccccatcctccatatatccaaacaacaaagcataatatttcgcccactaagccaatcactttattgactcctagccgcagacctcctcattctaacctgaatcggaggacaaccagtaagctacccttttaccatcattggacaagtagcgtccgtactatacttcacaacaatcctaatcctaataccaactatctccctaattgaaaacaaaatactcaaatgggcctgtccttgtagtataaactaatacaccagtcttgtaaaccggagatgaaaacctttttccaaggacaaatcagagaaaaagtctttaactccaccattagcacccaaagctaagattctaatttaaactattctctgttctttcatggggaagcagatttgggtaccacccaagtattgactcacccatcaacaaccgctatgtatttcgtacattactgccagccaccatgaatattgtacagtaccataaatacttgaccacctgtagtacataaaaacccaatccacatcaaaaccccctccccatgcttacaagcaagtacagcaatcaaccctcaactatcacacatcaactgcaactccaaagccacccctcacccactaggataccaacaaacctacccacccttaacagtacatagtacataaagccatttaccgtacatagcacattacagtcaaatcccttctcgtccccatggatgacccccctcagataggggtcccttgaccaccatcctccgtgaaatcaatatcccgcacaagagtgctactctcctcgctccgggcccataacacttgggggtagctaaagtgaactgtatccgacatctggttcctacttcagggtcataaagcctaaatagcccacacgttccccttaaataagacatcacgatg

SEQ ID NO: 88 - DNA, 16571 bp, Homo sapiens mitochondrial
  3109: "n" refers to a nucleotide at position 3107 of the Cambridge Reference Sequence (CRS, Anderson et al. 1981 Nature 290:457-465), later determined to be absent from the human mtDNA sequence according to the revised CRS (rCRS, Andrews et al. 1999 Nature Genetics 23:147); "n" therefore represents a single nucleotide deletion at a position corresponding to nucleotide 3107 of SEQ ID NO:1 as provided herein.
gatcacaggtctatcaccctattaaccactcacgggagctctccatgcatttggtattttcgtctggggggtgtgcacgcgatagcattgcgagacgctggagccggagcaccctatgtcgcagtatctgtctttgattcctgccccatcccattatttatcgcacctacgttcaatattacaggcgaacatacttactaaagtgtgttaattaattaatgcttgtaggacataataataacaattgaatgtctgcacagccgctttccacacagacatcataacaaaaaatttccaccaaaccccccctcccccccgcttctggccacagcacttaaacacatctctgccaaaccccaaaaacaaagaaccctaacaccagcctaaccagatttcaaattttatcttttggcggtatgcacttttaacagtcaccccccaactaacacattattttcccctcccactcccatactactaatctcatcaatacaacccccgcccatcctacccagcacacacacaccggtgctaaccccataccccgaaccaaccaaaccccaaagacaccccccacagtttatgtagcttacctcctcaaagcaatacactgaaaatgtttagacgggctcacatcaccccataaacaaataggtttggtcctagcctttctattagctcttagtaagattacacatgcaagcatccccattccagtgagttcaccctctaaatcaccacgatcaaaagggacaagcatcaagcacgcagcaatgcagctcaaaacgcttagcctagccacacccccacgggaaacagcagtgattaacctttagcaataaacgaaagtttaactaagctatactaaccccagggttggtcaatttcgtgccagccaccgcggtcacacgattaacccaagtcaatagaagccggcgtaaagagtgttttagatcaccccctccccaataaagctaaaactcacctgagttgtaaaaaactccagttgacacaaaatagactacgaaagtggctttaacatatctgaacacacaatagctaagacccaaactgggattagataccccactatgcttagccctaaacctcaacagttaaatcaacaaaactgctcgccagaacactacgagccacagcttaaaactcaaaggacctggcggtgcttcatatccctctagaggagcctgttctgtaatcgataaaccccgatcaacctcaccacctcttgctcagcctatataccgccatcttcagcaaaccctgatgaaggctacaaagtaagcgcaagtacccacgtaaagacgttaggtcaaggtgtagcccatgaggtggcaagaaatgggctacattttctaccccagaaaactacgatagcccttatgaaacttaagggtcgaaggtggatttagcagtaaactgagagtagagtgcttagttgaacagggccctgaagcgcgtacacaccgcccgtcaccctcctcaagtatacttcaaaggacatttaactaaaacccctacgcatttatatagaggagacaagtcgtaacatggtaagtgtactggaaagtgcacttggacgaaccagagtgtagcttaacacaaagcacccaacttacacttaggagatttcaacttaacttgaccgctctgagctaaacctagccccaaacccactccaccttactaccagacaaccttagccaaaccatttacccaaataaagtataggcgatagaaattgaaacctggcgcaatagatatagtaccgcaagggaaagatgaaaaattataaccaagcataatatagcaaggactaacccctataccttctgcataatgaattaactagaaataactttgcaaggagaaccaaagctaagacccccgaaaccagacgagctacctaagaacagctaaaagagcacacccgtctatgtagcaaaatagtgggaagatttataggtagaggcgacaaacctaccgagcctggtgatagctggttgtccaagatagaatcttagttcaactttaaatttgcccacagaaccctctaaatccccttgtaaatttaactgttagtccaaagaggaacagctctttggacactaggaaaaaaccttgtagagagagtaaaaaatttaacacccatagtaggcctaaaagcagccaccaattaagaaagcgttcaagctcaacacccactacctaaaaaatcccaaacatataactgaactcctcacacccaattggaccaatctatcaccctatagaagaactaatgttagtataagtaacatgaaaacattctcctccgcataagcctgcgtcagattaaaacactgaactgacaattaacagcccaatatctacaatcaaccaacaagtcattattaccctcactgtcaacccaacacaggcatgctcataaggaaaggttaaaaaaagtaaaaggaactcggcaaatcttaccccgcctgtttaccaaaaacatcacctctagcatcaccagtattagaggcaccgcctgcccagtgacacatgtttaacggccgcggtaccctaaccgtgcaaaggtagcataatcacttgttccttaaatagggacctgtatgaatggctccacgagggttcagctgtctcttacttttaaccagtgaaattgacctgcccgtgaagaggcgggcatgacacagcaagacgagaagaccctatggagctttaatttattaatgcaaacagtacctaacaaacccacaggtcctaaactaccaaacctgcattaaaaatttcggttggggcgacctcggagcagaacccaacctccgagcagtacatgctaagacttcaccagtcaaagcgaactactatactcaattgatccaataacttgaccaacggaacaagttaccctagggataacagcgcaatcctattctagagtccatatcaacaatagggtttacgacctcgatgttggatcaggacatcccgatggtgcagccgctattaaaggttcgtttgttcaacgattaaagtcctacgtgatctgagttcagaccggagtaatccaggtcggtttctatctacnttcaaattcctccctgtacgaaaggacaagagaaataaggcctacttcacaaagcgccttcccccgtaaatgatatcatctcaacttagtattatacccacacccacccaagaacagggtttgttaagatggcagagcccggtaatcgcataaaacttaaaactttacagtcagaggttcaattcctcttcttaacaacatacccatggccaacctcctactcctcattgtacccattctaatcgcaatggcattcctaatgcttaccgaacgaaaaattctaggctatatacaactacgcaaaggccccaacgttgtaggcccctacgggctactacaacccttcgctgacgccataaaactcttcaccaaagagcccctaaaacccgccacatctaccatcaccctctacatcaccgccccgaccttagctctcaccatcgctcttctactatgaacccccctccccatacccaaccccctggtcaacctcaacctaggcctcctatttattctagccacctctagcctagccgtttactcaatcctctgatcagggtgagcatcaaactcaaactacgccctgatcggcgcactgcgagcagtagcccaaacaatctcatatgaagtcaccctagccatcattctactatcaacattactaataagtggctcctttaacctctccacccttatcacaacacaagaacacctctgattactcctgccatcatgacccttggccataatatgatttatctccacactagcagagaccaaccgaacccccttcgaccttgccgaaggggagtccgaactagtctcaggcttcaacatcgaatacgccgcaggccccttcgccctattcttcatagccgaatacacaaacattattataataaacaccctcaccactacaatcttcctaggaacaacatatgacgcactctcccctgaactctacacaacatattttgtcaccaagaccctacttctaacctccctgttcttatgaattcgaacagcatacccccgattccgctacgaccaactcatacacctcctatgaaaaaacttcctaccactcaccctagcattacttatatgacatgtctccatacccattacaatctccagcattccccctcaaacctaagaaatatgtctgataaaagagttactttgatagagtaaataataggagcttaaacccccttatttctaggactatgagaatcgaacccatccctgagaatccaaaattctccgtgccacctatcacaccccatcctaaagtaaggtcagctaaataagctatcgggcccataccccgaaaatgttggttatacccttcccgtactaattaatcccctggcccaacccgtcatctactctaccatctttgcaggcacactcatcacagcgctaagctcgcactgattttttacctgagtaggcctagaaataaacatgctagcttttattccagttctaaccaaaaaaataaaccctcgttccacagaagctgccatcaagtatttcctcacgcaagcaaccgcatccataatccttctaatagctatcctcttcaacaatatactctccggacaatgaaccataaccaatactaccaatcaatactcatcattaataatcataatggctatagcaataaaactaggaatagccccctttcacttctgagtcccagaggttacccaaggcacccctctgacatccggcctgcttcttctcacatgacaaaaactagcccccatctcaatcatataccaaatctctccctcactagacgtaagccttctcctcactctctcaatcttatccatcatagcaggcagttgaggtggattaaaccaaacccagctacgcaaaatcttagcatactcctcaattacccacataggatgaataatagcagttctaccgtacaaccctaacataaccattcttaatttaactatttatattatcctaactactaccgcattcctactactcaacttaaactccagcaccacgaccctactactatctcgcacctgaaacaagctaacatgactaacacccttaattccatccaccctcctctccctaggaggcctgcccccgctaaccggctttttgcccaaatgggccattatcgaagaattcacaaaaaacaatagcctcatcatccccaccatcatagccaccatcaccctccttaacctctacttctacctacgcctaatctactccacctcaatcacactactccccatatctaacaacgtaaaaataaaatgacagtttgaacatacaaaacccaccccattcctccccacactcatcgcccttaccacgctactcctacctatctccccttttatactaataatcttatagaaatttaggttaaatacagaccaagagccttcaaagccctcagtaagttgcaatacttaatttctgtaacagctaaggactgcaaaaccccactctgcatcaactgaacgcaaatcagccactttaattaagctaagcccttactagaccaatgggacttaaacccacaaacacttagttaacagctaagcaccctaatcaactggcttcaatctacttctcccgccgccgggaaaaaaggcgggagaagccccggcaggtttgaagctgcttcttcgaatttgcaattcaatatgaaaatcacctcggagctggtaaaaagaggcctaacccctgtctttagatttacagtccaatgcttcactcagccattttacctcacccccactgatgttcgccgaccgttgactattctctacaaaccacaaagacattggaacactatacctattattcggcgcatgagctggagtcctaggcacagctctaagcctccttattcgagccgagctgggccagccaggcaaccttctaggtaacgaccacatctacaacgttatcgtcacagcccatgcatttgtaataatcttcttcatagtaatacccatcataatcggaggctttggcaactgactagttcccctaataatcggtgcccccgatatggcgtttccccgcataaacaacataagcttctgactcttacctccctctctcctactcctgctcgcatctgctatagtggaggccggagcaggaacaggttgaacagtctaccctcccttagcagggaactactcccaccctggagcctccgtagacctaaccatcttctccttacacctagcaggtgtctcctctatcttaggggccatcaatttcatcacaacaattatcaatataaaaccccctgccataacccaataccaaacgcccctcttcgtctgatccgtcctaatcacagcagtcctacttctcctatctctcccagtcctagctgctggcatcactatactactaacagaccgcaacctcaacaccaccttcttcgaccccgccggaggaggagaccccattctataccaacacctattctgatttttcggtcaccctgaagtttatattcttatcctaccaggcttcggaataatctcccatattgtaacttactactccggaaaaaaagaaccatttggatacataggtatggtctgagctatgatatcaattggcttcctagggtttatcgtgtgagcacaccatatatttacagtaggaatagacgtagacacacgagcatatttcacctccgctaccataatcatcgctatccccaccggcgtcaaagtatttagctgactcgccacactccacggaagcaatatgaaatgatctgctgcagtgctctgagccctaggattcatctttcttttcaccgtaggtggcctgactggcattgtattagcaaactcatcactagacatcgtactacacgacacgtactacgttgtagctcacttccactatgtcctatcaataggagctgtatttgccatcataggaggcttcattcactgatttcccctattctcaggctacaccctagaccaaacctacgccaaaatccatttcactatcatattcatcggcgtaaatctaactttcttcccacaacactttctcggcctatccggaatgccccgacgttactcggactaccccgatgcatacaccacatgaaacatcctatcatctgtaggctcattcatttctctaacagcagtaatattaataattttcatgatttgagaagccttcgcttcgaagcgaaaagtcctaatagtagaagaaccctccataaacctggagtgactatatggatgccccccaccctaccacacattcgaagaacccgtatacataaaatctagacaaaaaaggaaggaatcgaaccccccaaagctggtttcaagccaaccccatggcctccatgactttttcaaaaaggtattagaaaaaccatttcataactttgtcaaagttaaattataggctaaatcctatatatcttaatggcacatgcagcgcaagtaggtctacaagacgctacttcccctatcatagaagagcttatcacctttcatgatcacgccctcataatcattttccttatctgcttcctagtcctgtatgcccttttcctaacactcacaacaaaactaactaatactaacatctcagacgctcaggaaatagaaaccgtctgaactatcctgcccgccatcatcctagtcctcatcgccctcccatccctacgcatcctttacataacagacgagatcaacgatccctcccttaccatcaaatcaattggccaccaatggtactgaacctacgagtacaccgactacggcggactaatcttcaactcctacatacttcccccattattcctagaaccaggcgacctgcgactccttgacgttgacaatcgagtagtactcccgattgaagcccccattcgtataataattacatcacaagacgtcttgcactcatgagctgtccccacattaggcttaaaaacagatgcaattcccggacgtctaaaccaaaccactttcaccgctacacgaccgggggtatactacggtcaatgctctgaaatctgtggagcaaaccacagtttcatgcccatcgtcctagaattaattcccctaaaaatctttgaaatagggcccgtatttaccctatagcaccccctctaccccctctagagcccactgtaaagctaacttagcattaaccttttaagttaaagattaagagaaccaacacctctttacagtgaaatgccccaactaaatactaccgtatggcccaccataattacccccatactccttacactattcctcatcacccaactaaaaatattaaacacaaactaccacctacctccctcaccaaagcccataaaaataaaaaattataacaaaccctgagaaccaaaatgaacgaaaatctgttcgcttcattcattgcccccacaatcctaggcctacccgccgcagtactgatcattctatttccccctctattgatccccacctccaaatatctcatcaacaaccgactaatcaccacccaacaatgactaatcaaactaacctcaaaacaaataataaccatacacaacactaaaggacgaacctgatctcttatactagtatccttaatcatttttattgccacaactaacctcctcggactcctgcctcactcatttacaccaaccacccaactatctataaacctagccatggccatccccttatgagcgggcgcagtgattataggctttcgctctaagattaaaaatgccctagcccacttcttaccacaaggcacacctacaccccttatccccatactagttattatcgaaaccatcagcctactcattcaaccaatagccctggccgtacgcctaaccgctaacattactgcaggccacctactcatgcacctaattggaagcgccaccctagcaatatcaaccattaaccttccctctacacttatcatcttcacaattctaattctactgactatcctagaaatcgctgtcgccttaatccaagcctacgttttcacacttctagtaagcctctacctgcacgacaacacataatgacccaccaatcacatgcctatcatatagtaaaacccagcccatgacccctaacaggggccctctcagccctcctaatgacctccggcctagccatgtgatttcacttccactccataacgctcctcatactaggcctactaaccaacacactaaccatataccaatgatggcgcgatgtaacacgagaaagcacataccaaggccaccacacaccacctgtccaaaaaggccttcgatacgggataatcctatttattacctcagaagtttttttcttcgcaggatttttctgagccttttaccactccagcctagcccctaccccccaattaggagggcactggcccccaacaggcatcaccccgctaaatcccctagaagtcccactcctaaacacatccgtattactcgcatcaggagtatcaatcacctgagctcaccatagtctaatagaaaacaaccgaaaccaaataattcaagcactgcttattacaattttactgggtctctattttaccctcctacaagcctcagagtacttcgagtctcccttcaccatttccgacggcatctacggctcaacattttttgtagccacaggcttccacggacttcacgtcattattggctcaactttcctcactatctgcttcatccgccaactaatatttcactttacatccaaacatcactttggcttcgaagccgccgcctgatactggcattttgtagatgtggtttgactatttctgtatgtctccatctattgatgagggtcttactcttttagtataaatagtaccgttaacttccaattaactagttttgacaacattcaaaaaagagtaataaacttcgccttaattttaataatcaacaccctcctagccttactactaataattattacattttgactaccacaactcaacggctacatagaaaaatccaccccttacgagtgcggcttcgaccctatatcccccgcccgcgtccctttctccataaaattcttcttagtagctattaccttcttattatttgatctagaaattgccctccttttacccctaccatgagccctacaaacaactaacctgccactaatagttatgtcatccctcttattaatcatcatcctagccctaagtctggcctatgagtgactacaaaaaggattagactgaaccgaattggtatatagtttaaacaaaacgaatgatttcgactcattaaattatgataatcatatctaccaaatgcccctcatttacataaatattatactagcatttaccatctcacttctaggaatactagtatatcgctcacacctcatatcctccctactatgcctagaaggaataatactatcgctgttcattatagctactctcataaccctcaacacccactccctcttagccaatattgtgcctattgccatactagtctttgccgcctgcgaagcagcggtgggcctagccctactagtctcaatctccaacacatatggcctagactacgtacataacctaaacctactccaatgctaaaactaatcgtcccaacaattatattactaccactgacatgactttccaaaaaacacataatttgaatcaacacaaccacccacagcctaattattagcatcatccctctactattttttaaccaaatcaacaacaacctatttagctgttccccaaccttttcctccgaccccctaacaacccccctcctaatactaactacctgactcctacccctcacaatcatggcaagccaacgccacttatccagtgaaccactatcacgaaaaaaactctacctctctatactaatctccctacaaatctccttaattataacattcacagccacagaactaatcatattttatatcttcttcgaaaccacacttatccccaccttggctatcatcacccgatgaggcaaccagccagaacgcctgaacgcaggcacatacttcctattctacaccctagtaggctcccttcccctactcatcgcactgatttacactcacaacaccctaggctcactaaacattctactactcactctcactgcccaagaactatcaaactcctgagccaacaacttaatatgactagcttacacaatagcttttatagtaaagatacctctttacggactccacttatgactccctaaagcccatgtcgaagcccccatcgctgggtcaatagtacttgccgcagtactcttaaaactaggcggctatggtataatacgcctcacactcattctcaaccccctgacaaaacacatagcctaccccttccttgtactatccctatgaggcataattataacaagctccatctgcctacgacaaacagacctaaaatcgctcattgcatactcttcaatcagccacatagccctcgtagtaacagccattctcatccaaaccccctgaagcttcaccggcgcagtcattctcataatcgcccacggacttacatcctcattactattctgcctagcaaactcaaactacgaacgcactcacagtcgcatcataatcctctctcaaggacttcaaactctactcccactaatagctttttgatgacttctagcaagcctcgctaacctcgccttaccccccactattaacctactgggagaactctctgtgctagtaaccacgttctcctgatcaaatatcactctcctacttacaggactcaacatactagtcacagccctatactccctctacatatttaccacaacacaatggggctcactcacccaccacattaacaacataaaaccctcattcacacgagaaaacaccctcatgttcatacacctatcccccattctcctcctatccctcaaccccgacatcattaccgggttttcctcttgtaaatatagtttaaccaaaacatcagattgtgaatctgacaacagaggcttacgaccccttatttaccgagaaagctcacaagaactgctaactcatgcccccatgtctaacaacatggctttctcaacttttaaaggataacagctatccattggtcttaggccccaaaaattttggtgcaactccaaataaaagtaataaccatgcacactactataaccaccctaaccctgacttccctaattccccccatccttaccaccctcgttaaccctaacaaaaaaaactcatacccccattatgtaaaatccattgtcgcatccacctttattatcagtctcttccccacaacaatattcatgtgcctagaccaagaagttattatctcgaactgacactgagccacaacccaaacaacccagctctccctaagcttcaaactagactacttctccataatattcatccctgtagcattgttcgttacatggtcaatcatagaattctcactgtgatatataaactcagacccaaacattaatcagttcttcaaatatctactcatcttcctaattaccatactaatcttagttaccgctaacaacctattccaactgttcatcggctgagagggcgtaggaattatatccttcttgctcatcagttgatgatacgcccgagcagatgccaacacagcagccattcaagcaatcctatacaaccgtatcggcgatatcggtttcatcctcgccttagcatgatttatcctacactccaactcatgagacccacaacaaatagcccttctaaacgctaatccaagcctcaccccactactaggcctcctcctagcagcagcaggcaaatcagcccaattaggtctccacccctgactcccctcagccatagaaggccccaccccagtctcagccctactccactcaagcactatagttgtagcaggaatcttcttactcatccgcttccaccccctagcagaaaatagcccactaatccaaactctaacactatgcttaggcgctatcaccactctgttcgcagcagtctgcgcccttacacaaaatgacatcaaaaaaatcgtagccttctccacttcaagtcaactaggactcataatagttacaatcggcatcaaccaaccacacctagcattcctgcacatctgtacccacgccttcttcaaagccatactatttatgtgctccggatccatcatccacaaccttaacaatgaacaagatattcgaaaaataggaggactactcaaaaccatacctctcacttcaacctccctcaccattggcagcctagcattagcaggaatacctttcctcacaggtttctactccaaagaccacatcatcgaaaccgcaaacatatcatacacaaacgcctgagccctatctattactctcatcgctacctccctgacaagcgcctatagcactcgaataattcttctcaccctaacaggtcaacctcgcttccccacccttactaacattaacgaaaataaccccaccctactaaaccccattaaacgcctggcagccggaagcctattcgcaggatttctcattactaacaacatttcccccgcatcccccttccaaacaacaatccccctctacctaaaactcacagccctcgctgtcactttcctaggacttctaacagccctagacctcaactacctaaccaacaaacttaaaataaaatccccactatgcacattttatttctccaacatactcggattctaccctagcatcacacaccgcacaatcccctatctaggccttcttacgagccaaaacctgcccctactcctcctagacctaacctgactagaaaagctattacctaaaacaatttcacagcaccaaatctccacctccatcatcacctcaacccaaaaaggcataattaaactttacttcctctctttcttcttcccactcatcctaaccctactcctaatcacataacctattcccccgagcaatctcaattacaatatatacaccaacaaacaatgttcaaccagtaactactactaatcaacgcccataatcatacaaagcccccgcaccaataggatcctcccgaatcaaccctgacccctctccttcataaattattcagcttcctacactattaaagtttaccacaaccaccaccccatcatactctttcacccacagcaccaatcctacctccatcgctaaccccactaaaacactcaccaagacctcaacccctgacccccatgcctcaggatactcctcaatagccatcgctgtagtatatccaaagacaaccatcattccccctaaataaattaaaaaaactattaaacccatataacctcccccaaaattcagaataataacacacccgaccacaccgctaacaatcaatactaaacccccataaataggagaaggcttagaagaaaaccccacaaaccccattactaaacccacactcaacagaaacaaagcatacatcattattctcgcacggactacaaccacgaccaatgatatgaaaaaccatcgttgtatttcaactacaagaacaccaatgaccccaatacgcaaaattaaccccctaataaaattaattaaccactcattcatcgacctccccaccccatccaacatctccgcatgatgaaacttcggctcactccttggcgcctgcctgatcctccaaatcaccacaggactattcctagccatacactactcaccagacgcctcaaccgccttttcatcaatcgcccacatcactcgagacgtaaattatggctgaatcatccgctaccttcacgccaatggcgcctcaatattctttatctgcctcttcctacacatcgggcgaggcctatattacggatcatttctctactcagaaacctgaaacatcggcattatcctcctgcttgcaactatagcaacagccttcataggctatgtcctcccgtgaggccaaatatcattctgaggggccacagtaattacaaacttactatccgccatcccatacattgggacagacctagttcaatgaatctgaggaggctactcagtagacagtcccaccctcacacgattctttacctttcactttatcttgcccttcattattgcagccctagcagcactccacctcctattcttgcacgaaacgggatcaaacaaccccctaggaatcacctcccattccgataaaatcaccttccacccttactacacaatcaaagacgccctcggcttacttctcttcattctctccttaatgacattaacactattctcaccagacctcctaggcgacccagacaattataccctagccaaccccttaaacacccctccccacatcaagcccgaatgatatttcctattcgcctacacaattctccgatccgtccctaacaagctaggaggcgtccttgccctattactatccatcctcatcctagcaataatccccatcctccatatatccaaacaacaaagcataatatttcgcccactaagccaatcactttattgactcctagccgcagacctcctcattctaacctgaatcggaggacaaccagtaagctacccttttaccatcattggacaagtagcatccgtactatacttcacaacaatcctaatcctaataccaactatctccctaattgaaaacaaaatactcaaatgggcctgtccttgtagtataaactaatacaccagtcttgtaaaccgaagatgaaaacctttttccaaggacaaatcagagaaaaagtctttaactccaccattagcacccaaagctaagattctaatttaaactattctctgttctttcatggggaagcagatttgggtaccacccaagtattgactcacccatcaacaaccgctatgtatttcgtacattactgccagccaccatgaatattgcacggtaccataaatacttgaccacctgtagtacatagaaacccaatccacatcaaaacctcccccccatgcttacaagcaagcacagcaatcaaccctcaactatcacacatcaactgcaactccaaagccacccctcacccactaggataccaacaaacctacccatccttaacagtacatagtacataaagccatttaccgtacatagcacattacagtcaaatcccttctcgtccccatggatgacccccctcagataggggtcccttgaccaccatcctccgtgaaatcaatatcccgcacaagagtgctactctcctcgctccgggcccataacacttgggggtagctaaagtgaactgtatccgacatctggttcctacttcagggccataaagcctaaatagcccacacgttccccttaaataagacatcacgatg

SEQ ID NO: 89 - DNA, 16570 bp, Homo sapiens mitochondrial
  3108: "n" refers to a nucleotide at position 3107 of the Cambridge Reference Sequence (CRS, Anderson et al. 1981 Nature 290:457-465), later determined to be absent from the human mtDNA sequence according to the revised CRS (rCRS, Andrews et al. 1999 Nature Genetics 23:147); "n" therefore represents a single nucleotide deletion at a position corresponding to nucleotide 3107 of SEQ ID NO:1 as provided herein.
gatcacaggtctatcaccctattaaccactcacgggagctctccatgcatttggtattttcgtctggggggtgtgcacgcgatagcattgcgagacgctggagccggagcaccttatgtcgcagtatctgtctttgattcctgcctcatcctattatttatcgcacctacgttcaatattacaggcgaacatacttactaaagtgtgttaattaattaatgcttgtaggacataataataacaattgaatgtctgcacagccgctttccacacagacatcataacaaaaaatttccaccaaaccccccctcccccgccttctggccacagcacttaaacacatctctgccaaaccccaaaaacaaagaaccctaacaccagcctaaccagatttcaaattttatcttttggcggtatgcacttttaacagtcaccccccaactaacacattattttcccctcccactcccatactactaatctcatcaatacaaccctcgcccatcctacccagcacacacacaccgctgctaaccccataccccgaaccaaccaaaccccaaagacaccccccacagtttatgtagcttacctcctcaaagcaatacactgaaaatgtttagacgggctcacatcaccccataaacaaataggtttggtcctagcctttctattagctcttagtaagattacacatgcaagcatccccgttccagtgagttcaccctctaaatcaccacgatcaaaagggacaagcatcaagcacgcagcaatgcagctcaaaacgcttagcctagccacacccccacgggaaacagcagtgattaacctttagcaataaacgaaagtttaactaagctatactaaccccagggttggtcaatttcgtgccagccaccgcggtcacacgattaacccaagtcaatagaagccggcgtaaagagtgttttagatcaccccctccccaataaagctaaaactcacctgagttgtaaaaaactccagttgacacaaaatagactacgaaagtggctttaacatatctgaacacacaatagctaagacccaaactgggattagataccccactatgcttagccctaaacctcaacagttaaatcaacaaaactgctcgccagaacactacgagccacagcttaaaactcaaaggacctggcggtgcttcatacccctctagaggagcctgttctgtaatcgataaaccccgatcaacctcaccacctcttgctcagcctatataccgccatcttcagcaaaccctgatgaaggctacaaagtaagcgcaagtacccacgtaaagacgttaggtcaaggtgtagcccatgaggtggcaagaaatgggctacattttctaccccagaaaactacgatagcccttatgaaacttaagggtcgaaggtggatttagcagtaaactgagagtagagtgcttagttgaacagggccctgaagcgcgtacacaccgcccgtcaccctcctcaagtatacttcaaaggacatttaactaaaacccctacgcatttatatagaggagacaagtcgtaacatggtaagtgtactggaaagtgcacttggacgaaccagagtgtagcttaacacaaagcacccaacttacacttaggagatttcaacttaacttgaccgctctgagctaaacctagccccaaacccactccaccttactaccagacaaccttagccaaaccatttacccaaataaagtataggcgatagaaattgaaacctggcgcaatagatatagtaccgcaagggaaagatgaaaaattatagccaagcataatatagcaaggactaacccctataccttctgcataatgaattaactagaaataactttgcaaggagagccaaagctaagacccccgaaaccagacgagctacctaagaacagctaaaagagcacacccgtctatgtagcaaaatagtgggaagatttataggtagaggcgacaaacctaccgagcctggtgatagctggttgtccaagatagaatcttagttcaactttaaatttgcccacagaaccctctaaatccccttgtaaatttaactgttagtccaaagaggaacagctctttggacactaggaaaaaaccttgtagagagagtaaaaaatttaacacccatagtaggcctaaaagcagccaccaattaagaaagcgttcaagctcaacacccactacctaaaaaatcccaaacatataactgaactcctcacacccaattggaccaatctatcaccctatagaagaactaatgttagtataagtaacatgaaaacattctcctccgcataagcctgcgtcagattaaaacactgaactgacaattaacagcccaatatctacaatcaaccaacaagtcattattaccctcactgtcaacccaacacaggcatgctcataaggaaaggttaaaaaaagtaaaaggaactcggcaaatcttaccccgcctgtttaccaaaaacatcacctctagcatcaccagtattagaggcaccgcctgcccagtgacacatgtttaacggccgcggtaccctaaccgtgcaaaggtagcataatcacttgttccttaaatagggacctgtatgaatggctccacgagggttcagctgtctcttacttttaaccagtgaaattgacctgcccgtgaagaggcgggcatgacacagcaagacgagaagaccctatggagctttaatttattaatgcaaacagtacctaacaaacccacaggtcctaaactaccaaacctgcattaaaaatttcggttggggcgacctcggagcagaacccaacctccgagcagtacatgctaagacttcaccagtcaaagcgaactactatactcaattgatccaataacttgaccaacggaacaagttaccctagggataacagcgcaatcctattctagagtccatatcaacaatagggtttacgacctcgatgttggatcaggacatcccgatggtgcagccgctattaaaggttcgtttgttcaacgattaaagtcctacgtgatctgagttcagaccggagtaatccaggtcggtttctatctacnttcaaattcctccctgtacgaaaggacaagagaaataaggcctacttcacaaagcgccttcccccgtaaatgatatcatctcaacttagtattatacccacacccacccaagaacagggtttgttaagatggcagagcccggtaatcgcataaaacttaaaactttacagtcagaggttcaattcctcttcttaacaacatacccatggccaacctcctactcctcattgtacccattctaatcgcaatggcattcctaatgcttaccgaacgaaaaattctaggctatatacaactacgcaaaggccccaacgttgtaggcccctacgggctactacaacccttcgctgacgccataaaactcttcaccaaggagcccctaaaacccgccacatctaccatcaccctctacatcaccgccccgaccttagctctcaccatcgctcttctactatgaacccccctccccatacccaaccccctggtcaacctcaacctaggcctcctatttattctagccacctctagcctagccgtttactcaatcctctgatcagggtgagcatcaaactcaaactacgccctgatcggcgcactgcgagcagtagcccaaacaatctcatatgaagtcaccctagccatcattctactatcaacattactaataagtggctcctttaacctctccacccttatcacaacacaagaacacctctgattactcctgccatcatgacccttggccataatatgatttatctccacactagcagagaccaaccgaacccccttcgaccttgccgaaggggagtccgaactagtctcaggcttcaacatcgaatacgccgcaggccccttcgccctattcttcatagccgaatacacaaacattattataataaacaccctcaccactacaatcttcctaggaacaacatatgacgcactctcccctgaactctacacaacatattttgtcaccaagaccctacttctaacctccctgttcttatgaattcgaacagcatacccccgattccgctacgaccaactcatacacctcctatgaaaaaacttcctaccactcaccctagcattacttatatgatatgtctccatacccattacaatctccagcattccccctcaaacctaagaaatatgtctgataaaagagttactttgatagagtaaataataggagcttaaacccccttatttctaggactatgagaatcgaacccatccctgagaatccaaaattctccgtgccacctatcacaccccatcctaaagtaaggtcagctaaataagctatcgggcccataccccgaaaatgttggttatacccttcccgtactaattaatcccctggcccaacccgtcatctactctaccatctttgcaggcacactcatcacagcgctaagctcgcactgattttttacctgagtaggcctagaaataaacatgctagcttttattccagttctaaccaaaaaaataaaccctcgttccacagaagctgccatcaagtatttcctcacgcaagcaaccgcatccataatccttctaatagctatcctcttcaacaatatactctccggacaatgaaccataaccaatactaccaatcaatactcatcattaataatcataatggctatagcaataaaactaggaatagccccctttcacttctgagtcccagaggttacccaaggcacccctctgacatccggcctgcttcttctcacatgacaaaaactagcccccatctcaatcatataccaaatctctccctcactaaacgtaagccttctcctcactctctcaatcttatccatcatagcaggcagttgaggtggattaaaccaaacccagctacgcaaaatcttagcatactcctcaattacccacataggatgaataatagcagttctaccgtacaaccctaacataaccattcttaatttaactatttatattatcctaactactaccgcattcctactactcaacttaaactccagcaccacgaccctactactatctcgcacctgaaacaagctaacatgactaacacccttaattccatccaccctcctctccctaggaggcctgcccccgctaaccggctttttgcccaaatgggccattatcgaagaattcacaaaaaacaatagcctcatcatccccaccatcatagccaccatcaccctccttaacctctacttctacctacgcctaatctactccacctcaatcacactactccccatatctaacaacgtaaaaataaaatgacagtttgaacatacaaaacccaccccattcctccccacactcatcgcccttaccacgctactcctacctatctccccttttatactaataatcttatagaaatttaggttaaatacagaccaagagccttcaaagccctcagtaagttgcaatacttaatttctgtaacagctaaggactgcaaaaccccactctgcatcaactgaacgcaaatcagccactttaattaagctaagcccttactagaccaatgggacttaaacccacaaacacttagttaacagctaagcaccctaatcaactggcttcaatctacttctcccgccgccgggaaaaaaggcgggagaagccccggcaggtttgaagctgcttcttcgaatttgcaattcaatatgaaaatcacctcggagctggtaaaaagaggcctaacccctgtctttagatttacagtccaatgcttcactcagccattttacctcacccccactgatgttcgccgaccgttgactattctctacaaaccacaaagacattggaacactatacctattattcggcgcatgagctggagtcctaggcacagctctaagcctccttattcgagccgagctgggccagccaggcaaccttctaggtaacgaccacatctacaacgttatcgtcacagcccatgcatttgtaataatcttcttcatagtaatacccatcataatcggaggctttggcaactgactagttcccctaataatcggtgcccccgatatggcgtttccccgcataaacaacataagcttctgactcttacctccctctctcctactcctgctcgcatctgctatagtggaggccggagcaggaacaggttgaacagtctaccctcccttagcagggaactactcccaccctggagcctccgtagacctaaccatcttctccttacacctagcaggtgtctcctctatcttaggggccatcaatttcatcacaacaattatcaatataaaaccccctgccataacccaataccaaacgcccctcttcgtctgatccgtcctaatcacagcagtcctacttctcctatctctcccagtcctagctgctggcatcactatactactaacagaccgcaacctcaacaccaccttcttcgaccccgccggaggaggagaccccattctataccaacacctattctgatttttcggtcaccctgaagtttatattcttatcctaccaggcttcggaataatctcccatattgtaacttactactccggaaaaaaagaaccatttggatacataggtatggtctgagctatgatatcaattggcttcctagggtttatcgtgtgagcacaccatatatttacagtaggaatagacgtagacacacgagcatatttcacctccgctaccataatcatcgctatccccaccggcgtcaaagtatttagctgactcgccacactccacggaagcaatatgaaatgatctgctgcagtgctctgagccctaggattcatctttcttttcaccgtaggtggcctgactggcattgtattagcaaactcatcactagacatcgtactacacgacacgtactacgttgtagctcacttccactatgtcctatcaataggagctgtatttgccatcataggaggcttcattcactgatttcccctattctcaggctacaccctagaccaaacctacgccaaaatccatttcactatcatattcatcggcgtaaatctaactttcttcccacaacactttctcggcctatccggaatgccccgacgttactcggactaccccgatgcatacaccacatgaaacatcctatcatctgtaggctcattcatttctctaacagcagtaatattaataattttcatgatttgagaagccttcgcttcgaagcgaaaagtcctaatagtagaagaaccctccataaacctggagtgactatatggatgccccccaccctaccacacattcgaagaacccgtatacataaaatctagacaaaaaaggaaggaatcgaaccccccaaagctggtttcaagccaaccccatggcctccatgactttttcaaaaaggtattagaaaaaccatttcataactttgtcaaagttaaattataggctaaatcctatatatcttaatggcacatgcagcgcaagtaggtctacaagacgctacttcccctatcatagaagagcttatcacctttcatgatcacgccctcataatcattttccttatctgcttcctagtcctgtatgcccttttcctaacactcacaacaaaactaactaatactaacatctcagacgctcaggaaatagaaaccgtctgaactatcctgcccgccatcatcctagtcctcatcgccctcccatccctacgcatcctttacataacagacgaggtcaacgatccctcccttaccatcaaatcaattggccaccaatggtactgaacctacgagtacaccgactacggcggactaatcttcaactcctacatacttcccccattattcctagaaccaggcgacctgcgactccttgacgttgacaatcgagtagtactcccgattgaagcccccattcgtataataattacatcacaagacgtcttgcactcatgagctgtccccacattaggcttaaaaacagatgcaattcccggacgtctaaaccaaaccactttcaccgctacacgaccgggggtatactacggtcaatgctctgaaatctgtggagcaaaccacagtttcatgcccatcgtcctagaattaattcccctaaaaatctttgaaatagggcccgtatttaccctatagcaccccctctaccccctctagagcccactgtaaagctaacttagcattaaccttttaagttaaagattaagagaaccaacacctctttacagtgaaatgccccaactaaatactaccgtatggcccaccataattacccccatactccttacactattcctcatcacccaactaaaaatattaaacacaaactaccacctacctccctcaccaaagcccataaaaataaaaaattataacaaaccctgagaaccaaaatgaacgaaaatctgttcgcttcattcattgcccccacaatcctaggcctacccgccgcagtactgatcattctatttccccctctattgatccccacctccaaatatctcatcaacaaccgactaatcaccacccaacaatgactaatcaaactaacctcaaaacaaatgataaccatacacaacactaaaggacgaacctgatctcttatactagtatccttaatcatttttattgccacaactaacctcctcggactcctgcctcactcatttacaccaaccacccaactatctataaacctagccatggccatccccttatgagcgggcgcagtgattataggctttcgctctaagattaaaaatgccctagcccacttcttaccacaaggcacacctacaccccttatccccatactagttattatcgaaaccatcagcctactcattcaaccaatagccctggccgtacgcctaaccgctaacattactgcaggccacctactcatgcacctaattggaagcaccaccctagcaatatcaaccattaaccttccctctacacttatcatcttcacaattctaattctactgactatcctagaaatcgctgtcgccttaatccaagcctacgttttcacacttctagtaagcctctacctgcacgacaacacataatgacccaccaatcacatgcctatcatatagtaaaacccagcccatgacccctaacaggggccctctcagccctcctaatgacctccggcctagccatgtgatttcacttccactccataacgctcctcatactaggcctactaaccaacacactaaccatataccaatgatggcgcgatgtaacacgagaaagcacataccaaggccaccacacaccacctgtccaaaaaggccttcgatacgggataatcctatttattacctcagaagtttttttcttcgcaggatttttctgagccttttaccactccagcctagcccctaccccccaattaggagggcactggcccccaacaggcatcaccccgctaaatcccctagaagtcccactcctaaacacatccgtattactcgcatcaggagtatcaatcacctgagctcaccatagtctaatagaaaacaaccgaaaccaaataattcaagcactgctcattacaattttactgggtctctattttaccctcctacaagcctcagagtacttcgagtctcccttcaccatttccgacggcatctacggctcaacattttttgtagccacaggcttccacggacttcacgtcattattggctcaactttcctcactatctgcttcatccgccaactaatatttcactttacatccaaacatcactttggcttcgaagccgccgcctgatactggcattttgtagatgtggtttgactatttctgtatgtctccatctattgatgagggtcttactcttttagtataaatagtaccgttaacttccaattaactagttttgacaacattcaaaaaagagtaataaacttcgccttaattttaataatcaacaccctcctagccttactactaataattattacattttgactaccacaactcaacggctacatagaaaaatccaccccttacgagtgcggcttcgaccctatatcccccgcccgcgtccctttctccataaaattcttcttagtagctattaccttcttattatttgatctagaaattgccctccttttacccctaccatgagccctacaaacaactaacctgccactaatagttatgtcatccctcttattaatcatcatcctagccctaagtctggcctatgagtgactacaaaaaggattagactgagccgaattggtatatagtttaaacaaaacgaatgatttcgactcattaaattatgataatcatatttaccaaatgcccctcatttacataaatattatactagcatttaccatctcacttctaggaatactagtatatcgctcacacctcatgtcctccctactatgcctagaaggaataatactatcgctgttcattatagctactctcataaccctcaacacccactccctcttagccaatattgtgcctattgccatactagtctttgccgcctgcgaagcagcggtgggcctagccctactagtctcaatctccaacacatatggcctagactacgtacataacctaaacctactccaatgctaaaactaatcgtcccaacaattatattactaccactgacatgactttccaaaaaacacataatttgaatcaacacaaccacccacagcctaattattagcatcatccctctactattttttaaccaaatcaacaacaacctatttagctgttccccaaccttttcctccgaccccctaacaacccccctcctaatactaactacctgactcctgcccctcacaatcatggcaagccaacgccacttatccagtgaaccactatcacgaaaaaaactctacctctctatactaatctccctacaaatctccttaattataacattcacagccacagaactaatcatattttatatcttcttcgaaaccacacttatccccaccttggctatcatcacccgatgaggcaaccagccagaacgcctgaacgcaggcacatacttcctattctacaccctagtaggctcccttcccctactcatcgcactaatttacactcacaacaccctaggctcactaaacattctactactcaccctcactgcccaagaactatcaaactcctgagccaacaacttaatatgactagcttacacaatagcttttatagtaaagatacctctttacggactccacttatgactccctaaagcccatgtcgaagcccccatcgctgggtcaatagtacttgccgcagtactcttgaagctaggcggctatggtataatacgcctcacactcattctcaaccccctgacaaaacacatagcctaccccttccttgtactatccctatgaggcataattataacaagctccatctgcctacgacaaacagacctaaaatcgctcattgcatactcttcaatcagccacatagccctcgtagtaacagccattctcatccaaaccccctgaagcttcaccggcgcagtcattctcataatcgcccacggacttacatcctcattactattctgcctagcaaactcaaactacgaacgcactcacagtcgcatcataatcctctctcaaggacttcaaactctactcccactaatagctttttgatgacttctagcaagcctcgctaacctcgccttaccccccactattaacctactgggagaactctctgtgctagtaaccacattctcctgatcaaatatcactctcctacttacaggactcaacatactagtcacagccctatactccctctacatatttaccacaacacaatggggctcactcacccaccacattaacaacataaaaccctcattcacacgagaaaacaccctcatgttcatacacctatcccccattctcctcctatccctcaaccccgacatcattaccgggttttcctcttgtaaatatagtttaaccaaaacatcagattgtgaatctgacaacagaggcttacgaccccttatttaccgagaaagctcacaagaactgctaactcatgcccccatgtctaacaacatggctttctcaacttttaaaggataacagctatccattggtcttaggccccaagaattttggtgcaactccaaataaaagtaataaccatgcacactactataaccaccctaaccctaacttccctaattccccccatccttaccaccctcgttaaccctaacaaaaaaaactcatacccccattatgtaaaatccattgtcgcatccacctttattatcagtctcttccccacaacaatattcatgtgcctagaccaagaagttattatctcgaactgacactgagccacaacccaaacaacccagctctccctaagcttcaaactagactacttctccataatattcatccctgtagcattgttcgttacatggtccatcatagaattctcactgtgatatataaactcagacccaaacattaatcagttcttcaaatatctactcatcttcctaattaccatactaatcttagttaccgctaacaacctattccaactgttcatcggctgagagggcgtaggaattatatccttcttgctcatcagttgatgatacgcccgagcagatgccaacacagcagccattcaagcaatcctatacaaccgtatcggcgatatcggtttcatcctcgccttagcatgatttatcctacactccaactcatgagacccacaacaaatagcccttctaaacgccaatccaagcctcaccccactactaggcctcctcctagcagcagcaggcaaatcagcccaattaggtctccacccctgactcccctcagccatagaaggccccaccccagtctcagccctactccactcaagcactatagttgtagcaggaatcttcttactcatccgcttccaccccctagcagaaaatagcccactaatccaaactctaacactatgcttaggcgctatcaccactctgttcgcagcagtctgcgcccttacacaaaatgacatcaaaaaaatcgtagccttctccacttcaagtcaactaggactcataatagttacaatcggcatcaaccaaccacacctagcattcctgcacatctgtacccacgccttcttcaaagccatactatttatgtgctccgggtccatcatccacaaccttaacaatgaacaagatattcgaaaaataggaggactactcaaaaccatacctctcacttcaacctccctcaccattggcagcctagcattagcaggaatacctttcctcacaggtttctactccaaagaccacatcatcgaaaccgcaaacatatcatacacaaacgcctgagccctatctattactctcatcgctacctccctgacaagcgcctatagcactcgaataattcttctcaccctaacaggtcaacctcgcttccccacccttactaacattaacgaaaataaccccaccctactaaaccccattaaacgcctggcagccggaagcctattcgcaggatttctcattactaacaacatttcccccgcatcccccttccaaacaacaatccccctctacctaaaactcacagccctcgctgtcactttcctaggacttctaacagccctagacctcaactacctaaccaacaaacttaaaataaaatccccactatgcacattttatttctccaacatactcggattctaccctagcatcacacaccgcacaatcccctatctaggccttcttacgagccaaaacctgcccctactcctcctagacctaacctgactagaaaagctattacctaaaacaatttcacagcaccaaatctccacctccatcatcacctcaacccaaaaaggcataattaaactttacttcctctctttcttcttcccactcatcctaaccctactcctaatcacataacctattcccccgagcaatttcaattacaatatatacaccaacaaacaatgttcaaccagtaactactactaatcaacgcccataatcatacaaagcccccgcaccaataggatcctcccgaatcaaccctgacccctctccttcataaattattcagcttcctacactattaaagtttaccacaaccaccaccccatcatactctttcacccacagcaccaatcctacctccatcgctaaccccactaaaacactcaccaagacctcaacccctgacccccatgcctcaggatactcctcaatagccatcgctgtagtatatccaaagacaaccatcattccccctaaataaattaaaaaaactattaaacccatataacctcccccaaaattcagaataataacacacccgaccacaccgctaacaatcaatactaaacccccataaataggagaaggcttagaagaaaaccccacaaaccccattactaaacccacactcaacagaaacaaagcatacatcattattctcgcacggactacaaccacgaccaatgatatgaaaaaccatcgttgtatttcaactacaagaacaccaatgaccccaatacgcaaaattaaccccctaataaaattaattaaccactcactcatcgacctccccaccccatccaacatctccgcatgatgaaacttcggctcactccttggcgcctgcctgatcctccaaatcaccacaggactattcctagccatgcactactcaccagacgcctcaaccgccttttcatcaatcgcccacatcactcgagacgtaaattatggctgaatcatccgctaccttcacgccaatggcgcctcaatattctttatctgcctcttcctacacatcgggcgaggcctatattacggatcatttctctactcagaaacctgaaacatcggcattatcctcctgcttgcaactatagcaacagccttcataggctatgtcctcccgtgaggccaaatatcattctgaggggccacagtaattacaaacttactatccgccatcccatacattgggacagacctagttcaatgaatctgaggaggctactcagtagacagtcccaccctcacacgattctttacctttcacttcatcttgcccttcattattgcagccctagcagcactccacctcctattcttgcacgaaacgggatcaaacaaccccctaggaatcacctcccattccgataaaatcaccttccacccttactacacaatcaaagacgccctcggcttacttctcttccttctctccttaatgacattaacactattctcaccagacctcctaggcgacccagacaattataccctagccaaccccttaaacacccctccccacatcaagcccgaatgatatttcctattcgcctacacaattctccgatccgtccctaacaaactaggaggcgtccttgccctattactatccatcctcatcctagcaataatccccatcctccatatatccaaacaacaaagcataatatttcgcccactaagccaatcactttattgactcctagccgcagacctcctcattctaacctgaatcggaggacaaccagtaagctacccttttaccatcattggacaagtagcatccgtactatacttcacaacaatcctaatcctaataccaactatctccctaattgaaaacaaaatactcaaatgggcctgtccttgtagtataaactaatacaccagtcttgtaagccggagatgaaaacctttttccaaggacaaatcagagaaaaagtctttaactccaccattagcacccaaagctaagattctaatttaaactattctctgttctttcatggggaagcagatttgggtaccacccaagtattgactcacccatcaacaaccgctatgtatttcgtacattactgccagccaccatgaatattgtacggtaccataaatacttgaccacctgtagtacataaaaacccaatccacatcaaaaccccctccccatgcttacaagcaagtacagcaatcaacccccaactatcatacatcaactgcaactccaaagccacccctcacccactaggataccaacaaacctacccacccttaacagtacatagcacataaagccatttaccgtacatagcacattacagtcaaatcccttctcgtccccatggatgacccccctcagataggggtcccttgaccaccatcctccgtgaaatcaatatcccgcacaagagtgctactctcctcgctccgggcccataacacttgggggtagctaaagtgaactgtatccgacatctggttcctacttcagggccataaagcctaaatagcccacacgttccccttaaataagacatcacgatg

SEQ ID NO: 90 - DNA, 16571 bp, Homo sapiens mitochondrial
  3109: "n" refers to a nucleotide at position 3107 of the Cambridge Reference Sequence (CRS, Anderson et al. 1981 Nature 290:457-465), later determined to be absent from the human mtDNA sequence according to the revised CRS (rCRS, Andrews et al. 1999 Nature Genetics 23:147); "n" therefore represents a single nucleotide deletion at a position corresponding to nucleotide 3107 of SEQ ID NO:1 as provided herein.
gatcacaggtctatcaccctattaaccactcacgggagctctccatgcatttggtattttcgtctggggggtgtgcacgcgatagcattgcgagacgctggagccggagcaccctatgtcgcagtatctgtctttgattcctgcctcatcctattatttatcgcacctacgttcaatattacaggcgaacatacttactaaagtgtgttaattaattaatgcttgtaggacataataataacaattgaatgtctgcacagccgctttccacacagacatcataacaaaaaatttccaccaaaccccccctcccccccgcttctggccacagcacttaaacacatctctgccaaaccccaaaaacaaagaaccctaacaccagcctaaccagatttcaaattttatcttttggcggtatgcacttttaacagtcaccccccaactaacacattattttcccctcccactcccatactactaatctcatcaatacaacccccgcccatcctacccagcacacacacaccgctgctaaccccataccccgaaccaaccaaaccccaaagacaccccccacagtttatgtagcttacctcctcaaagcaatacactgaaaatgtttagacgggctcacatcaccccataaacaaataggtttggtcctagcctttctattagctcttagtaagattacacatgcaagcatccccattccagtgagttcaccctctaaatcaccacgatcaaaagggacaagcatcaagcacgcagcaatgcagctcaaaacgcttagcctagccacacccccacgggaaacagcagtgattaacctttagcaataaacgaaagtttaactaagctatactaaccccagggttggtcaatttcgtgccagccaccgcggtcacacgattaacccaagtcaatagaaaccggcgtaaagagtgttttagatcaccccctccccaataaagctaaaactcacctgagttgtaaaaaactccagttgacacaaaatagactacgaaagtggctttaacatatctgaacacacaatagctaagacccaaactgggattagataccccactatgcttagccctaaacctcaacagttaaatcaacaaaactgctcgccagaacactacgagccacagcttaaaactcaaaggacctggcggtgcttcatatccctctagaggagcctgttctgtaatcgataaaccccgatcaacctcaccacctcttgctcagcctatataccgccatcttcagcaaaccctgatgaaggctacaaagtaagcgcaagtacccacgtaaagacgttaggtcaaggtgtagcccatgaggtggcaagaaatgggctacattttctaccccagaaaactacgatagcccttatgaaacttaagggtcgaaggtggatttagcagtaaactgagagtagagtgcttagttgaacagggccctgaagcgcgtacacaccgcccgtcaccctcctcaagtatacttcaaaggacatttaactaaaacccctacgcatttatatagaggagacaagtcgtaacatggtaagtgtactggaaagtgcacttggacgaaccagagtgtagcttaacacaaagcacccaacttacacttaggagatttcaacttaacttgaccgctctgagctaaacctagccccaaacccactccaccttactaccagacaaccttagccaaaccatttacccaaataaagtataggcgatagaaattgaaacctggcgcaatagatatagtaccgcaagggaaagatgaaaaattataaccaagcataatatagcaaggactaacccctataccttctgcataatgaattaactagaaataactttgcaaggagaaccaaagctaagacccccgaaaccagacgagctacctaagaacagctaaaagagcacacccgtctatgtagcaaaatagtgggaagatttataggtagaggcgacaaacctaccgagcctggtgatagctggttgtccaagatagaatcttagttcaactttaaatttgcccacagaaccctctaaatccccttgtaaatttaactgttagtccaaagaggaacagctctttggacactaggaaaaaaccttgtagagagagtaaaaaatttaacacccatagtaggcctaaaagcagccaccaattaagaaagcgttcaagctcaacacccactacctaaaaaatcccaaacatataactgaactcctcacacccaattggaccaatctatcaccctatagaagaactaatgttagtataagtaacatgaaaacattctcctccgcataagcctgcgtcagattaaaacactgaactgacaattaacagcccaatatctacaatcaaccaacaagtcattattaccctcactgtcaacccaacacaggcatgctcataaggaaaggttaaaaaaagtaaaaggaactcggcaaatcttaccccgcctgtttaccaaaaacatcacctctagcatcaccagtattagaggcaccgcctgcccagtgacacatgtttaacggccgcggtaccctaaccgtgcaaaggtagcataatcacttgttccttaaatagggacctgtatgaatggctccacgagggttcagctgtctcttacttttaaccagtgaaattgacctgcccgtgaagaggcgggcatgacacagcaagacgagaagaccctatggagctttaatttattaatgcaaacagtacctaacaaacccacaggtcctaaactaccaaacctgcattaaaaatttcggttggggcgacctcggagcagaacccaacctccgagcagtacatgctaagacttcaccagtcaaagcgaactactatactcaattgatccaataacttgaccaacggaacaagttaccctagggataacagcgcaatcctattctagagtccatatcaacaatagggtttacgacctcgatgttggatcaggacatcccgatggtgcagccgctattaaaggttcgtttgttcaacgattaaagtcctacgtgatctgagttcagaccggagtaatccaggtcggtttctatctacnttcaaattcctccctgtacgaaaggacaagagaaataaggcctacttcacaaagcgccttcccccgtaaatgatatcatctcaacttagtattatacccacacccacccaagaacagggtttgttaagatggcagagcccggtaatcgcataaaacttaaaactttacagtcagaggttcaattcctcttcttaacaacatacccatggccaacctcctactcctcattgtacccattctaatcgcaatggcattcctaatgcttaccgaacgaaaaattctaggctatatacaactacgcaaaggccccaacgttgtaggcccctacgggctactacaacccttcgctgacgccataaaactcttcaccaaagagcccctaaaacccgccacatctaccatcaccctctacatcaccgccccgaccttagctctcaccatcgctcttctactatgaacccccctccccatacccaaccccctggtcaacctcaacctaggcctcctatttattctagccacctctagcctagccgtttactcaatcctctgatcagggtgagcatcaaactcaaactacgccctgatcggcgcactgcgagcagtagcccaaacaatctcatatgaagtcaccctagccatcattctactatcaacattactaataagtggctcctttaacctctccacccttatcacaacacaagaacacctctgattactcctgccatcatgacccttggccataatatgatttatctccacactagcagagaccaaccgaacccccttcgaccttgccgaaggggagtccgaactagtctcaggcttcaacatcgaatacgccgcaggccccttcgccctattcttcatagccgaatacacaaacattattataataaacaccctcaccactacaatcttcctaggaacaacatatgacgcactctcccctgaactctacacaacatattttgtcaccaagaccctacttctaacctccctgttcttatgaattcgaacagcatacccccgattccgctacgaccaactcatacacctcctatgaaaaaacttcctaccactcaccctagcattacttatatgacatgtctccatacccattacaatctccagcattccccctcaaacctaagaaatatgtctgataaaagagttactttgatagagtaaataataggagcttaaacccccttatttctaggactatgagaatcgaacccatccctgagaatccaaaattctccgtgccacctatcacaccccatcctaaagtaaggtcagctaaataagctatcgggcccataccccgaaaatgttggttatacccttcccgtactaattaatcccctggcccaacccgtcatctactctaccatctttgcaggcacactcatcacagcgctaagctcgcactgattttttacctgagtaggcctagaaataaacatgctagcttttattccagttctaaccaaaaaaataaaccctcgttccacagaagctgccatcaagtatttcctcacgcaagcaaccgcatccataatccttctaatagctatcctcttcaacaatatactctccggacaatgaaccataaccaatactaccaatcaatactcatcattaataatcataatggctatagcaataaaactaggaatagccccctttcacttctgagtcccagaggttacccaaggcacccctctgacatccggcctgcttcttctcacatgacaaaaactagcccccatctcaatcatataccaaatctctccctcactagacgtaagccttctcctcactctctcaatcttatccatcatagcaggcagttgaggtggattaaaccaaacccagctacgcaaaatcttagcatactcctcaattacccacataggatgaataatagcagttctaccgtacaaccctaacataaccattcttaatttaactatttatattatcctaactactaccgcattcctactactcaacttaaactccagcaccacaaccctactactatctcgcacctgaaacaagctaacatgactaacacccttaattccatccaccctcctctccctaggaggcctgcccccgctaaccggctttttgcccaaatgggccattatcgaagaattcacaaaaaacaatagcctcatcatccccaccatcatagccaccatcaccctccttaacctctacttctacctacgcctaatctactccacctcaatcacactactccccatatctaacaacgtaaaaataaaatgacagtttgaacatacaaaacccaccccattcctccccacactcatcgcccttaccacgctactcctacctatctccccttttatactaataatcttatagaaatttaggttaaatacagaccaagagccttcaaagccctcagtaagttgcaatacttaatttctgtaacagctaaggactgcaaaaccccactctgcatcaactgaacgcaaatcagccactttaattaagctaagcccttactagaccaatgggacttaaacccacaaacacttagttaacagctaagcaccctaatcaactggcttcaatctacttctcccgccgccgggaaaaaaggcgggagaagccccggcaggtttgaagctgcttcttcgaatttgcaattcaatatgaaaatcacctcggagctggtaaaaagaggcctaacccctgtctttagatttacagtccaatgcttcactcagccattttacctcacccccactgatgttcgccgaccgttgactattctctacaaaccacaaagacattggaacactatacctattattcggcgcatgagctggagtcctaggcacagctctaagcctccttattcgagccgagctgggccagccaggcaaccttctaggtaacgaccacatctacaacgttatcgtcacagcccatgcatttgtaataatcttcttcatagtaatacccatcataatcggaggctttggcaactgactagttcccctaataatcggtgcccccgatatggcgtttccccgcataaacaacataagcttctgactcttacctccctctctcctactcctgctcgcatctgctatagtggaggccggagcaggaacaggttgaacagtctaccctcccttagcagggaactactcccaccctggagcctccgtagacctaaccatcttctccttacacctagcaggtgtctcctctatcttaggggccatcaatttcatcacaacaattatcaatataaaaccccctgccataacccaataccaaacgcccctcttcgtctgatccgtcctaatcacagcaatcctacttctcctatctctcccagtcctagctgctggcatcactatactactaacagaccgcaacctcaacaccaccttcttcgaccccgccggaggaggagaccccattctataccaacacctattctgatttttcggtcaccctgaagtttatattcttatcctaccaggcttcggaataatctcccatattgtaacttactactccggaaaaaaagaaccatttggatacataggtatggtctgagctatgatatcaattggcttcctagggtttatcgtgtgagcacaccatatatttacagtaggaatagacgtagacacacgagcatatttcacctccgctaccataatcatcgctatccccaccggcgtcaaagtatttagctgactcgccacactccacggaagcaatatgaaatgatctgctgcagtgctctgagccctaggattcatctttcttttcaccgtaggtggcctgactggcattgtattagcaaactcatcactagacatcgtactacacgacacgtactacgttgtagctcacttccactatgtcctatcaataggagctgtatttgccatcataggaggcttcattcactgatttcccctattctcaggctacaccctagaccaaacctacgccaaaatccatttcactatcatattcatcggcgtaaatctaactttcttcccacaacactttctcggcctatccggaatgccccgacgttactcggactaccccgatgcatacaccacatgaaacatcctatcatctgtaggctcattcatttctctaacagcagtaatattaataattttcatgatttgagaagccttcgcttcgaagcgaaaagtcctaatagtagaagaaccctccataaacctggagtgactatatggatgccccccaccctaccacacattcgaagaacccgtatacataaaatctagacaaaaaaggaaggaatcgaaccccccaaagctggtttcaagccaaccccatggcctccatgactttttcaaaaaggtattagaaaaaccatttcataactttgtcaaagttaaattataggctaaatcctatatatcttaatggcacatgcagcgcaagtaggtctacaagacgctacttcccctatcatagaagagcttatcacctttcatgatcacgccctcataatcattttccttatctgcttcctagtcctgtatgcccttttcctaacactcacaacaaaactaactaatactaacatctcagacgctcaggaaatagaaaccgtctgaactatcctgcccgccatcatcctagtcctcatcgccctcccatccctacgcatcctttacataacagacgaggtcaacgatccctcccttaccatcaaatcaattggccaccaatggtactgaacctacgagtacaccgactacggcggactaatcttcaactcctacatacttcccccattattcctagaaccaggcgacctgcgactccttgacgttgacaatcgagtagtactcccgattgaagcccccattcgtataataattacatcacaagacgtcttgcactcatgagctgtccccacattaggcttaaaaacagatgcaattcccggacgtctaaaccaaaccactttcaccgctacacgaccgggggtatactacggtcaatgctctgaaatctgtggagcaaaccacagtttcatgcccatcgtcctagaattaattcccctaaaaatctttgaaatagggcccgtatttaccctatagcaccccctctaccccctctagagcccactgtaaagctaacttagcattaaccttttaagttaaagattaagagaaccaacacctctttacagtgaaatgccccaactaaatactaccgtatggcccaccataattacccccatactccttacactattcctcatcacccaactaaaaatattaaacacaaactaccacctacctccctcaccaaagcccataaaaataaaaaattataacaaaccctgagaaccaaaatgaacgaaaatctgttcgcttcattcattgcccccacaatcctaggcctacccgccgcagtactgatcattctatttccccctctattgatccccacctccaaatatctcatcaacaaccgactaatcaccacccaacaatgactaatcaaactaacctcaaaacaaataataaccatacacaacactaaaggacgaacctgatctcttatactagtatccttaatcatttttattgccacaactaacctcctcggactcctgcctcactcatttacaccaaccacccaactatctataaacctagccatggccatccccttatgagcgggcgcagtgattataggctttcgctctaagattaaaaatgccctagcccacttcttaccacaaggcacacctacaccccttatccccatactagttattatcgaaaccatcagcctactcattcaaccaatagccctggccgtacgcctaaccgctaacattactgcaggccacctactcatgcacctaattggaagcgccaccctagcaatatcaaccattaaccttccctctacacttatcatcttcacaattctaattctactgactatcctagaaatcgctgtcgccttaatccaagcctacgttttcacacttctagtaagcctctacctgcacgacaacacataatgacccaccaatcacatgcctatcatatagtaaaacccagcccatgacccctaacaggggccctctcagccctcctaatgacctccggcctagccatgtgatttcacttccactccataacgctcctcatactaggcctactaaccaacacactaaccatataccaatgatggcgcgatgtaacacgagaaagcacataccaaggccaccacacaccacctgtccaaaaaggccttcgatacgggataatcctatttattacctcagaagtttttttcttcgcaggatttttctgagccttttaccactccagcctagcccctaccccccaattaggagggcactggcccccaacaggcatcaccccgctaaatcccctagaagtcccactcctaaacacatccgtattactcgcatcaggagtatcaatcacctgagctcaccatagtctaatagaaaacaaccgaaaccaaataattcaagcactgcttattacaattttactgggtctctattttaccctcctacaagcctcagagtacttcgagtctcccttcaccatttccgacggcatctacggctcaacattttttgtagccacaggcttccacggacttcacgtcattattggctcaactttcctcactatctgcttcatccgccaactaatatttcactttacatccaaacatcactttggcttcgaagccgccgcctgatactggcattttgtagatgtggtttgactatttctgtatgtctccatctattgatgagggtcttactcttttagtataaatagtaccgttaacttccaattaactagttttgacaacattcaaaaaagagtaataaacttcgccttaattttaataatcaacaccctcctagccttactactaataattattacattttgactaccacaactcaacggctacatagaaaaatccaccccttacgagtgcggcttcgaccctatatcccccgcccgcgtccctttctccataaaattcttcttagtagctattaccttcttattatttgatctagaaattgccctccttttacccctaccatgagccctacaaacaactaacctgccactaatagttatgtcatccctcttattaatcatcatcctagccctaagtctggcctatgagtgactacaaaaaggattagactgaaccgaattggtatatagtttaaacaaaacgaatgatttcgactcattaaattatgataatcatatctaccaaatgcccctcatttacataaatattatactagcatttaccatctcacttctaggaatactagtatatcgctcacacctcatatcctccctactatgcctagaaggaataatactatcgctgttcattatagctactctcataaccctcaacacccactccctcttagccaatattgtgcctattgccatactagtctttgccgcctgcgaagcagcggtgggcctagccctactagtctcaatctccaacacatatggcctagactacgtacataacctaaacctactccaatgctaaaactaatcgtcccaacaattatattactaccactgacatgactttccaaaaaacacataatttgaatcaacacaaccacccacagcctaattattagcatcatccctctactattttttaaccaaatcaacaacaacctatttagctgttccccaaccttttcctccgaccccctaacaacccccctcctaatactaactacctgactcctacccctcacaatcatggcaagccaacgccacttatccagtgaaccactatcacgaaaaaaactctacctctctatactaatctccctacaaatctccttaattataacattcacagccacagaactaatcatattttatatcttcttcgaaaccacacttatccccaccttggctatcatcacccgatgaggcaaccagccagaacgcctgaacgcaggcacatacttcctattctacaccctagtaggctcccttcccctactcatcgcactgatttacactcacaacaccctaggctcactaaacattctactactcactctcactgcccaagaactatcaaactcctgagccaacaacttaatatgactagcttacacaatagcttttatagtaaagatacctctttacggactccacttatgactccctaaagcccatgtcgaagcccccatcgctgggtcaatagtacttgccgcagtactcttaaaactaggcggctatggtataatacgcctcacactcattctcaaccccctgacaaaacacatagcctaccccttccttgtactatccctatgaggcataattataacaagctccatctgcctacgacaaacagacctaaaatcgctcattgcatactcttcaatcagccacatagccctcgtagtaacagccattctcatccaaaccccctgaagcttcaccggcgcagtcattctcataatcgcccacggacttacatcctcattactattctgcctagcaaactcaaactacgaacgcactcacagtcgcatcataatcctctctcaaggacttcaaactctgctcccactaatagctttttgatgacttctagcaagcctcgctaacctcgccttaccccccactattaacctactgggagaactctctgtgctagtaaccacgttctcctgatcaaatatcactctcctacttacaggactcaacatactagtcacagccctatactccctctacatatttaccacaacacaatggggctcactcacccaccacattaacaacataaaaccctcattcacacgagaaaacaccctcatgttcatacacctatcccccattctcctcctatccctcaaccccgacatcattaccgggttttcctcttgtaaatatagtttaaccaaaacatcagattgtgaatctgacaacagaggcttacgaccccttatttaccgagaaagctcacaagaactgctaactcatgcccccatgtctaacaacatggctttctcaacttttaaaggataacagctatccattggtcttaggccccaaaaattttggtgcaactccaaataaaagtaataaccatgcacactactataaccaccctaaccctgacttccctaattccccccatccttaccaccctcgttaaccctaacaaaaaaaactcatacccccattatgtaaaatccattgtcgcatccacctttattatcagtctcttccccacaacaatattcatgtgcctagaccaagaagttattatctcgaactgacactgagccacaacccaaacaacccagctctccctaagcttcaaactagactacttctccataatattcatccctgtagcattgttcgttacatggtccatcatagaattctcactgtgatatataaactcagacccaaacattaatcagttcttcaaatatctactcatcttcctaattaccatactaatcttagttaccgctaacaacctattccaactgttcatcggctgagagggcgtaggaattatatccttcttgctcatcagttgatgatacgcccgagcagatgccaacacagcagccattcaagcaatcctatacaaccgtatcggcgatatcggtttcatcctcgccttagcatgatttatcctacactccaactcatgagacccacaacaaatagcccttctaaacgctaatccaagcctcaccccactactaggcctcctcctagcagcagcaggcaaatcagcccaattaggtctccacccctgactcccctcagccatagaaggccccaccccagtctcagccctactccactcaagcactatagttgtagcaggaatcttcttactcatccgcttccaccccctagcagaaaatagcccactaatccaaactctaacactatgcttaggcgctatcaccactctgttcgcagcagtctgcgcccttacacaaaatgacatcaaaaaaatcgtagccttctccacttcaagtcaactaggactcataatagttacaatcggcatcaaccaaccacacctagcattcctgcacatctgtacccacgccttcttcaaagccatactatttatgtgctccggatccatcatccacaaccttaacaatgaacaagatattcgaaaaataggaggactactcaaaaccatacctctcacttcaacctccctcaccattggcagcctagcattagcaggaatacctttcctcacaggtttctactccaaagaccacatcatcgaaaccgcaaacatatcatacacaaacgcctgagccctatctattactctcatcgctacctccctgacaagcgcctatagcactcgaataattcttctcaccctaacaggtcaacctcgcttccccacccttactaacattaacgaaaataaccccaccctactaaaccccattaaacgcctggcagccggaagcctattcgcaggatttctcattactaacaacatttcccccgcatcccccttccaaacaacaatccccctctacctaaaactcacagccctcgctgtcactttcctaggacttctaacagccctagacctcaactacctaaccaacaaacttaaaataaaatccccactatgcacattttatttctccaacatactcggattctaccctagcatcacacaccgcacaatcccctatctaggccttcttacgagccaaaacctgcccctactcctcctagacctaacctgactagaaaagctattacctaaaacaatttcacagcaccaaatctccacctccatcatcacctcaacccaaaaaggcataattaaactttacttcctctctttcttcttcccactcatcctaaccctactcctaatcacataacctattcccccgagcaatctcaattacaatatatacaccaacaaacaatgttcaaccagtaactactactaatcaacgcccatagtcatacaaagcccccgcaccaataggatcctcccgaatcaaccctgacccctctccttcataaattattcagcttcctacactattaaagtttaccacaaccaccaccccatcatactctttcacccacagcaccaatcctacctccatcgctaaccccactaaaacactcaccaagacctcaacccctgacccccatgcctcaggatactcctcaatagccatcgctgtagtatatccaaagacaaccatcattccccctaaataaattaaaaaaactattaaacccatataacctcccccaaaattcagaataataacacacccgaccacaccgctaacaatcaatactaaacccccataaataggagaaggcttagaagaaaaccccacaaaccccattactaaacccacactcaacagaaacaaagcatacatcattattctcgcacggactacaaccacgaccaatgatatgaaaaaccatcgttgtatttcaactacaagaacaccaatgaccccaatacgcaaaattaaccccctaataaaattaattaaccactcattcatcgacctccccaccccatccaacatctccgcatgatgaaacttcggctcactccttggcgcctgcctgatcctccaaatcaccacaggactattcctagccatacactactcaccagacgcctcaaccgccttttcatcaatcgcccacatcactcgagacgtaaattatggctgaatcatccgctaccttcacgccaatggcgcctcaatattctttatctgcctcttcctacacatcgggcgaggcctatattacggatcatttctctactcagaaacctgaaacatcggcattatcctcctgcttgcaactatagcaacagccttcataggctatgtcctcccgtgaggccaaatatcattctgaggggccacagtaattacaaacttactatccgccatcccatacattgggacagacctagttcaatgaatctgaggaggctactcagtagacagtcccaccctcacacgattctttacctttcacttcatcttgcccttcattattgcagccctagcagcactccacctcctattcttgcacgaaacgggatcaaacaaccccctaggaatcacctcccattccgataaaatcaccttccacccttactacacaatcaaagacgccctcggcttacttctcttcattctctccttaatgacattaacactattctcaccagacctcctaggcgacccagacaattataccctagccaaccccttaaacacccctccccacatcaagcccgaatgatatttcctattcgcctacacaattctccgatccgtccctaacaagctaggaggcgtccttgccctattactatccatcctcatcctagcaataatccccatcctccatatatccaaacaacaaagcataatatttcgcccactaagccaatcactttattgactcctagccgcagacctcctcattctaacctgaatcggaggacaaccagtaagctacccttttaccatcattggacaagtagcatccgtactatacttcacaacaatcctaatcctaataccaactatctccctaattgaaaacaaaatactcaaatgggcctgtccttgtagtataaactaatacaccagtcttgtaaaccgaagatgaaaacctttttccaaggacaaatcagagaaaaagtctttaactccaccattagcacccaaagctaagattctaatttaaactattctctgttctttcatggggaagcagatttgggtaccacccaagtattgactcacccatcaacaaccgctatgtatttcgtacattactgccagccaccatgaatattgcacggtaccataaatacttgaccacctgtagtacataaaaacccaatccacatcaaaaccccctccccatgcttacaagcaagtacagcaatcaaccctcaactatcacacatcaactgcaactccaaagccacccctcacccactaggataccaacaaacctacccatctttaacagcacatagtacataaagccatttaccgtacatagcacattacagtcaaatcccttctcgtccccatggatgacccccctcagataggggtcccttgaccaccatcctccgtgaaatcaatatcccgcacaagagtgctactctcctcgctccgggcccataacacttgggggtagctaaagtgaactgtatccgacatctggttcctacttcagggccataaagcctaaatagcccacacgttccccttaaataagacatcacgatg

SEQ ID NO: 91 - DNA, 16569 bp, Homo sapiens mitochondrial
  3107: "n" refers to a nucleotide at position 3107 of the Cambridge Reference Sequence (CRS, Anderson et al. 1981 Nature 290:457-465), later determined to be absent from the human mtDNA sequence according to the revised CRS (rCRS, Andrews et al. 1999 Nature Genetics 23:147); "n" therefore represents a single nucleotide deletion at a position corresponding to nucleotide 3107 of SEQ ID NO:1 as provided herein.
gatcacaggtctatcaccctattaaccactcacgggagctctccatgcatttggtattttcgtctggggggtgtgcacgcgatagcattgcgagacgctggagccggagcaccctatgtcgcagtatctgtctttgattcctgcctcatcctgttatttatcgcacctacgttcaatattacaggcgaacatacctactaaagtgtgttaattaattaatgcttgtaggacataataataacaattgaatgtctgcacagccgctttccacacagacatcataacaaaaaatttccaccaaaccccccctcccccccgcttctggccacagcacttaaacacatctctgccaaaccccaaaaacaaagaaccctaacaccagcctaaccagatttcaaattttatcttttggcggtatgcacttttaacagtcaccccccaactaacacattattttcccctcccactcccatactactaatctcatcaatacaacccccgcccatcctacccagcacacacaccgctgctaaccccataccccgaaccaaccaaaccccaaagacaccccccacagtttatgtagcttacctcctcaaagcaatacactgaaaatgtttagacgggctcacatcaccccataaacaaataggtttggtcctagcctttctattagctcttagtaagattacacatgcaagcatccccgttccagtgagttcaccctctaaatcaccacgatcaaaagggacaagcatcaagcacgcagcaatgcagctcaaaacgcttagcctagccacacccccacgggaaacagcagtgattaacctttagcaataaacgaaagtttaactaagctatactaaccccagggttggtcaatttcgtgccagccaccgcggtcacacgattaacccaagtcaatagaagccggcgtaaagagtgttttagatcaccccctccccaataaagctaaaactcacctgagttgtaaaaaactccagttgacacaaaatagactacgaaagtggctttaacatatctgaacacacaatagctaagacccaaactgggattagataccccactatgcttagccctaaacctcaacagttaaatcaacaaaactgctcgccagaacactacgagccacagcttaaaactcaaaggacctggcggtgcttcatatccctctagaggagcctgttctgtaatcgataaaccccgatcaacctcaccacctcttgctcagcctatataccgccatcttcagcaaaccctgatgaaggctacaaagtaagcgcaagtacccacgtaaagacgttaggtcaaggtgtagcccatgaggtggcaagaaatgggctacattttctaccccagaaaactacgatagcccttatgaaacttaagggtcgaaggtggatttagcagtaaactgagagtagagtgcttagttgaacagggccctgaagcgcgtacacaccgcccgtcaccctcctcaagtatacttcaaaggacatttaactaaaacccctacgcatttatatagaggagacaagtcgtaacatggtaagtgtactggaaagtgcacttggacgaaccagagtgtagcttaacacaaagcacccaacttacacttaggagatttcaacttaacttgaccgctctgagctaaacctagccccaaacccactccaccttactaccagacaaccttaaccaaaccatttacccaaataaagtataggcgatagaaattgaaacctggcgcaatagatatagtaccgcaagggaaagatgaaaaattataaccaagcataatatagcaaggactaacccctataccttctgcataatgaattaactagaaataactttgcaaggagagccaaagctaagacccccgaaaccagacgagctacctaagaacagctaaaagagcacacccgtctatgtagcaaaatagtgggaagatttataggtagaggcgacaaacctaccgagcctggtgatagctggttgtccaagatagaatcttagttcaactttaaatttgcccacagaaccctctaaatccccttgtaaatttaactgttagtccaaagaggaacagctctttggacactaggaaaaaaccttgtagagagagtaaaaaatttaacacccatagtaggcctaaaagcagccaccaattaagaaagcgttcaagctcaacacccactacctaaaaaatcccaaacatataactgaactcctcacacccaattggaccaatctatcaccctatagaagaactaatgttagtataagtaacatgaaaacattctcctccgcataagcctgcgtcagattaaaacactgaactgacaattaacagcccaatatctacaatcaaccaacaagtcattattaccctcactgtcaacccaacacaggcatgctcataaggaaaggttaaaaaaagtaaaaggaactcggcaaatcttaccccgcctgtttaccaaaaacatcacctctagcatcaccagtattagaggcaccgcctgcccagtgacacatgtttaacggccgcggtaccctaaccgtgcaaaggtagcataatcacttgttccttaaatagggacctgtatgaatggctccacgagggttcagctgtctcttacttttaaccagtgaaattgacctgcccgtgaagaggcgggcatgacacagcaagacgagaagaccctatggagctttaatttattaatgcaaacagtacctaacaaacccacaggtcctaaactaccaaacctgcattaaaaatttcggttggggcgacctcggagcagaacccaacctccgagcagtacatgctaagacttcaccagtcaaagcgaactactatactcaattgatccaataacttgaccaacggaacaagttaccctagggataacagcgcaatcctattctagagtccatatcaacaatagggtttacgacctcgatgttggatcaggacatcccgatggtgcagccgctattaaaggttcgtttgttcaacgattaaagtcctacgtgatctgagttcagaccggagtaatccaggtcggtttctatctacnttcaaattcctccctgtacgaaaggacaagagaaataaggcctacttcacaaagcgccttcccccgtaaatgatatcatctcaacttagtattatacccacacccacccaagaacagggtttgttaagatggcagagcccggtaatcgcataaaacttaaaactttacagtcagaggttcaattcctcttcttaacaacatacccatggccaacctcctactcctcattgtacccattctaatcgcaatggcattcctaatgcttaccgaacgaaaaattctaggctatatacaactacgcaaaggccccaacgttgtaggcccctacgggctactacaacccttcgctgacgccataaaactcttcaccaaagagcccctaaaacccgccacatctaccatcaccctctacatcaccgccccgaccttagctctcaccatcgctcttctattatgaacccccctccccatacccaaccccctggtcaacctcaacctaggcctcctatttattctagccacctctagcctagccgtttactcaatcctctgatcagggtgagcatcaaactcaaactacgccctgatcggcgcactgcgagcagtagcccaaacaatctcatatgaagtcaccctagccatcattctactatcaacattactaataagtggctcctttaacctctccacccttatcacaacacaagaacacctctgattactcctgccatcatgacccttggccataatatgatttatctccacactagcagagaccaaccgaacccccttcgaccttgccgaaggggagtccgaactagtctcaggcttcaacatcgaatacgccgcaggccccttcgccctattcttcatagccgaatacacaaacattattataataaacaccctcaccactacaatcttcctaggaacaacatatgacgcactctcccctgaactctacacaacatattttgtcaccaagaccctacttctaacctccctgttcttatgaattcgaacagcatacccccgattccgctacgaccaactcatacacctcctatgaaaaaacttcctaccactcaccctagcattacttatatgatatgtctccatacccattacaatctccagcattccccctcaaacctaagaaatatgtctgataaaagagttactttgatagagtaaataataggagcttaaacccccttatttctaggactatgagaatcgaacccatccctgagaatccaaaattctccgtgccacctatcacaccccatcctaaagtaaggtcagctaaataagctatcgggcccataccccgaaaatgttggttatacccttcccgtactaattaatcccctggcccaacccgtcatctactctaccatctttgcaggcacactcatcacagcgctaagctcgcactgattttttacctgagtaggcctagaaataaacatgctagcttttattccagttctaaccaaaaaaataaaccctcgttccacagaagctgccatcaagtatttcctcacgcaagcaaccgcatccataatccttctaatagctatcctcttcaacaatatactctccggacaatgaaccataaccaatactaccaatcaatactcatcattaataatcataatggctatagcaataaaactaggaatagccccctttcacttctgagtcccagaggttacccaaggcacccctctgacatccggcctgcttcttctcacatgacaaaaactagcccccatctcaatcatataccaaatctctccctcactaaacgtaagccttctcctcactctctcaatcttatccatcatagcaggcagttgaggtggattaaaccaaacccagctacgcaaaatcttagcatactcctcaattacccacataggatgaataatagcagttctaccgtacaaccctaacataaccattcttaatttaactatttatattatcctaactactaccgcattcctactactcaacttaaactccagcaccacgaccctactactatctcgcacctgaaacaagctaacatgactaacacccttaattccatccaccctcctctccctaggaggcctgcccccgctaaccggctttttgcccaaatgggccattatcgaagaattcacaaaaaacaatagcctcatcatccccaccatcatagccaccatcaccctccttaacctctacttctacctacgcctaatctactccacctcaatcacactactccccatatctaacaacgtaaaaataaaatgacagtttgaacatacaaaacccaccccattcctccccacactcatcgcccttaccacgctactcctacctatctccccttttatactaataatcttatagaaatttaggttaaatacagaccaagagccttcaaagccctcagtaagttgcaatacttaatttctgtaacagctaaggactgcaaaaccccactctgcatcaactgaacgcaaatcagccactttaattaagctaagcccttactagaccaatgggacttaaacccacaaacacttagttaacagctaagcaccctaatcaactggcttcaatctacttctcccgccgccgggaaaaaaggcgggagaagccccggcaggtttgaagctgcttcttcgaatttgcaattcaatatgaaaatcacctcggagctggtaaaaagaggcctaacccctgtctttagatttacagtccaatgcttcactcagccattttacctcacccccactgatgttcgccgaccgttgactattctctacaaaccacaaagacattggaacactatacctattattcggcgcatgagctggagtcctaggcacagctctaagcctccttattcgagccgagctgggccagccaggcaaccttctaggtaacgaccacatctacaacgttatcgtcacagcccatgcatttgtaataatcttcttcatagtaatacccatcataatcggaggctttggcaactgactagttcccctaataatcggtgcccccgatatggcgtttccccgcataaacaacataagcttctgactcttacccccctctctcctactcctgctcgcatctgctatagtggaggccggagcaggaacaggttgaacagtctaccctcccttagcagggaactactcccaccctggagcctccgtagacctaaccatcttctccttacacctagcaggtgtctcttctatcttaggggccatcaatttcatcacaacaattatcaatataaaaccccctgccataacccaataccaaacgcccctcttcgtctgatccgtcctaatcacagcagtcctacttctcctatctctcccagtcctagctgctggcatcactatactactaacagaccgcaacctcaacaccaccttcttcgaccccgccggaggaggagaccccattctataccaacacctattctgatttttcggtcaccctgaagtttatattcttatcctaccaggcttcggaataatctcccatattgtaacttactactccggaaaaaaagaaccatttggatacataggtatggtctgagctatgatatcaattggcttcctagggtttatcgtgtgagcacaccatatatttacagtaggaatagacgtagacacacgagcatatttcacctccgctaccataatcatcgctatccccaccggcgtcaaagtatttagctgactcgccacactccacggaagcaatatgaaatgatctgctgcagtgctctgagccctaggattcatctttcttttcaccgtaggtggcctgactggcattgtattagcaaactcatcactagacatcgtactacacgacacgtactacgttgtagctcacttccactatgtcctatcaataggagctgtatttgccatcataggaggcttcattcactgatttcccctattctcaggctacaccctagaccaaacctacgccaaaatccatttcactatcatattcatcggcgtaaatctaactttcttcccacaacactttctcggcctatccggaatgccccgacgttactcggactaccccgatgcatacaccacatgaaacatcctatcatctgtaggctcattcatttctctaacagcagtaatattaataattttcatgatttgagaagccttcgcttcgaagcgaaaagtcctaatagtagaagaaccctccataaacctggagtgactatatggatgccccccaccctaccacacattcgaagaacccgtatacataaaatctagacaaaaaaggaaggaatcgaaccccccaaagctggtttcaagccaaccccatggcctccatgactttttcaaaaaggtattagaaaaaccatttcataactttgtcaaagttaaattataggctaaatcctatatatcttaatggcacatgcagcgcaagtaggtctacaagacgctacttcccctatcatagaagagcttatcacctttcatgatcacgccctcataatcattttccttatctgcttcctagtcctgtatgcccttttcctaacactcacaacaaaactaactaatactaacatctcagacgctcaggaaatagaaaccgtctgaactatcttgcccgccatcatcctagtcctcatcgccctcccatccctacgcatcctttacataacagacgaggtcaacgatccctcccttaccatcaaatcaattggccaccaatggtactgaacctacgagtacaccgactacggcggactaatcttcaactcctacatacttcccccattattcctagaaccaggcgacctgcgactccttgacgttgacaatcgagtagtactcccgattgaagcccccattcgtataataattacatcacaagacgtcttgcactcatgagctgtccccacattaggcttaaaaacagatgcaattcccggacgtctaaaccaaaccactttcaccgctacacgaccgggggtatactacggtcaatgctctgaaatctgtggagcaaaccacagtttcatgcccatcgtcctagaattaattcccctaaaaatctttgaaatagggcccgtatttaccctatagcaccccctctaccccctctagagcccactgtaaagctaacttagcattaaccttttaagttaaagattaagagaaccaacacctctttacagtgaaatgccccaactaaatactaccgtatggcccaccataattacccccatactccttacactattcctcatcacccaactaaaaatattaaacacaaactaccacctacctccctcaccaaagcccataaaaataaaaaattataacaaaccctgagaaccaaaatgaacgaaaatctgttcgcttcattcattgcccccacaatcctaggcctacccgccgcagtactgatcattctatttccccctctattgatccccacctccaaatatctcatcaacaaccgactaatcaccacccaacaatgactaatcaaactaacctcaaaacaaatgataaccatacacaacactaaaggacgaacctgatctcttatactagtatccttaatcatttttattgccacaactaacctcctcggactcctgcctcactcatttacaccaaccacccaactatctataaacctagccatggccatccccttatgagcgggcgcagtgattataggctttcgctctaagattaaaaatgccctagcccacttcttaccacaaggcacacctacaccccttatccccatactagttattatcgaaaccatcagcctactcattcaaccaatagccctggccgtacgcctaaccgctaacattactgcaggccacctactcatgcacctaattggaagcgccaccctagcaatatcaaccattaaccttccctctacacttatcatcttcacaattctaattctactgactatcctagaaatcgctgtcgccttaatccaagcctacgttttcacacttctagtaagcctctacctgcacgacaacacataatgacccaccaatcacatgcctatcatatagtaaaacccagcccatgacccctaacaggggccctctcagccctcctaatgacctccggcctagccatgtgatttcacttccactccataacgctcctcatactaggcctactaaccaacacactaaccatataccaatgatggcgcgatgtaacacgagaaagcacataccaaggccaccacacaccacctgtccaaaaaggccttcgatacgggataatcctatttattacctcagaagtttttttcttcgcaggatttttctgagccttttaccactccagcctagcccctaccccccaattaggagggcactggcccccaacaggcatcaccccgctaaatcccctagaagtcccactcctaaacacatccgtattactcgcatcaggagtatcaatcacctgagctcaccatagtctaatagaaaacaaccgaaaccaaataattcaagcactgcttattacaattttactgggtctctattttaccctcctacaagcctcagagtacttcgagtctcccttcaccatttccgacggcatctacggctcaacattttttgtagccacaggcttccacggacttcacgtcattattggctcaactttcctcactatctgcttcatccgccaactaatatttcactttacatccaaacatcactttggcttcgaagccgccgcctgatactggcattttgtagatgtggtttgactatttctgtatgtctccatctattgatgagggtcttactcttttagtataaatagtaccgttaacttccaattaactagttttgacaacattcaaaaaagagtaataaacttcgccttaattttaataatcaacaccctcctagccttactactaataattattacattttgactaccacaactcaacggctacatagaaaaatccaccccttacgagtgcggcttcgaccctatatcccccgcccgcgtccctttctccataaaattcttcttagtagctattaccttcttattatttgatctagaaattgccctccttttacccctaccatgagccctacaaacaactaacctgccactaatagttatgtcatccctcttattaatcatcatcctagccctaagtctggcctatgagtgactacaaaaaggattagactgaaccgaattggtatatagtttaaacaaaacgaatgatttcgactcattaaattatgataatcatatttaccaaatgcccctcatttacataaatattatactagcatttaccatctcacttctaggaatactagtatatcgctcacacctcatatcctccctactatgcctagaaggaataatactatcgctgttcattatagctactctcataaccctcaacacccactccctcttagccaatattgtgcctattgccatactagtctttgccgcctgcgaagcagcggtgggcctagccctactagtctcaatctccaacacatatggcctagactacgtacataacctaaacctactccaatgctaaaactaatcgtcccaacaattatattactaccactgacatgactttccaaaaaacacataatttgaatcaacacaaccacccacagcctaattattagcatcatccctctactattttttaaccaaatcaacaacaacctatttagctgttccccaaccttttcctccgaccccctaacaacccccctcctaatactaactacctgactcctacccctcacaatcatggcaagccaacgccacttatccagtgaaccactatcacgaaaaaaactctacctctctatactaatctccctacaaatctccttaattataacattcacagccacagaactaatcatattttatatcttcttcgaaaccacacttatccccaccttggctatcatcacccgatgaggcaaccagccagaacgcctgaacgcaggcacatacttcctattctacaccctagtaggctcccttcccctactcatcgcactaatttacactcacaacaccctaggctcactaaacattctactactcactctcactgcccaagaactatcaaactcctgagccaacaacttaatatgactagcttacacaatagcttttatagtaaagatacctctttacggactccacttatgactccctaaagcccatgtcgaagcccccatcgctgggtcaatagtacttgccgcagtactcttaaaactaggcggctatggtataatacgcctcacactcattctcaaccccctgacaaaacacatagcctaccccttccttgtactatccctatgaggcataattataacaagctccatctgcctacgacaaacagacctaaaatcgctcattgcatactcttcaatcagccacatagccctcgtagtaacagccattctcatccaaaccccctgaagcttcaccggcgcagtcattctcataatcgcccacggacttacatcctcattactattctgcctagcaaactcaaactacgaacgcactcacagtcgcatcataatcctctctcaaggacttcaaactctactcccactaatagctttttgatgacttctagcaagcctcgctaacctcgccttaccccccactattaacctactgggagaactctctgtgctagtaaccacgttctcctgatcaaatatcactctcctacttacaggactcaacatactagtcacagccctatactccctctacatatttaccacaacacaatggggctcactcacccaccacattaacaacataaaaccctcattcacacgagaaaacaccctcatgttcatacacctatcccccattctcctcctatccctcaaccccgacatcattaccgggttttcctcttgtaaatatagtttaaccaaaacatcagattgtgaatctgacaacagaggcttacgaccccttatttaccgagaaagctcacaagaactgctaactcatgcccccatgtctaacaacatggctttctcaacttttaaaggataacagctatccattggtcttaggccccaaaaattttggtgcaactccaaataaaagtaataaccatgcacactactataaccaccctaaccctgacttccctaattccccccatccttaccaccctcgttaaccctaacaaaaaaaactcatacccccattatgtaaaatccattgtcgcatccacctttattatcagtctcttccccacaacaatattcatgtgcctagaccaagaagttattatctcgaactgacactgagccacaacccaaacaacccagctctccctaagcttcaaactagactacttctccataatattcatccctgtagcattgttcgttacatggtccatcatagaattctcactgtgatatataaactcagacccaaacattaatcagttcttcaaatatctactcattttcctaattaccatactaatcttagttaccgctaacaacctattccaactgttcatcggctgagagggcgtaggaattatatccttcttgctcatcagttgatgatacgcccgagcagatgccaacacagcagccattcaagcaatcctatacaaccgtatcggcgatatcggtttcatcctcgccttagcatgatttatcctacactccaactcatgagacccacaacaaatagcccttctaaacgctaatccaagcctcaccccactactaggcctcctcctagcagcagcaggcaaatcagcccaattaggtctccacccctgactcccctcagccatagaaggccccaccccagtctcagccctactccactcaagcactatagttgtagcaggaatcttcttactcatccgcttccaccccctagcagaaaatagcccactaatccaaactctaacactatgcttaggcgctatcaccactctgttcgcagcagtctgcgctcttacacaaaatgacatcaaaaaaatcgtagccttctccacttcaagtcaactaggactcataatagttacaatcggcatcaaccaaccacacctagcattcctgcacatctgtacccacgccttcttcaaagccatactatttatgtgctccgggtccatcatccacaaccttaacaatgaacaagatattcgaaaaataggaggactactcaaaaccatacctctcacttcaacctccctcaccattggcagcctagcattagcaggaatacctttcctcacaggtttctactccaaagaccacatcatcgaaaccgcaaacatatcatacacaaacgcctgagccctatctattactctcatcgctacctccctgacaagcgcctatagcactcgaataattcttctcaccctaacaggtcaacctcgcttccccacccttactaacattaacgaaaataaccccaccctactaaaccccattaaacgcctggcagccggaagcctattcgcaggatttctcattactaacaacatttcccccgcatcccccttccaaacaacaatccccctctacctaaaactcacagccctcgctgtcactttcctaggacttctaacagccctagacctcaactacctaaccaacaaacttaaaataaaatccccactatgcacattttatttctccaacatactcggattctaccctagcatcacacaccgcacaatcccctatctaggccttcttgcgagccaaaacctgcccctactcctcctagacctaacctgactagaaaagctattacctaaaacaatttcacagcaccaaatctccacctccatcatcacctcaacccaaaaaggcataattaaactttacttcctctctttcttcttcccactcatcctaaccctactcctaatcacataacctattcccccgagcaatctcaattacaatatatacaccaacaaacaatgttcaaccagtaactactactaatcaacgcccataatcatacaaagcccccgcaccaataggatcctcccgaatcaaccctgacccctctccttcataaattattcagcttcctacactattaaagtttaccacaaccaccaccccatcatactctttcacccacagcaccaatcctacctccatcgctaaccccactaaaacactcaccaagacctcaacccctgacccccatgcctcaggatactcctcaatagccatcgctgtagtatacccaaagacaaccatcattccccctaaataaattaaaaaaactattaaacccatataacctcccccaaaattcagaataataacacacccgaccacaccgctaacaatcaatactaaacccccataaataggagaaggcttagaagaaaaccccacaaaccccattactaaacccacactcaacagaaacaaagcatacatcattattctcgcacggactacaaccacgaccaatgatatgaaaaaccatcgttgtatttcaactacaagaacaccaatgaccccaatacgcaaaattaaccccctaataaaattaattaaccactcattcatcgacctccccaccccatccaacatctccgcatgatgaaacttcggctcactccttggcgcctgcctgatcctccaaatcaccacaggactattcctagccatgcactactcaccagacgcctcaaccgccttttcatcaatcgcccacatcactcgagacgtaaattatggctgaatcatccgctaccttcacgccaatggcgcctcaatattctttatctgcctcttcctacacatcgggcgaggcctatattacggatcatttctctactcagaaacctgaaacatcggcattatcctcctgcttgcaactatagcaacagccttcataggctatgtcctcccgtgaggccaaatatcattctgaggggccacagtaattacaaacttactatccgccatcccatacattgggacagacctagttcaatgaatctgaggaggctactcagtagacagtcccaccctcacacgattctttacctttcacttcatcttgcccttcattattgcagccctagcagcactccacctcctattcttgcacgaaacgggatcaaacaaccccctaggaatcacctcccattccgataaaatcaccttccacccttactacacaatcaaagacgccctcggcttacttctcttccttctctccttaatgacattaacactattctcaccagacctcctaggcgacccagacaattataccctagccaaccccttaaacacccctccccacatcaagcccgaatgatatttcctattcgcctacacaattctccgatccgtccctaacaaactaggaggcgtccttgccctattactatccatcctcatcctagcaataatccccatcctccatatatccaaacaacaaagcataatatttcgcccactaagccaatcactttattgactcctagccgcagacctcctcattctaacctgaatcggaggacaaccagtaagctacccttttaccatcattggacaagtagcatccgtactatacttcacaacaatcctaatcctaataccaactatctccctaattgaaaacaaaatactcaaatgggcctgtccttgtagtataaactaatacaccagtcttgtaaaccggagatgaaaacctttttccaaggacaaatcagagaaaaagtctttaactccaccattagcacccaaagctaagattctaatttaaactattctctgttctttcatggggaagcagatttgggtaccacccaagtattgactcacccatcaacaaccgctatgtatttcgtacattactgccagccaccatgaatattgtacggtaccataaatacttgaccacctgtagtacataaaaacccaatccacatcaaacccccccccccatgcttacaagcaagtacagcaatcaaccttcaactatcacacatcaactgcaactccaaagccacccctcacccactaggatatcaacaaacctacccacccttaacagtacatagtacataaagccatttaccgtacatagcacattacagtcaaatcccttctcgtccccatggatgacccccctcagataggggtcccttgaccaccatcctccgtgaaatcaatatcccgcacaagagtgctactctcctcgctccgggcccataacacttgggggtagctaaagtgaactgtatccgacatctggttcctacttcagggccataaagcctaaatagcccacacgttccccttaaataagacatcacgatg

SEQ ID NO: 92 - DNA, 16571 bp, Homo sapiens mitochondrial
  3109: "n" refers to a nucleotide at position 3107 of the Cambridge Reference Sequence (CRS, Anderson et al. 1981 Nature 290:457-465), later determined to be absent from the human mtDNA sequence according to the revised CRS (rCRS, Andrews et al. 1999 Nature Genetics 23:147); "n" therefore represents a single nucleotide deletion at a position corresponding to nucleotide 3107 of SEQ ID NO:1 as provided herein.
gatcacaggtctatcaccctattaaccactcacgggagctctccatgcatttggtattttcgtctggggggtatgcacgcgatagcattgcgagacgctggagccggagcaccctatgtcgcagtatctgtctttgattcctgcctcattctattatttatcgcacctacgttcaatattacaggcgaacatacttactaaagtgtgttaattaattaatgcttgtaggacataataataacaattgaatgtctgcacagccgctttccacacagacatcataacaaaaaatttccaccaaaccccccctcccccccgcttctggccacagcacttaaacacatctctgccaaaccccaaaaacaaagaaccctaacaccagcctaaccagatttcaaattttatcttttggcggtatgcacttttaacagtcaccccccaactaacacattattttcccctcccactcccatactactaatctcatcaatacaacccccgcccatcctacccagcacacacacaccgctgctaaccccataccccgaaccaaccaaaccccaaagacaccccccacagtttatgtagcttacctcctcaaagcaatacactgaaaatgtttagacgggctcacatcaccccataaacaaataggtttggtcctagcctttctattagctcttagtaagattacacatgcaagcatccccgttccagtgagttcaccctctaaatcaccacgatcaaaagggacaagcatcaagcacgcagcaatgcagctcaaaacgcttagcctagccacacccccacgggaaacagcagtgattaacctttagcaataaacgaaagtttaactaagctatactaaccccagggttggtcaatttcgtgccagccaccgcggtcacacgattaacccaagtcaatagaagccggcgtaaagagtgttttagatcaccccctccccaataaagctaaaactcacctgagttgtaaaaaactccagttgacacaaaatagactacgaaagtggctttaacatatctgaacacacaatagctaagacccaaactgggattagataccccactatgcttagccctaaacctcaacagttaaatcaacaaaactgctcgccagaacactacgagccacagcttaaaactcaaaggacctggcggtgcttcatatccctctagaggagcctgttctgtaatcgataaaccccgatcaacctcaccacctcttgctcagcctatataccgccatcttcagcaaaccctgatgaaggctacaaagtaagcgcaagtacccacgtaaagacgttaggtcaaggtgtagcccatgaggtggcaagaaatgggctacattttctaccccagaaaactacgatagcccttatgaaacttaagggtcgaaggtggatttagcagtaaactgagagtagagtgcttagttgaacagggccctgaagcgcgtacacaccgcccgtcaccctcctcaagtatacttcaaaggacatttaactaaaacccctacgcatttatatagaggagacaagtcgtaacatggtaagtgtactggaaagtgcacttggacgaaccagagtgtagcttaacacaaagcacccaacttacacttaggagatttcaacttaacttgaccgctctgagctaaacctagccccaaacccactccaccttactaccagacaaccttagccaaaccatttacccaaataaagtataggcgatagaaattgaaacctggcgcaatagatatagtaccgcaagggaaagatgaaaaattataaccaagcataatatagcaaggactaacccctataccttctgcataatgaattaactagaaataactttgcaaggagagccaaagctaagacccccgaaaccagacgagctacctaagaacagctaaaagagcacacccgtctatgtagcaaaatagtgggaagatttataggtagaggcgacaaacctaccgagcctggtgatagctggttgtccaagatagaatcttagttcaactttaaatttgcccacagaaccctctaaatccccttgtaaatttaactgttagtccaaagaggaacagctctttggacactaggaaaaaaccttgtagagagagtaaaaaatttaacacccatagtaggcctaaaagcagccaccaattaagaaagcgttcaagctcaacacccactacctaaaaaatcccaaacatataactgaactcctcacacccaattggaccaatctatcaccctatagaagaactaatgttagtataagtaacatgaaaacattctcctccgcataagcctgcgtcagattaaaacactgaactgacaattaacagcccaatatctacaatcaaccaacaagtcattattaccctcactgtcaacccaacacaggcatgctcataaggaaaggttaaaaaaagtaaaaggaactcggcaaatcttaccccgcctgtttaccaaaaacatcacctctagcatcaccagtattagaggcaccgcctgcccagtgacacatgtttaacggccgcggtaccctaaccgtgcaaaggtagcataatcacttgttccttaaatagggacctgtatgaatggctccacgagggttcagctgtctcttacttttaaccagtgaaattgacctgcccgtgaagaggcgggcataacacagcaagacgagaagaccctatggagctttaatttattaatgcaaacagtacctaacaaacccacaggtcctaaactaccaaacctgcattaaaaatttcggttggggcgacctcggagcagaacccaacctccgagcagtacatgctaagacttcaccagtcaaagcgaactactatactcaattgatccaataacttgaccaacggaacaagttaccctagggataacagcgcaatcctattctagagtccatatcaacaatagggtttacgacctcgatgttggatcaggacatcccaatggtgcagccgctattaaaggttcgtttgttcaacgattaaagtcctacgtgatctgagttcagaccggagtaatccaggtcggtttctatctacnttcaaattcctccctgtacgaaaggacaagagaaataaggcctacttcacaaagcgccttcccccgtaaatgatatcatctcaacttagtattatacccacacccacccaagaacagggtttgttaagatggcagagcccggtaatcgcataaaacttaaaactttacagtcagaggttcaattcctcttcttaacaacatacccatggccaacctcctactcctcattgtacccattctaatcgcaatggcattcctaatgcttaccgaacgaaaaattctaggctatatacaactacgcaaaggccccaacgttgtaggcccctacgggctactacaacccttcgctgacgccataaaactcttcaccaaagagcccctaaaacccgccacatctaccatcaccctctacatcaccgccccgaccttagctctcaccatcgctcttctactatgaacccccctccccatacccaaccccctggtcaacctcaacctaggcctcctatttattctagccacctctagcctagccgtttactcaatcctctgatcagggtgagcatcaaactcaaactacgccctgatcggcgcactgcgagcagtagcccaaacaatctcatatgaagtcaccctagccatcattctactatcaacattactaataagtggctcctttaacctctccacccttatcacaacacaagaacacctctgattactcctgccatcatgacccttggccataatatgatttatctccacactagcagagaccaaccgaacccccttcgaccttgccgaaggggagtccgaactagtctcaggcttcaacatcgaatacgccgcaggccccttcgccctattcttcatagccgaatacacaaacattattataataaacaccctcaccactacaatcttcctaggaacaacatatgacgcactctcccctgaactctacacaacatattttgtcaccaagaccctacttctaacctccctgttcttatgaattcgaacagcatacccccgattccgctacgaccaactcatacacctcctatgaaaaaacttcctaccactcaccctagcattacttatatgatatgtctccatacccattacaatctccagcattccccctcaaacctaagaaatatgtctgataaaagagttactttgatagagtaaataataggagcttaaacccccttatttctaggactatgagaatcgaacccatccctgagaatccaaaattctccgtgccacctatcacaccccatcctaaagtaaggtcagctaaataagctatcgggcccataccccgaaaatgttggttatacccttcccgtactaattaatcccctggcccaacccgtcatctactctaccatctttgcaggcacactcatcacagcgctaagctcgcactgattttttacctgagtaggcctagaaataaacatgctagcttttattccagttctaaccaaaaaaataaaccctcgttccacagaagctgccatcaagtatttcctcacgcaagcaaccgcatccataatccttctaatagctatcctcttcaacaatatactctccggacaatgaaccataaccaatactaccaatcaatactcatcattaataatcataatggctatagcaataaaactaggaatagccccctttcacttctgagtcccagaggttacccaaggcacccctctgacatccggcctgcttcttctcacatgacaaaaactagcccccatctcaatcatataccaaatctctccctcactaaacgtaagccttctcctcactctctcaatcttatccatcatagcaggcagttgaggtggattaaaccaaacccagctacgcaaaatcttagcatactcctcaattacccacataggatgaataatagcagttctaccgtacaaccctaacataaccattcttaatttaactatttatattatcctaactactaccgcattcctactactcaacttaaactccagcaccacgaccctactactatctcgcacctgaaacaagctaacatgactaacacccttaattccatccaccctcctctccctaggaggcctgcccccgctaaccggctttttgcccaaatgggccattatcgaagaattcacaaaaaacaatagcctcatcatccccaccatcatagccaccatcaccctccttaacctctacttctacctacgcctaatctactccacctcaatcacactactccccatatctaacaacgtaaaaataaaatgacagtttgaacatacaaaacccaccccattcctccccacactcatcgcccttaccacgctactcctacctatctccccttttatactaataatcttatagaaatttaggttaaatacagaccaagagccttcaaagccctcagtaagttgcaatacttaatttctgtaacagctaaggactgcaaaaccccactctgcatcaactgaacgcaaatcagccactttaattaagctaagcccttactagaccaatgggacttaaacccacaaacacttagttaacagctaagcaccctaatcaactggcttcaatctacttctcccgccgccgggaaaaaaggcgggagaagccccggcaggtttgaagctgcttcttcgaatttgcaattcaatatgaaaatcacctcggagctggtaaaaagaggcctaacccctgtctttagatttacagtccaatgcttcactcagccattttacctcacccccactgatgttcgccgaccgttgactattctctacaaaccacaaagacattggaacactatacctattattcggcgcatgagctggagtcctaggcacagctctaagcctccttattcgagccgagctgggccagccaggcaaccttctaggtaacgaccacatctacaacgttatcgtcacagcccatgcatttgtaataatcttcttcatagtaatacccatcataatcggaggctttggcaactgactagttcccctaataatcggtgcccccgatatggcgtttccccgcataaacaacataagcttctgactcttacctccctctctcctactcctgctcgcatctgctatagtggaggccggagcaggaacaggttgaacagtctaccctcccttagcagggaactactcccaccctggagcctccgtagacctaaccatcttctccttacacctagcaggtgtctcctctatcttaggggccatcaatttcatcacaacaattatcaatataaaaccccctgccataacccaataccaaacgcccctcttcgtctgatccgtcctaatcacagcagtcctacttctcctatctctcccagtcctagctgctggcatcactatactactaacagaccgcaacctcaacaccaccttcttcgaccccgccggaggaggagaccccattctataccaacacctattctgatttttcggtcaccctgaagtttatattcttatcctaccaggcttcggaataatctcccatattgtaacttactactccggaaaaaaagaaccatttggatacataggtatggtctgagctatgatatcaattggcttcctagggtttatcgtgtgagcacaccatatatttacagtaggaatagacgtagacacacgagcatatttcacctccgctaccataatcatcgctatccccaccggcgtcaaagtatttagctgactcgccacactccacggaagcaatatgaaatgatctgctgcagtgctctgagccctaggattcatctttcttttcaccgtaggtggcctgactggcattgtattagcaaactcatcactagacatcgtactacacgacacgtactacgttgtagcccacttccactatgtcctatcaataggagctgtatttgccatcataggaggcttcattcactgatttcccctattctcaggctacaccctagaccaaacctacgccaaaatccatttcactatcatattcatcggcgtaaatctaactttcttcccacaacactttctcggcctatccggaatgccccgacgttactcggactaccccgatgcatacaccacatgaaacatcctatcatctgtaggctcattcatttctctaacagcagtaatattaataattttcatgatttgagaagccttcgcttcgaagcgaaaagtcctaatagtagaagaaccctccataaacctggagtgactatatggatgccccccaccctaccacacattcgaagaacccgtatacataaaatctagacaaaaaaggaaggaatcgaaccccccaaagctggtttcaagccaaccccatggcctccatgactttttcaaaaaggtattagaaaaaccatttcataactttgtcaaagttaaattataggctaaatcctatatatcttaatggcacatgcagcgcaagtaggtctacaagacgctacttcccctatcatagaagagcttatcacctttcatgatcacgccctcataatcattttccttatctgcttcctagtcctgtatgcccttttcctaacactcacaacaaaactaactaatactaacatctcagacgctcaggaaatagaaaccgtctgaactatcctgcccgccatcatcctagtcctcatcgccctcccatccctacgcatcctttacataacagacgaggtcaacgatccctcccttaccatcaaatcaattggccaccaatggtactgaacctacgagtacaccgactacggcggactaatcttcaactcctacatacttcccccattattcctagaaccaggcgacctgcgactccttgacgttgacaatcgagtagtactcccgattgaagcccccattcgtataataattacatcacaagacgtcttgcactcatgagctgtccccacattaggcttaaaaacagatgcaattcccggacgtctaaaccaaaccactttcaccgctacacgaccgggggtatactacggtcaatgctctgaaatctgtggagcaaaccacagtttcatgcccatcgtcctagaattaattcccctaaaaatctttgaaatagggcccgtatttaccctatagcaccccctctaccccctctagagcccactgtaaagctaacttagcattaaccttttaagttaaagattaagagaaccaacacctctttacagtgaaatgccccaactaaatactaccgtatggcccaccataattacccccatactccttacactattcctcatcacccaactaaaaatattaaacacaaactaccacctacctccctcaccaaagcccataaaaataaaaaattataacaaaccctgagaaccaaaatgaacgaaaatctgttcgcttcattcattgcccccacaatcctaggcctacccgccgcagtactgatcattctacttccccctctattgatccccacctccaaatatctcatcaacaaccgactaatcaccacccaacaatgactaatcaaactaacctcaaaacaaatgataaccatacacaacactaaaggacgaacctgatctcttatactagtatccttaatcatttttattgccacaactaacctcctcggactcctgcctcactcatttacaccaaccacccaactatctataaacctagccatggccatccccttatgagcgggcgcagtgattataggctttcgctctaagattaaaaatgccctagcccacttcttaccacaaggcacacctacaccccttatccccatactagttattatcgaaaccatcagcctactcattcaaccaatagccctggccgtacgcctaaccgctaacattactgcaggccacctactcatgcacctaattggaagcgccaccctagcaatatcaaccattaaccttccctctacacttatcatcttcacaattctaattctactgactatcctagaaatcgctgtcgccttaatccaagcctacgttttcacacttctagtaagcctctacctgcacgacaacacataatgacccaccaatcacatgcctatcatatagtaaaacccagcccatgacccctaacaggggccctctcagccctcctaatgacctccggcctagccatgtgatttcacttccactccataacgctcctcatactaggcctactaaccaacacactaaccatataccaatgatggcgcgatgtaacacgagaaagcacataccaaggccaccacacaccacctgtccaaaaaggccttcgatacgggataatcctatttattacctcagaagtttttttcttcgcaggatttttctgagccttttaccactccagcctagcccctaccccccaattaggagggcactggcccccaacaggcatcaccccgctaaatcccctagaagtcccactcctaaacacatccgtattactcgcatcaggagtatcaatcacctgagctcaccatagtctaatagaaaacaaccgaaaccaaataattcaagcactgcttattacaattttactgggtctctattttaccctcctacaagcctcagagtacttcgagtctcccttcaccatttccgacggcatctacggctcaacattttttgtagccacaggcttccacggacttcacgtcattattggctcaactttcctcactatctgcttcatccgccaactaatatttcactttacatccaaacatcactttggcttcgaagccgccgcctgatactggcattttgtagatgtggtttgactatttctgtatgtctccatctattgatgagggtcttactcttttagtataaatagtaccgttaacttccaattaactagttttgacaacattcaaaaaagagtaataaacttcgccttaattttaataatcaacaccctcctagccttactactaataattattacattttgactaccacaactcaacggctacatagaaaaatccaccccttacgagtgcggcttcgaccctatatcccccgcccgcgtccctttctccataaaattcttcttagtagctattaccttcttattatttgatctagaaattgccctccttttacccctaccatgagccctacaaacaactaacctgccactaatagttatgtcatccctcttattaatcatcatcctagccctaagtctggcctatgagtgactacaaaaaggattagactgaaccgaattggtatatagtttaaacaaaacgaatgatttcgactcattaaattatgataatcatatttaccaaatgcccctcatttacataaatattatactagcatttaccatctcacttctaggaatactagtatatcgctcacacctcatatcctccctactatgcctagaaggaataatactatcgctgttcattatagctactctcataaccctcaacacccactccctcttagccaatattgtgcctattgccatactagtctttgccgcctgcgaagcagcggtgggcctagccctactagtctcaatctccaacacatatggcctagactacgtacataacctaaacctactccaatgctaaaactaatcgtcccaacaattatattactaccactgacatgactttccaaaaaacacataatttgaatcaacacaaccacccacagcctaattattagcatcatccctctactattttttaaccaaatcaacaacaacctatttagctgttccccaaccttttcctccgaccccctaacaacccccctcctaatactaactacctgactcctacccctcacaatcatggcaagccaacgccacttatccagtgaaccactatcacgaaaaaaactctacctctctatactaatctccctacaaatctccttaattataacattcacagccacagaactaatcatattttatatcttcttcgaaaccacacttatccccaccttggctatcatcacccgatgaggcaaccagccagaacgcctgaacgcaggcacatacttcctattctacaccctagtaggctcccttcccctactcatcgcactaatttacactcacaacaccctaggctcactaaacattctactactcactctcactgcccaagaactatcaaactcctgagccaacaacttaatatgactagcttacacaatagcttttatagtaaagatacctctttacggactccacttatgactccctaaagcccatgtcgaagcccccatcgctgggtcaatagtacttgccgcagtactcttaaaactaggcggctatggtataatacgcctcacactcattctcaaccccctgacaaaacacatagcctaccccttccttgtactatccctatgaggcataattataacaagctccatctgcctacgacaaacagacctaaaatcgctcattgcatactcttcaatcagccacatagccctcgtagtaacagccattctcatccaaaccccctgaagcttcaccggcgcagtcattctcataatcgcccacgggcttacatcctcattactattctgcctagcaaactcaaactacgaacgcactcacagtcgcatcataatcctctctcaaggacttcaaactctactcccactaatagctttttgatgacttctagcaagcctcgctaacctcgccttaccccccactattaacctactgggagaactctctgtgctagtaaccacgttctcctgatcaaatatcactctcctacttacaggactcaacatactagtcacagccctatactccctctacatatttaccacaacacaatggggctcactcacccaccacattaacaacataaaaccctcattcacacgagaaaacaccctcatgttcatacacctatcccccattctcctcctatccctcaaccccgacatcattaccgggttttcctcttgtaaatatagtttaaccaaaacatcagattgtgaatctgacaacagaggcttacgaccccttatttaccgagaaagctcacaagaactgctaactcatgcccccatgtctaacaacatggctttctcaacttttaaaggataacagctatccattggtcttaggccccaaaaattttggtgcaactccaaataaaagtaataaccatgcacactactataaccaccctaaccctgacttccctaattccccccatccttaccaccctcgttaaccctaacaaaaaaaactcatacccccattatgtaaaatccattgtcgcatccacctttattatcagtctcttccccacaacaatattcatgtgcctagaccaagaagttattatctcgaactgacactgagccacaacccaaacaacccagctctccctaagcttcaaactagactacttctccataatattcatccctgtagcattgttcgttacatggtccatcatagaattctcactgtgatatataaactcagacccaaacattaatcagttcttcaaatatctactcatcttcctaattaccatactaatcttagttaccgctaacaacctattccaactgttcatcggctgagagggcgtaggaattatatccttcttgctcatcagttgatgatacgcccgagcagatgccaacacagcagccattcaagcaatcctatacaaccgtatcggcgatatcggtttcatcctcgccttagcatgatttatcctacactccaactcatgagacccacaacaaatagcccttctaaacgctaatccaagcctcaccccactactaggcctcctcctagcagcagcaggcaaatcagcccaattaggtctccacccctgactcccctcagccatagaaggccccaccccagtctcagccctactccactcaagcactatagttgtagcaggaatcttcttactcatccgcttccaccccctagcagaaaatagcccactaatccaaactctaacactatgcttaggcgctatcaccactctgttcgcagcagtctgcgcccttacacaaaatgacatcaaaaaaatcgtagccttctccacttcaagtcaactaggactcataatagttacaatcggcatcaaccaaccacacctagcattcctgcacatctgtacccacgccttcttcaaagccatactatttatgtgctccgggtccatcatccacaaccttaacaatgaacaagatattcgaaaaataggaggactactcaaaaccatacctctcacttcaacctccctcaccattggcagcctagcattagcaggaatacctttcctcacaggtttctactccaaagaccacatcatcgaaaccgcaaacatatcatacacaaacgcctgagccctatctattactctcatcgctacctccctgacaagcgcctatagcactcgaataattcttctcaccctaacaggtcaacctcgcttccccacccttactaacattaacgaaaataaccccaccctactaaaccccattaaacgcctggcagccggaagcctattcgcaggatttctcattactaacaacatttcccccgcatcccccttccaaacaacaatccccctctacctaaaactcacagccctcgctgtcactttcctaggacttctaacagccctagacctcaactacctaaccaacaaacttaaaataaaatccccactatgcacattttatttctccaacatactcggattctaccctagcatcacacaccgcacaatcccctatctaggccttcttacgagccaaaacctgcccctactcctcctagacctaacctgactagaaaagctattacctaaaacaatttcacagcaccaaatctccacctccatcatcacctcaacccaaaaaggcataattaaactttacttcctctctttcttcttcccactcatcctaaccctactcctaatcacataacctattcccccgagcaatctcaattacaatatatacaccaacaaacaatgttcaaccagtaaccactactaatcaacgcccataatcatacaaagcccccgcaccaataggatcctcccgaatcaaccctgacccctctccttcataaattattcagcttcctacactattaaagtttaccacaaccaccaccccatcatactctttcacccacagcaccaatcctacctccatcgctaaccccactaaaacactcaccaagacctcaacccctgacccccatgcctcaggatactcctcaatagccatcgctgtagtatatccaaagacaaccatcattccccctaaataaattaaaaaaactattaaacccatataacctcccccaaaattcagaataataacacacccgaccacaccgctaacaatcaatactaaacccccataaataggagaaggcttagaagaaaaccccacaaaccccattactaaacccacactcaacagaaacaaagcatacatcattattctcgcacggactacaaccacgaccaatgatatgaaaaaccatcgttgtatttcaactacaagaacaccaatgaccccaatacgcaaaactaaccccctaataaaattaattaaccactcattcatcgacctccccaccccatccaacatctccgcatgatgaaacttcggctcactccttggcgcctgcctgatcctccaaatcaccacaggactattcctagccatgcactactcaccagacgcctcaaccgccttttcatcaatcgcccacatcactcgagacgtaaattatggctgaatcatccgctaccttcacgccaatggcgcctcaatattctttatctgcctcttcctacacatcgggcgaggcctatattacggatcatttctctactcagaaacctgaaacatcggcattatcctcctgcttgcaactatagcaacagccttcataggctatgtcctcccgtgaggccaaatatcattctgaggggccacagtaattacaaacttactatccgccatcccatacattgggacagacctagttcaatgaatctgaggaggctactcagtagacagtcccaccctcacacgattctttacctttcacttcatcttgcccttcattattgcagccctagcagcactccacctcctattcttgcacgaaacgggatcaaacaaccccctaggaatcacctcccattccgataaaatcaccttccacccttactacacaatcaaagacgccctcggcttacttctcttccttctctccttaatgacattaacactattctcaccagacctcctaggcgacccagacaattataccctagccaaccccttaaacacccctccccacatcaagcccgaatgatatttcctattcgcctacacaattctccgatccgtccctaacaaactaggaggcgtccttgccctattactatccatcctcatcctagcaataatccccatcctccatatatccaaacaacaaagcataatatttcgcccactaagccaatcactttattgactcctagccgcagacctcctcattctaacctgaatcggaggacaaccagtaagctacccttttaccatcattggacaagtagcatccgtactatacttcacaacaatcctaatcctaataccaactatctccctaattgaaaacaaaatactcaaatgggcctgtccttgtagtataaactaatacaccagtcttgtaaaccggagatgaaaacctttttccaaggacaaatcagagaaaaagtctttaactccaccattagcacccaaagctaagattctaatttaaactattctctgttctttcatggggaagcagatttgggtaccacccaagtattgactcacccatcaacaaccgctatgtatttcgtacattactgccagccaccatgaatattgtacggtaccataaatacttgaccacctgtagtacataaaaacccaatccacatcaaacccccccccccatgcttacaagcaagtacagcaatcaaccctcaactatcacacatcaactgcaactccaaagccacccctcacccactaggataccaacaaacctacccacccttaacagtacatagtacataaagccatttaccgtacatagcacattacagtcaaatcccttctcgtccccatggatgacccccctcagataggggtcccttgaccaccatcctccgtgaaatcaatatcccgcacaagagtgctactctcctcgctccgggcccataacacttgggggtagctaaagtgaactgtatccgacatctggttcctacttcagggccataaagcctaaatagcccacacgttccccttaaataagacatcacgatg

SEQ ID NO: 93 - DNA, 16569 bp, Homo sapiens mitochondrial
  3107: "n" refers to a nucleotide at position 3107 of the Cambridge Reference Sequence (CRS, Anderson et al. 1981 Nature 290:457-465), later determined to be absent from the human mtDNA sequence according to the revised CRS (rCRS, Andrews et al. 1999 Nature Genetics 23:147); "n" therefore represents a single nucleotide deletion at a position corresponding to nucleotide 3107 of SEQ ID NO:1 as provided herein.
gatcacaggtctatcaccctattaaccactcacgggagctctccatgcatttggtattttcgtctggggggtgtgcacgcgatagcattgcgagacgctggagccggagcaccctatgtcgcagtatctgtctttgattcctgcctcatcctattatttatcgcacctacgttcaatattacaggcgaacatacttactaaagtgtgttaattaattaatgcttgtaggacataataataacaattgaatgtctgcacagccgctttccacacagacatcataacaaaaaatttccaccaaaccccccctcccccccgcttctggccacagcacttaaacacatctctgccaaaccccaaaaacaaagaaccctaacaccagcctaaccagatttcaaattttatcttttggcggtatgcacttttaacagtcaccccccaactaacacattattttcccctcccactcccatactactaatctcatcaatacaacccccgcccatcctacccagcacacacaccgctgctaaccccataccccgaaccaaccaaaccccaaagacaccccccacagtttatgtagcttacctcctcaaagcaatacactgaaaatgtttagacgggctcacatcaccccataaacaaataggtttggtcctagcctttctattagctcttagtaagattacacatgcaagcatccccgatccagtgagttcaccctctaaatcaccacgatcaaaagggacaagcatcaagcacgcagcaatgcagctcaaaacgcttagcctagccacacccccacgggaaacagcagtgattaacctttagcaataaacgaaagtttaactaagctatactaaccccagggttggtcaatttcgtgccagccaccgcggtcacacgattaacccaagtcaatagaagccggcgtaaagagtgttttagatcaccccctccccaataaagctaaaactcacctgagttgtaaaaaactccagttgacacaaaatagactacgaaagtggctttaacatatctgaacacacaatagctaagacccaaactgggattagataccccactatgcttagccctaaacctcaacagttaaatcaacaaaactgctcgccagaacactacgagccacagcttaaaactcaaaggacctggcggtgcttcatatccctctagaggagcctgttctgtaatcgataaaccccgatcaacctcaccacctcttgctcagcctatataccgccatcttcagcaaaccctgatgaaggctacaaagtaagcgcaagtacccacgtaaagacgttaggtcaaggtgtagcccatgaggtggcaagaaatgggctacattttctaccccagaaaactacgatagcccttatgaaacttaagggtcgaaggtggatttagcagtaaactgagagtagagtgcttagttgaacagggccctgaagcgcgtacacaccgcccgtcaccctcctcaagtatacttcaaaggacatttaactaaaacccctacgcatttatatagaggagacaagtcgtaacatggtaagtgtactggaaagtgcacttggacgaaccagagtgtagcttaacacaaagcacccaacttacacttaggagatttcaacttaacttgaccgctctgagctaaacctagccccaaacccactccaccttactaccagacaaccttagccaaaccatttacccaaataaagtataggcgatagaaattgaaacctggcgcaatagatatagtaccgcaagggaaagatgaaaaattataaccaagcataatatagcaaggactaacccctataccttctgcataatgaattaactagaaataactttgcaaggagagccaaagctaagacccccgaaaccagacgagctacctaagaacagctaaaagagcacacccgtctatgtagcaaaatagtgggaagatttataggtagaggcgacaaacctaccgagcctggtgatagctggttgtccaagatagaatcttagttcaactttaaatttgcccacagaaccctctaaatccccttgtaaatttaactgttagtccaaagaggaacagctctttggacactaggaaaaaaccttgtagagagagtaaaaaatttaacacccatagtaggcctaaaagcagccaccaattaagaaagcgttcaagctcaacacccactacctaaaaaatcccaaacatataactgaactcctcacacccaattggaccaatctatcaccctatagaagaactaatgttagtataagtaacatgaaaacattctcctccgcataagcctgcgtcagattaaaacactgaactgacaattaacagcccaatatctacaatcaaccaacaagtcattattaccctcactgtcaacccaacacaggcatgctcataaggaaaggttaaaaaaagtaaaaggaactcggcaaatcttaccccgcctgtttaccaaaaacatcacctctagcatcaccagtattagaggcaccgcctgcccagtgacacatgtttaacggccgcggtaccctaaccgtgcaaaggtagcataatcacttgttccttaaatagggacctgtatgaatggctccacgagggttcagctgtctcttacttttaaccagtgaaattgacctgcccgtgaagaggcgggcataacacagcaagacgagaagaccctatggagctttaatttattaatgcaaacagtacctaacaaacccacaggtcctaaactaccaaacctgcattaaaaatttcggttggggcgacctcggagcagaacccaacctccgagcagtacatgctaagacttcaccagtcaaagcgaactactatactcaattgatccaataacttgaccaacggaacaagttaccctagggataacagcgcaatcctattctagagtccatatcaacaatagggtttacgacctcgatgttggatcaggacatcccgatggtgcagccgctattaaaggttcgtttgttcaacgattaaagtcctacgtgatctgagttcagaccggagtaatccaggtcggtttctatctacnttcaaattcctccctgtacgaaaggacaagagaaataaggcctacttcacaaagcgccttcccccgtaaatgatatcatctcaacttagtattatacccacacccacccaagaacagggtttgttaagatggcagagcccggtaatcgcataaaacttaaaactttacagtcagaggttcaattcctcttcttaacaacatacccatggccaacctcctactcctcattgtacccattctaatcgcaatggcattcctaatgcttaccgaacgaaaaattctaggctatatacaactacgcaaaggccccaacgttgtaggcccctacgggctactacaacccttcgctgacgccataaaactcttcaccaaagagcccctaaaacccgccacatctaccatcaccctctacatcaccgccccgaccttagctctcaccatcgctcttctactatgaacccccctccccatacccaaccccctggtcaacctcaacctaggcctcctatttattctagccacctctagcctagccgtttactcaatcctctgatcagggtgagcatcaaactcaaactacgccctgatcggcgcactgcgagcagtagcccaaacaatctcatatgaagtcaccctagccatcattctactatcaacattactaataagtggctcctttaacctctccacccttatcacaacacaagaacacctctgattactcctgccatcatgacccttggccataatatgatttatctccacactagcagagaccaaccgaacccccttcgaccttgccgaaggggagtccgaactagtctcaggcttcaacatcgaatacgccgcaggccccttcgccctattcttcatagccgaatacataaacattattataataaacaccctcaccactgcaatcttcctaggaacaacatatgacgcactctcccctgaactctacacaacatattttgtcaccaagaccctacttctaacctccctgttcttatgaattcgaacagcatacccccgattccgctacgaccaactcatacacctcctatgaaaaaacttcctaccactcaccctagcattacttatatgatatgtctccatacccattacaatctccagcattccccctcaaacctaagaaatatgtctgataaaagagttactttgatagagtaaataataggagcttaaacccccttatttctaggactatgagaatcgaacccatccctgagaatccaaaattctccgtgccacctatcacaccccatcctaaagtaaggtcagctaaataagctatcgggcccataccccgaaaatgttggttatacccttcccgtactaattaatcccctggcccaacccgtcatctactctaccatctttgcaggcacactcatcacagcgctaagctcgcactgattttttacctgagtaggcctagaaataaacatgctagcttttattccagttctaaccaaaaaaataaaccctcgttccacagaagctgccatcaagtatttcctcacgcaagcaaccgcatccataatccttctaatagctatcctcttcaacaatatactctccggacaatgaaccataaccaatactaccaatcaatactcatcattaataatcataatggctatagcaataaaactaggaatagccccctttcacttctgagtcccagaggttacccaaggcacccctctgacatccggcctgcttcttctcacatgacaaaaactagcccccatctcaatcatataccaaatctctccctcactaaacgtaagccttctcctcactctctcaatcttatccatcatagcaggcagttgaggtggattaaaccaaacccagctacgcaaaatcctagcatactcctcaattacccacataggatgaataatagcagttctaccgtacaaccctaacataaccattcttaatttaactatttatattatcctaactactaccgcattcctactactcaacttaaactccagcaccacgaccctactactatctcgcacctgaaacaagctaacatgactaacacccttaattccatccaccctcctctccctaggaggcctgcccccgctaaccggctttttgcccaaatgggccattatcgaagaattcacaaaaaacaatagcctcatcatccccaccatcatagccaccatcaccctccttaacctctacttctacctacgcctaatctactccacctcaatcacactactccccatatctaacaacgtaaaaataaaatgacagtttgaacatacaaaacccaccccattcctccccacactcatcgcccttaccacgctactcctacctatctccccttttatactaataatcttatagaaatttaggttaaatacagaccaagagccttcaaagccctcagtaagttgcaatacttaatttctgtaacagctaaggactgcaaaaccccactctgcatcaactgaacgcaaatcagccactttaattaagctaagcccttactagaccaatgggacttaaacccacaaacacttagttaacagctaagcaccctaatcaactggcttcaatctacttctcccgccgccgggaaaaaaggcgggagaagccccggcaggtttgaagctgcttcttcgaatttgcaattcaatatgaaaatcacctcggagctggtaaaaagaggcctaacccctgtctttagatttacagtccaatgcttcactcagccattttacctcacccccactgatgttcgccgaccgttgactattctctacaaaccacaaagacattggaacactatacctattattcggcgcatgagctggagtcctaggcacagctctaagcctccttattcgagccgagctgggccagccaggcaaccttctaggtaacgaccacatctacaacgttatcgtcacagcccatgcatttgtaataatcttcttcatagtaatacccatcataatcggaggctttggcaactgactagttcccctaataatcggtgcccccgatatggcgtttccccgcataaacaacataagcttctgactcttacctccctctctcctactcctgctcgcatctgctatagtggaggccggagcaggaacaggttgaacagtctaccctcccttagcagggaactactcccaccctggagcctccgtagacctaaccatcttctccttacacctagcaggtgtctcctctatcttaggggccatcaatttcatcacaacaattatcaatataaaaccccctgccataacccaataccaaacgcccctcttcgtctgatccgtcctaatcacagcagtcctacttctcctatctctcccagtcctagctgctggcatcactatactactaacagaccgcaacctcaacaccaccttcttcgaccccgccggaggaggagaccccattctataccaacacctattctgatttttcggtcaccctgaagtttatattcttatcctaccaggcttcggaataatctcccatattgtaacttactactccggaaaaaaagaaccatttggatacataggtatggtctgagctatgatatcaattggcttcctagggtttatcgtgtgagcacaccatatatttacagtaggaatagacgtagacacacgagcatatttcacctccgctaccataatcatcgctatccccaccggcgtcaaagtatttagctgactcgccacactccacggaagcaatatgaaatgatctgctgcagtgctctgagccctaggattcatctttcttttcaccgtaggtggcctgactggcattgtattagcaaactcatcactagacatcgtactacacgacacgtactacgttgtagcccacttccactatgtcctatcaataggagctgtatttgccatcataggaggcttcattcactgatttcccctattctcaggctacaccctagaccaaacctacgccaaaatccatttcactatcatattcatcggcgtaaatctaactttcttcccacaacactttctcggcctatccggaatgccccgacgttactcggactaccccgatgcatacaccacatgaaacatcctatcatctgtaggctcattcatttctctaacagcagtaatattaataattttcatgatttgagaagccttcgcttcgaagcgaaaagtcctaatagtagaagaaccctccataaacctggagtgactatatggatgccccccaccctaccacacattcgaagaacccgtatacataaaatctagacaaaaaaggaaggaatcgaaccccccaaagctggtttcaagccaaccccatggcctccatgactttttcaaaaaggtattagaaaaaccatttcataactttgtcaaagttaaattataggctaaatcctatatatcttaatggcacatgcagcgcaagtaggtctacaagacgctacttcccctatcatagaagagcttatcacctttcatgatcacgccctcataatcattttccttatctgcttcctagtcctgtatgcccttttcctaacactcacaacaaaactaactaatactaacatctcagacgctcaggaaatagaaaccgtctgaactatcctgcccgccatcatcctagtcctcatcgccctcccatccctacgcatcctttacataacagacgaggtcaacgatccctcccttaccatcaaatcaattggccaccaatggtactgaacctacgagtacaccgactacggcggactaatcttcaactcctacatacttcccccattattcctagaaccaggcgacctgcgactccttgacgttgacaatcgagtagtactcccgattgaagcccccattcgtataataattacatcacaagacgtcttgcactcatgagctgtccccacattaggcttaaaaacagatgcaattcccggacgtctaaaccaaaccactttcaccgctacacgaccgggggtatactacggtcaatgctctgaaatctgtggagcaaaccacagtttcatgcccatcgtcctagaattaattcccctaaaaatctttgaaatagggcccgtatttaccctataacaccccctctaccccctctagagcccactgtaaagctaacttagcattaaccttttaagttaaagattaagagaaccaacacctctttacagtgaaatgccccaactaaatactaccgtatggcccaccataattacccccatactccttacactattcctcatcacccaactaaaaatattaaacacaaactaccacctacctccctcaccaaagcccataaaaataaaaaattataacaaaccctgagaaccaaaatgaacgaaaatctgttcgcttcattcattgcccccacaatcctaggcctacccgccgcagtactgatcattctatttccccctctattgatccccacctccaaatatctcatcaacaaccgactaatcaccacccaacaatgactaatcaaactaacctcaaaacaaatgataaccatacacaacactaaaggacgaacctgatctcttatactagtatccttaatcatttttattgccacaactaacctcctcggactcctgcctcactcatttacaccaaccacccaactatctataaacctagccatggccatccccttatgagcgggcgcagtgattataggctttcgctctaagattaaaaatgccctagcccacttcttaccacaaggcacacctacaccccttatccccatactagttattatcgaaaccatcagcctactcattcaaccaatagccctggccgtacgcctaaccgctaacattactgcaggccacctactcatgcacctaattggaagcgccaccctagcaatatcaaccattaaccttccctctacacttatcatcttcacaattctaattctactaactatcctagaaatcgctgtcgccttaatccaagcctacgttttcacacttctagtaagcctctacctgcacgacaacacataatgacccaccaatcacatgcctatcatatagtaaaacccagcccatgacccctaacaggggccctctcagccctcctaatgacctccggcctagccatgtgatttcacttccactccataacgctcctcatactaggcctactaaccaacacactaaccatataccaatgatggcgcgatgtaacacgagaaagcacataccaaggccaccacacaccacctgtccaaaaaggccttcgatacgggataatcctatttattacctcagaagtttttttcttcgcaggatttttctgagccttttaccactccagcctagcccctaccccccaattaggagggcactggcccccaacaggcatcaccccgctaaatcccctagaagtcccactcctaaacacatccgtattactcgcatcaggagtatcaatcacctgagctcaccatagtctaatagaaaacaaccgaaaccaaataattcaagcactgcttattacaattttactgggtctctattttaccctcctacaagcctcagagtacttcgagtctcccttcaccatttccgacggcatctacggctcaacattttttgtagccacaggcttccacggacttcacgtcattattggctcaactttcctcactatctgcttcatccgccaactaatatttcactttacatccaaacatcactttggcttcgaagccgccgcctgatactggcattttgtagatgtggtttgactatttctgtatgtctccatctattgatgagggtcttactcttttagtataaatagtaccgttaacttccaattaactagttttgacaacgttcaaaaaagagtaataaacttcgccttaattttaataatcaacaccctcctagccttactactaataattattacattttgactaccacaactcaacggctacatagaaaaatccaccccttacgagtgcggcttcgaccctatatcccccgcccgcgtccctttctccataaaattcttcttagtagctattaccttcttattatttgatctagaaattgccctccttttacccctaccatgagccctacaaacaactaacctgccactaatagttatgtcatccctcttattaatcatcatcctagccctaagtctggcctatgagtgactacaaaaaggattagactgaaccgaattggtatatagtttaaacaaaacgaatgatttcgactcattaaattatgataatcatatttaccaaatgcccctcatttacataaatattatactagcatttaccatctcacttctaggaatactagtatatcgctcacacctcatatcctccctactatgcctagaaggaataatactatcgctgttcattatagctactctcataaccctcaacacccactccctcttagccaatattgtgcctattgccatactagtctttgccgcctgcgaagcagcggtgggcctagccctactagtctcaatctccaacacatatggcctagactacgtacataacctaaacctactccaatgctaaaactaatcgtcccaacaattatattactaccactgacatgactttccaaaaaacacataatttgaatcaacacaaccacccacagcctaattattagcatcatccctctactattttttaaccaaatcaacaacaacctatttagctgttccccaaccttttcctccgaccccctaacaacccccctcctaatactaactacctgactcctacccctcacaatcatggcaagccaacgccacttatccagtgaaccactatcacgaaaaaaactctacctctctatactaatctccctacaaatctccttaattataacattcacagccacagaactaatcatattttatatcttcttcgaaaccacacttatccccaccttggctatcatcacccgatgaggcaaccagccagaacgcctgaacgcaggcacatacttcctattctacaccctagtaggctcccttcccctactcatcgcactaatttacactcacaacaccctaggctcactaaacattctactactcactctcactgcccaagaactatcaaactcctgagccaacaacttaatatgactagcttacacaatagcttttatagtaaagatacctctttacggactccacttatgactccctaaagcccatgtcgaagcccccatcgctgggtcaatagtacttgccgcagtactcttaaaactaggcggctatggtataatacgcctcacactcattctcaaccccctgacaaaacacatagcctaccccttccttgtactatccctatgaggcataattataacaagctccatctgcctacgacaaacagacctaaaatcgctcattgcatactcttcaatcagccacatagccctcgtagtaacagccattctcatccaaaccccctgaagcttcaccggcgcagtcattctcataatcgcccacgggcttacatcctcattactattctgcctagcaaactcaaactacgaacgcactcacagtcgcatcataatcctctctcaaggacttcaaactctactcccactaatagctttttgatgacttctagcaagcctcgctaacctcgccttaccccccactattaacctactgggagaactctctgtgctagtaaccacgttctcctgatcaaatatcactctcctacttacaggactcaacatactagtcacagccctatactccctctacatatttaccacaacacaatggggctcactcacccaccacattaacaacataaaaccctcattcacacgagaaaacaccctcatgttcatacacctatcccccattctcctcctatccctcaaccccgacatcattaccgggttttcctcttgtaaatatagtttaaccaaaacatcagattgtgaatctgacaacagaggcttacgaccccttatttaccgagaaagctcacaagaactgctaactcatgcccccatgtctaacaacatggctttctcaacttttaaaggataacagctatccattggtcttaggccccaaaaattttggtgcaactccaaataaaagtaataaccatgcacactactataaccaccctaaccctgacttccctaattccccccatccttaccaccctcgttaaccctaacaaaaaaaactcatacccccattatgtaaaatccattgtcgcatccacctttattatcagtctcttccccacaacaatattcatgtgcctagaccaagaagttattatctcgaactgacactgagccacaacccaaacaacccagctctccctaagcttcaaactagactacttctccataatattcatccctgtagcattgttcgttacatggtccatcatagaattctcactgtgatatataaactcagacccaaacattaatcagttcttcaaatatctactcatcttcctaattaccatactaatcttagttaccgctaacaacctattccaactgttcatcggctgagagggcgtaggaattatatccttcttgctcatcagttgatgatacgcccgagcagatgccaacacagcagccattcaagcaatcctatacaaccgtatcggcgatatcggtttcatcctcgccttagcatgatttatcctacactccaactcatgagacccacaacaaatagcccttctaaacgctaatccaagcctcaccccactactaggcctcctcctagcagcagcaggcaaatcagcccaattaggtctccacccctgactcccctcagccatagaaggccccaccccagtctcagccctactccactcaagcactatagttgtagcaggaatcttcttactcatccgcttccaccccctagcagaaaatagcccactaatccaaactctaacactatgcttaggcgctatcaccactctgttcgcagcagtctgcgcccttacacaaaatgacatcaaaaaaatcgtagccttctccacttcaagtcaactaggactcataatagttacaatcggcatcaaccaaccacacctagcattcctgcacatctgtacccacgccttcttcaaagccatactatttatgtgctccgggtccatcatccacaaccttaacaatgaacaagatattcgaaaaataggaggactactcaaaaccatacctctcacttcaacctccctcaccattggcagcctagcattagcaggaatacctttcctcacaggtttctactccaaagaccacatcatcgaaaccgcaaacatatcatacacaaacgcctgagccctatctattactctcatcgctacctccctgacaagcgcctatagcactcgaataattcttctcaccctaacaggtcaacctcgcttccccacccttactaacattaacgaaaataaccccaccctactaaaccccattaaacgcctggcagccggaagcctattcgcaggatttctcattactaacaacatttcccccgcatcccccttccaaacaacaatccccctctacctaaaactcacagccctcgctgtcactttcctaggacttctaacagccctagacctcaactacctaaccaacaaacttaaaataaaatccccactatgcacattttatttctccaacatactcggattctaccctagcatcacacaccgcacaatcccctatctaggccttcttacgagccaaaacctgcccctactcctcctagacctaacctgactagaaaagctattacctaaaacaatttcacagcaccaaatctccacctccatcatcacctcaacccaaaaaggcataattaaactttacttcctctctttcttcttcccactcatcctaaccctactcctaatcacataacctattcccccgagcaatctcaattacaatatatacaccaacaaacaatgttcaaccagtaactactactaatcaacgcccataatcatacaaagcccccgcaccaataggatcctcccgaatcaaccctgacccctctccttcataaattattcagcttcctacactattaaagtttaccacaaccaccaccccatcatactctttcacccacagtaccaatcctacctccatcgctaaccccactaaaacactcaccaagacctcaacccctgacccccatgcctcaggatactcctcaatagccatcgctgtagtatatccaaagacaaccatcattccccctaaataaattaaaaaaactattaaacccatataacctcccccaaaattcagaataataacacacccgaccacaccgctaacaatcaatgctaaacccccataaataggagaaggcttagaagaaaaccccacaaaccccattactaaacccacactcaacagaaacaaagcatacatcattattctcgcacggactacaaccacgaccaatgatatgaaaaaccatcgttgtatttcaactacaagaacaccaatgaccccaatacgcaaaactaaccccctaataaaattaattaaccactcattcatcgacctccccaccccatccaacatctccgcatgatgaaacttcggctcactccttggcgcctgcctgatcctccaaatcaccacaggactattcctagccatgcactactcaccagacgcctcaaccgccttttcatcaatcgcccacatcactcgagacgtaaattatggctgaatcatccgctaccttcacgccaatggcgcctcaatattctttatctgcctcttcctacacatcgggcgaggcctatattacggatcatttctctactcagaaacctgaaacatcggcattatcctcctgcttgcaactatagcaacagccttcataggctatgtcctcccgtgaggccaaatatcattctgaggggccacagtaattacaaacttactatccgccatcccatacattgggacagacctagttcaatgaatctgaggaggctactcagtagacagtcccaccctcacacgattctttacctttcacttcatcttgcccttcattattgcagccctagcagcactccacctcctattcttgcacgaaacgggatcaaacaaccccctaggaatcacctcccattccgataaaatcaccttccacccttactacacaatcaaagacgccctcggcttacttctcttccttctctccttaatgacattaacactattctcaccagacctcctaggcgacccagacaattataccctagccaaccccttaaacacccctccccacatcaagcccgaatgatatttcctattcgcctacacaattctccgatccgtccctaacaaactaggaggcgtccttgccctattactatccatcctcatcctagcaataatccccatcctccatatatccaaacaacaaagcataatatttcgcccactaagccaatcactttattgactcctagccgcagacctcctcattctaacctgaatcggaggacaaccagtaagctacccttttaccatcattggacaagtagcgtccgtactatacttcacaacaatcctaatcctaataccaactatctccctaattgaaaacaaaatactcaaatgggcctgtccttgtagtataaactaatacaccagtcttgtaaaccggagatgaaaacctttttccaaggacaaatcagagaaaaagtctttaactccaccattagcacccaaagctaagattctaatttaaactattctctgttctttcatggggaagcagatttgggtaccacccaagtattgactcacccatcaacaaccgctatgtatttcgtacattactgccagccaccatgaatattgtacagtaccataaatacttgaccacctgtagtacataaaaacccaatccacatcaaaaccccctccccatgcttacaagcaagtacagcaatcaaccctcaactatcacacatcaactgcaactccaaagccacccctcacccactaggataccaacaaacctacccacccttaacagtacatagtacataaagccatttaccgtacatagcacattacagtcaaatcccttctcgtccccatggatgacccccctcagataggggtcccttgaccaccatcctccgtgaaatcaatatcccgcacaagagtgctactctcctcgctccgggcccataacacttgggggtagctaaagtgaactgtatccgacatctggttcctacttcagggtcataaagcctaaatagcccacacgttccccttaaataagacatcacgatg

SEQ ID NO: 94 - DNA, 16571 bp, Homo sapiens mitochondrial
  3109: "n" refers to a nucleotide at position 3107 of the Cambridge Reference Sequence (CRS, Anderson et al. 1981 Nature 290:457-465), later determined to be absent from the human mtDNA sequence according to the revised CRS (rCRS, Andrews et al. 1999 Nature Genetics 23:147); "n" therefore represents a single nucleotide deletion at a position corresponding to nucleotide 3107 of SEQ ID NO:1 as provided herein.
gatcacaggtctatcaccctattaaccactcacgggagctctccatgcatttggtattttcgtctggggggtatgcacgcgatagcattgcgagacgctggagccggagcaccctatgtcgcagtatctgtctttgattcctgcctcatcccattatttatcgcacctacgttcaatattacaggcgaacatacttactaaagtgtgttaattaattaatgcttgtaggacataataataacaattgaatgtctgcacagccgctttccacacagacatcataacaaaaaatttccaccaaaccccccctcccccccgcttctggccacagcacttaaacacatctctgccaaaccccaaaaacaaagaaccctaacaccagcctaaccagatttcaaattttatcttttggcggtatgcacttttaacagtcaccccccaactaacacattattttcccctcccactcccatactactaatctcatcaatacaacccccgcccatcctacccagcacacacacaccgctgctaaccccataccccgaaccaaccaaaccccaaagacaccccccacagtttatgtagcttacctcctcaaagcaatacactgaaaatgtttagacgggctcacatcaccccataaacaaataggtttggtcctagcctttctattagctcttagtaagattacacatgcaagcatccccgttccagtgagttcaccctctaaatcaccacgatcaaaagggacaagcatcaagcacgcagcaatgcagctcaaaacgcttagcctagccacacccccacgggaaacagcagtgattaacctttagcaataaacgaaagtttaactaagctatactaaccccagggttggtcaatttcgtgccagccaccgcggtcacacgattaacccaagtcaatagaagccggcgtaaagagtgttttagatcaccccctccccaataaagctaaaactcacctgagttgtaaaaaactccagttgacacaaaatagactacgaaagtggctttaacatatctgaacacacaatagctaagacccaaactgggattagataccccactatgcttagccctaaacctcaacagttaaatcaacaaaactgctcgccagaacactacgagccacagcttaaaactcaaaggacctggcggtgcttcatatccctctagaggagcctgttctgtaatcgataaaccccgatcaacctcaccacctcttgctcagcctatataccgccatcttcagcaaaccctgatgaaggctacaaagtaagcgcaagtacccacgtaaagacgttaggtcaaggtgtagcccatgaggtggcaagaaatgggctacattttctaccccagaaaactacgatagcccttatgaaacttaagggtcgaaggtggatttagcagtaaactgagagtagagtgcttagttgaacagggccctgaagcgcgtacacaccgcccgtcaccctcctcaagtatacttcaaaggacatttaactaaaacccctacgcatttatatagaggagacaagtcgtaacatggtaagtgtactggaaagtgcacttggacgaaccagagtgtagcttaacacaaagcacccaacttacacttaggagatttcaacttaacttgaccgctctgagctaaacctagccccaaacccactccaccttactaccagacaaccttagccaaaccatttacccaaataaagtataggcgatagaaattgaaacctggcgcaatagatatagtaccgcaagggaaagatgaaaaattataaccaagcataatatagcaaggactaacccctataccttctgcataatgaattaactagaaataactttgcaaggagagccaaagctaagacccccgaaaccagacgagctacctaagaacagctaaaagagcacacccgtctatgtagcaaaatagtgggaagatttataggtagaggcgacaaacctaccgagcctggtgatagctggttgtccaagatagaatcttagttcaactttaaatttgcccacagaaccctctaaatccccttgtaaatttaactgttagtccaaagaggaacagctctttggacactaggaaaaaaccttgtagagagagtaaaaaatttaacacccatagtaggcctaaaagcagccaccaattaagaaagcgttcaagctcaacacccactacctaaaaaatcccaaacatataactgaactcctcacacccaattggaccaatctatcaccctatagaagaactaatgttagtataagtaacatgaaaacattctcctccgcataagcctgcgtcagattaaaacactgaactgacaattaacagcccaatatctacaatcaaccaacaagtcattattaccctcactgtcaacccaacacaggcatgctcataaggaaaggttaaaaaaagtaaaaggaactcggcaaatcttaccccgcctgtttaccaaaaacatcacctctagcatcaccagtattagaggcaccgcctgcccagtgacacatgtttaacggccgcggtaccctaaccgtgcaaaggtagcataatcacttgttccttaaatagggacctgtatgaatggctccacgagggttcagctgtctcttacttttaaccagtgaaattgacctgcccgtgaagaggcgggcataacacagcaagacgagaagaccctatggagctttaatttattaatgcaaacagtacctaacaaacccacaggtcctaaactaccaaacctgcattaaaaatttcggttggggcgacctcggagcagaacccaacctccgagcagtacatgctaagacttcaccagtcaaagcgaactactatactcaattgatccaataacttgaccaacggaacaagttaccctagggataacagcgcaatcctattctagagtccatatcaacaatagggtttacgacctcgatgttggatcaggacatcccgatggtgcagccgctattaaaggttcgtttgttcaacgattaaagtcctacgtgatctgagttcagaccggagtaatccaggtcggtttctatctacnttcaaattcctccctgtacgaaaggacaagagaaataaggcctacttcacaaagcgccttcccccgtaaatgatatcatctcaacttagtattatacccacacccacccaagaacagggtttgttaagatggcagagcccggtaatcgcataaaacttaaaactttacagtcagaggttcaattcctcttcttaacaacatacccatggccaacctcctactcctcattgtacccattctaatcgcaatggcattcctaatgcttaccgaacgaaaaattctaggctatatacaactacgcaaaggccccaacgttgtaggcccctacgggctactacaacccttcgctgacgccataaaactcttcaccaaagagcccctaaaacccgccacatctaccatcaccctctacatcaccgccccgaccttagctctcaccatcgctcttctactatgaacccccctccccatacccaaccccctggtcaacctcaacctaggcctcctatttattctagccacctctagcctagccgtttactcaatcctctgatcagggtgagcatcaaactcaaactacgccctgatcggcgcactgcgagcagtagcccaaacaatctcatatgaagtcaccctagccatcattctactatcaacattactaataagtggctcctttaacctctccacccttatcacaacacaagaacacctctgattactcctgccatcatgacccttggccataatatgatttatctccacactagcagagaccaaccgaacccccttcgaccttgccgaaggggagtccgaactagtctcaggcttcaacatcgaatacgccgcaggccccttcgccctattcttcatagccgaatacacaaacattattataataaacaccctcaccactacaatcttcctaggaacaacatatgacgcactctcccctgaactctacacaacatattttgtcaccaagaccctacttctaacctccctgttcttatgaattcgaacagcatacccccgattccgctacgaccaactcatacacctcctatgaaaaaacttcctaccactcaccctagcattacttatatgatatgtctccatacccattacaatctccagcattccccctcaaacctaagaaatatgtctgataaaagagttactttgatagagtaaataataggagcttaaacccccttatttctaggactatgagaatcgaacccatccctgagaatccaaaattctccgtgccacctatcacaccccatcctaaagtaaggtcagctaaataagctatcgggcccataccccgaaaatgttggttatacccttcccgtactaattaatcccctggcccaacccgtcatctactctaccatctttgcaggcacactcatcacagcgctaagctcgcactgattttttacctgagtaggcctagaaataaacatgctagcttttattccagttctaaccaaaaaaataaaccctcgttccacagaagctgccatcaagtatttcctcacgcaagcaaccgcatccataatccttctaatagctatcctcttcaacaatatactctccggacaatgaaccataaccaatactaccaatcaatactcatcattaataatcataatggctatagcaataaaactaggaatagccccctttcacttctgagtcccagaggttacccaaggcacccctctgacatccggcctgcttcttctcacatgacaaaaactagcccccatctcaatcatataccaaatctctccctcactaaacgtaagccttctcctcactctctcaatcttatccatcatagcaggcagttgaggtggattaaaccaaacccagctacgcaaaatcttagcatactcctcaattacccacataggatgaataatagcagttctaccgtacaaccctaacataaccattcttaatttaactatttatattatcctaactactaccgcattcctactactcaacttaaactccagcaccacgaccctactactatctcgcacctgaaacaagctaacatgactaacacccttaattccatccaccctcctctccctaggaggcctgcccccgctaaccggctttttgcccaaatgggccattatcgaagaattcacaaaaaacaatagcctcatcatccccaccatcatagccaccatcaccctccttaacctctacttctacctacgcctaatctactccacctcaatcacactactccccatatctaacaacgtaaaaataaaatgacagtttgaacatacaaaacccaccccattcctccccacactcatcgcccttaccacgctactcctacctatctccccttttatactaataatcttatagaaatttaggttaaatacagaccaagagccttcaaagccctcagtaagttgcaatacttaatttctgtaacagctaaggactgcaaaaccccactctgcatcaactgaacgcaaatcagccactttaattaagctaagcccttactagaccaatgggacttaaacccacaaacacttagttaacagctaagcaccctaatcaactggcttcaatctacttctcccgccgccgggaaaaaaggcgggagaagccccggcaggtttgaagctgcttcttcgaatttgcaattcaatatgaaaatcacctcggagctggtaaaaagaggcctaacccctgtctttagatttacagtccaatgcttcactcagccattttacctcacccccactgatgttcgccgaccgttgactattctctacaaaccacaaagacattggaacactatacctattattcggcgcatgagctggagtcctaggcacagctctaagcctccttattcgagccgagctgggccagccaggcaaccttctaggtaacgaccacatctacaacgttatcgtcacagcccatgcatttgtaataatcttcttcatagtaatacccatcataatcggaggctttggcaactgactagttcccctaataatcggtgcccccgatatggcgtttccccgcataaacaacataagcttctgactcttacctccctctctcctactcctgctcgcatctgctatagtggaggccggagcaggaacaggttgaacagtctaccctcccttagcagggaactactcccaccctggagcctccgtagacctaaccatcttctccttacacctagcaggtgtctcctctatcttaggggccatcaatttcatcacaacaattatcaatataaaaccccctgccataacccaataccaaacgcccctcttcgtctgatccgtcctaatcacagcagtcctacttctcctatctctcccagtcctagctgctggcatcactatactactaacagaccgcaacctcaacaccaccttcttcgaccccgccggaggaggagaccccattctataccaacacctattctgatttttcggtcaccctgaagtttatattcttatcctaccaggcttcggaataatctcccatattgtaacttactactccggaaaaaaagaaccatttggatacataggtatggtctgagctatgatatcaattggcttcctagggtttatcgtgtgagcacaccacatatttacagtaggaatagacgtagacacacgagcatatttcacctccgctaccataatcatcgctatccccaccggcgtcaaagtatttagctgactcgccacactccacggaagcaatatgaaatgatctgctgcagtgctctgagccctaggattcatctttcttttcaccgtaggtggcctgactggcattgtattagcaaactcatcactagacatcgtactacacgacacgtactacgttgtagcccacttccactatgtcctatcaataggagctgtatttgccatcataggaggcttcattcactgatttcccctattctcaggctacaccctagaccaaacctacgccaaaatccatttcactatcatattcatcggcgtaaatctaactttcttcccacaacactttctcggcctatccggaatgccccgacgttactcggactaccccgatgcatacaccacatgaaacatcctatcatctgtaggctcattcatttctctaacagcagtaatattaataattttcatgatttgagaagccttcgcttcgaagcgaaaagtcctaatagtagaagaaccctccataaacctggagtgactatatggatgccccccaccctaccacacattcgaagaacccgtatacataaaatctagacaaaaaaggaaggaatcgaaccccccaaagctggtttcaagccaaccccatggcctccatgactttttcaaaaaggtattagaaaaaccatttcataactttgtcaaagttaaattataggctaaatcctatatatcttaatggcacatgcagcgcaagtaggtctacaagacgctacttcccctatcatagaagagcttatcacctttcatgatcacgccctcataatcattttccttatctgcttcctagtcctgtatgcccttttcctaacactcacaacaaaactaactaatactaacatctcagacgctcaggaaatagaaaccgtctgaactatcctgcccgccatcatcctagtcctcatcgccctcccatccctacgcatcctttacataacagacgaggtcaacgatccctcccttaccatcaaatcaattggccaccaatggtactgaacctacgagtacaccgactacggcggactaatcttcaactcctacatacttcccccattattcctagaaccaggcgacctgcgactccttgacgttgacaatcgagtagtactcccgattgaagcccccattcgtataataattacatcacaagacgtcttgcactcatgagctgtccccacattaggcttaaaaacagatgcaattcccggacgtctaaaccaaaccactttcaccgctacacgaccgggggtatactacggtcaatgctctgaaatctgtggagcaaaccacagtttcatgcccatcgtcctagaattaattcccctaaaaatctttgaaatagggcccgtatttaccctatagcaccccctctaccccctctagagcccactgtaaagctaacttagcattaaccttttaagttaaagattaagagaaccaacacctctttacagtgaaatgccccaactaaatactaccgtatggcccaccataattacccccatactccttacactattcctcatcacccaactaaaaatattaaacacaaactaccacctacctccctcaccaaagcccataaaaataaaaaattataacaaaccctgagaaccaaaatgaacgaaaatctgttcgcttcattcattgcccccacaatcctaggcctacccgccgcagtactgatcattctatttccccctctattgatccccacctccaaatatctcatcaacaaccgactaatcaccacccaacaatgactaatcaaactaacctcaaaacaaatgataaccatacacaacactaaaggacgaacctgatctcttatactagtatccttaatcatttttattgccacaactaacctcctcggactcctgcctcactcatttacaccaaccacccaactatctataaacctagccatggccatccccttatgagcgggcgcagtgattataggctttcgctctaagattaaaaatgccctagcccacttcttaccacaaggcacacctacaccccttatccccatactagttattatcgaaaccatcagcctactcattcaaccaatagccctggccgtacgcctaaccgctaacattactgcaggccacctactcatgcacctaattggaagcgccaccctagcaatatcaaccattaaccttccctctacacttatcatcttcacaattctaattctactgactatcctagaaatcgctgtcgccttaatccaagcctacgttttcacacttctagtaagcctctacctgcacgacaacacataatgacccaccaatcacatgcctatcatatagtaaaacccagcccatgacccctaacaggggccctctcagccctcctaatgacctccggcctagccatgtgatttcacttccactccataacgctcctcatactaggcctactaaccaacacactaaccatataccaatgatggcgcgatgtaacacgagaaagcacataccaaggccaccacacaccacctgtccaaaaaggccttcgatacgggataatcctatttattacctcagaagtttttttcttcgcaggatttttctgagccttttaccactccagcctagcccctaccccccaattaggagggcactggcccccaacaggcatcaccccgctaaatcccctagaagtcccactcctaaacacatccgtattactcgcatcaggagtatcaatcacctgagctcaccatagtctaatagaaaacaaccgaaaccaaataattcaagcactgcttattacaattttactgggtctctattttaccctcctacaagcctcagagtacttcgagtctcccttcaccatttccgacggcatctacggctcaacattttttgtagccacaggcttccacggacttcacgtcattattggctcaactttcctcactatctgcttcatccgccaactaatatttcactttacatccaaacatcactttggcttcgaagccgccgcctgatactggcattttgtagatgtggtttgactatttctgtatgtctccatctattgatgagggtcttactcttttagtataaatagtaccgttaacttccaattaactagttttgacaacattcaaaaaagagtaataaacttcgccttaattttaataatcaacaccctcctagccttactactaataattattacattttgactaccacaactcaacggctacatagaaaaatccaccccttacgagtgcggcttcgaccctatatcccccgcccgcgtccctttctccataaaattcttcttagtagctattaccttcttattatttgatctagaaattgccctccttttacccctaccatgagccctacaaacaactaacctgccactaatagttatgtcatccctcttattaatcatcatcctagccctaagtctggcctatgagtgactacaaaaaggattagactgaaccgaattggtatatagtttaaacaaaacgaatgatttcgactcattaaattatgataatcatatttaccaaatgcccctcatttacataaatattatactagcatttaccatctcacttctaggaatactagtatatcgctcacacctcatatcctccctactatgcctagaaggaataatactatcgctgttcattatagctactctcataaccctcaacacccactccctcttagccaatattgtgcctattgccatactagtctttgccgcctgcgaagcagcggtgggcctagccctactagtctcaatctccaacacatatggcctagactacgtacataacctaaacctactccaatgctaaaactaatcgtcccaacaattatattactaccactgacatgactttccaaaaaacacataatttgaatcaacacaaccacccacagcctaattattagcatcatccctctactattttttaaccaaatcaacaacaacctatttagctgttccccaaccttttcctccgaccccctaacaacccccctcctaatactaactacctgactcctacccctcacaatcatggcaagccaacgccacttatccagtgaaccactatcacgaaaaaaactctacctctctatactaatctccctacaaatctccttaattataacattcacagccacagaactaatcatattttatatcttcttcgaaaccacacttatccccaccttggctatcatcacccgatgaggcaaccagccagaacgcctgaacgcaggcacatacttcctattctacaccctagtaggctcccttcccctactcatcgcactaatttacactcacaacaccctaggctcactaaacattctactactcactctcactgcccaagaactatcaaactcctgagccaacaacttaatatgactagcttacacaatagcttttatagtaaagatacctctttacggactccacttatgactccctaaagcccatgtcgaagcccccatcgctgggtcaatagtacttgccgcagtactcttaaaactaggcggctatggtataatacgcctcacactcattctcaaccccctgacaaaacacatagcctaccccttccttgtactatccctatgaggcataattataacaagctccatctgcctacgacaaacagacctaaaatcgctcattgcatactcttcaatcagccacatagccctcgtagtaacagccattctcatccaaaccccctgaagcttcaccggcgcagtcattctcataatcgcccacgggcttacatcctcattactattctgcctagcaaactcaaactacgaacgcactcacagtcgcatcataatcctctctcaaggacttcaaactctactcccactaatagctttttgatgacttctagcaagcctcgctaacctcgccttaccccccactattaacctactgggagaactctctgtgctagtaaccacgttctcctgatcaaatatcactctcctacttacaggactcaacatactagtcacagccctatactccctctacatatttaccacaacacaatggggctcactcacccaccacattaacaacataaaaccctcattcacacgagaaaacaccctcatgttcatacacctatcccccattctcctcctatccctcaaccccgacatcattaccgggttttcctcttgtaaatatagtttaaccaaaacatcagattgtgaatctgacaacagaggcttacgaccccttatttaccgagaaagctcacaagaactgctaactcatgcccccatgtctaacaacatggctttctcaacttttaaaggataacagctatccattggtcttaggccccaaaaattttggtgcaactccaaataaaagtaataaccatgcacactactataaccaccctaaccctgacttccctaattccccccatccttaccaccctcgttaaccctaacaaaaaaaactcatacccccattatgtaaaatccattgtcgcatccacctttattatcagtctcttccccacaacaatattcatgtgcctagaccaagaagttattatctcgaactgacactgagccacaacccaaacaacccagctctccctaagcttcaaactagactacttctccataatattcatccctgtagcattgttcgttacatggtccatcatagaattctcactgtgatatataaactcagacccaaacattaatcagttcttcaaatatctactcatcttcctaattaccatactaatcttagttaccgctaacaacctattccaactgttcatcggctgagagggcgtaggaattatatccttcttgctcatcagttgatgatacgcccgagcagatgccaacacagcagccattcaagcaatcctatacaaccgtatcggcgatatcggtttcatcctcgccttagcatgatttatcctacactccaactcatgagacccacaacaaatagcccttctaaacgctaatccaagcctcaccccactactaggcctcctcctagcagcagcaggcaaatcagcccaattaggtctccacccctgactcccctcagccatagaaggccccaccccagtctcagccctactccactcaagcactatagttgtagcaggaatcttcttactcatccgcttccaccccctagcagaaaatagcccactaatccaaactctaacactatgcttaggcgctatcaccactctgttcgcagcagtctgcgcccttacacaaaatgacatcaaaaaaatcgtagccttctccacttcaagtcaactaggactcataatagttacaatcggcatcaaccaaccacacctagcattcctgcacatctgtacccacgccttcttcaaagccatactatttatgtgctccgggtccatcatccacaaccttaacaatgaacaagatatccgaaaaataggaggactactcaaaaccatacctctcacttcaacctccctcaccattggtagcctagcattagcaggaatacctttcctcacaggtttctactccaaagaccacatcatcgaaaccgcaaacatatcatacacaaacgcctgagccctatctattactctcatcgctacctccctgacaagcgcctatagcactcgaataattcttctcaccctaacaggtcaacctcgcttccccacccttactaacattaacgaaaataaccccaccctactaaaccccattaaacgcctggcagccggaagcctattcgcaggatttctcattactaacaacatttcccccgcatcccccttccaaacaacaatccccctctacctaaaactcacagccctcgctgtcactttcctaggacttctaacagccctagacctcaactacctaaccaacaaacttaaaataaaatccccactatgcacattttatttctccaacatactcggattctaccctagcatcacacaccgcacaatcccctatctaggccttcttacgagccaaaacctgcccctactcctcctagacctaacctgactagaaaagctattacctaaaacaatttcacagcaccaaatctccacctccatcatcacctcaacccaaaaaggcataattaaactttacttcctctctttcttcttcccactcatcttaaccctactcctaatcacataacctattcccccgagcaatctcaattacaatatatacaccaacaaacaatgttcaaccagtaactactactaatcaacgcccataatcatacaaagcccccgcaccaataggatcctcccgaatcaaccctgacccctctccttcataaattattcagcttcctacactattaaagtttaccacaaccaccaccccatcatactctttcacccacagcaccaatcctacctccatcgctaaccccactaaaacactcaccaagacctcaacccctgacccccatgcctcaggatactcctcaatagccatcgctgtagtatatccaaagacaaccatcattccccctaaataaattaaaaaaactattaaacccatataacctcccccaaaattcagaataataacacacccgaccacaccgctaacaatcaatactaaacccccataaataggagaaggcttagaagaaaaccccacaaaccccattactaaacccacactcaacagaaacaaagcatacatcattattctcgcacggactacaaccacgaccaatgatatgaaaaaccatcgttgtatttcaactacaagaacaccaatgaccccaatacgcaaaactaaccccctaataaaattaattaaccactcattcatcgacctccccaccccatccaacatctccgcatgatgaaacttcggctcactccttggcgcctgcctgatcctccaaatcaccacaggactattcctagccatgcactactcaccagacgcctcaaccgccttttcatcaatcgcccacatcactcgagacgtaaattatggctgaatcatccgctaccttcacgccaatggcgcctcaatattctttatctgcctcttcctacacatcgggcgaggcctatattacggatcatttctctactcagaaacctgaaacatcggcattatcctcctgcttgcaactatagcaacagccttcataggctatgtcctcccgtgaggccaaatatcattctgaggggccacagtaattacaaacttactatccgccatcccatacattgggacagacctagttcaatgaatctgaggaggctactcagtagacagtcccaccctcacacgattctttacctttcacttcatcttgcccttcattattgcagccctagcagcactccacctcctattcttgcacgaaacgggatcaaacaaccccctaggaatcacctcccattccgataaaatcaccttccacccttactacacaatcaaagacgccctcggcttacttctcttccttctctccttaatgacattaacactattctcaccagacctcctaggcgacccagacaattataccctagccaaccccttaaacacccctccccacatcaagcccgaatgatatttcctattcgcctacacaattctccgatccgtccctaacaaactaggaggcgtccttgccctattactatccatcctcatcctagcaataatccccatcctccatatatccaaacaacaaagcataatatttcgcccactaagccaatcactttattgactcctagccgcagacctcctcattctaacctgaatcggaggacaaccagtaagctacccttttaccatcattggacaagtagcatccgtactatacttcacaacaatcctaatcctaataccaactatctccctaattgaaaacaaaatactcaaatgggcctgtccttgtagtataaactaatacaccagtcttgtaaaccggagatgaaaacctttttccaaggacaaatcagagaaaaagtctttaactccaccattagcacccaaagctaagattctaatttaaactattctctgttctttcatggggaagcagatttgggtaccacccaagtattgactcacccatcaacaaccgctatgtatttcgtacattactgccagccaccatgaatattgtacggtaccataaatacttgaccacctgtagtacataaaaacccaatccacatcaaaaccccctccccatgcttacaagcaagtacagcaatcaaccctcaactatcacacatgaactgcaactccaaagccacccctcacccactaggataccaacaaacctacccacccttaacagtacatagtacataaagccatttaccgtacatagcacattacagtcaaatcccttctcgtccccatggatgacccccctcagataggggtcccttgaccaccatcctccgtgaaatcaatatcccgcacaagagtgctactctcctcgctccgggcccataacacttgggggtagctaaagtgaactgtatccgacatctggttcctacttcagggccataaagcctaaatagcccacacgttccccttaaataagacatcacgatg

SEQ ID NO: 95 - DNA, 16571 bp, Homo sapiens mitochondrial
  3109: "n" refers to a nucleotide at position 3107 of the Cambridge Reference Sequence (CRS, Anderson et al. 1981 Nature 290:457-465), later determined to be absent from the human mtDNA sequence according to the revised CRS (rCRS, Andrews et al. 1999 Nature Genetics 23:147); "n" therefore represents a single nucleotide deletion at a position corresponding to nucleotide 3107 of SEQ ID NO:1 as provided herein.
gatcacaggtctatcaccctattaaccactcacgggagctctccatgcatttggtattttcgtctggggggtgtgcacgcgatagcattgcgagacgctggagccggagcaccctatgtcgcagtatctgtctttgattcctgccccatcctattatttatcgcacctacgttcaatattacaggcgaacatacttactaaagtgtgttaattaattaatgcttgtaggacataataataacaattgaatgtctgcacagccgctttccacacagacatcataacaaaaaatttccaccaaaccccccctcccccccgcttctggccacagcacttaaacacatctctgccaaaccccaaaaacaaagaaccctaacaccagcctaaccagatttcaaattttatcttttggcggtatgcacttttaacagtcaccccccaactaacacattattttcccctcccactcccatactactaatctcatcaatacaaccctcgcccatcctacccagcacacacacaccgctgctaaccccataccccgaaccaaccaaaccccaaagacaccccccacagtttatgtagcttacctcctcaaagcaatacactgaaaatgtttagacgggctcacatcaccccataaacaaataggtttggtcctagcctttctattagctcttagtaagattacacatgcaagcatccccgttccagtgagttcaccctctaaatcaccacgatcaaaagggacaagcatcaagcacgcagcaatgcagctcaaaacgcttagcctagccacacccccacgggaaacagcagtgattaacctttagcaataaacgaaagtttaactaagctatactaaccccagggttggtcaatttcgtgccagccaccgcggtcacacgattaacccaagtcaatagaagccggcgtaaagagtgttttagatcaccccctccccaataaagctaaaactcacctgagttgtaaaaaactccagttgacacaaaatagactacgaaagtggctttaacatatctgaacacacaatagctaagacccaaactgggattagataccccactatgcttagccctaaacctcaacagttaaatcaacaaaactgctcgccagaacactacgagccacagcttaaaactcaaaggacctggcggtgcttcatacccctctagaggagcctgttctgtaatcgataaaccccgatcaacctcaccacctcttgctcagcctatataccgccatcttcagcaaaccctgatgaaggctacaaagtaagcgcaagtacccacgtaaagacgttaggtcaaggtgtagcccatgaggtggcaagaaatgggctacattttctaccccagaaaactacgatagcccttatgaaacttaagggtcgaaggtggatttagcagtaaactgagagtagagtgcttagttgaacagggccctgaagcgcgtacacaccgcccgtcaccctcctcaagtatacttcaaaggacatttaactaaaacccctacgcatttatatagaggagacaagtcgtaacatggtaagtgtactggaaagtgcacttggacgaaccagagtgtagcttaacacaaagcacccaacttacacttaggagatttcaacttaacttgaccgctctgagctaaacctagccccaaacccactccaccttactaccagacaaccttagccaaaccatttacccaaataaagtataggcgatagaaattgaaacctggcgcaatagatatagtaccgcaagggaaagatgaaaaattatagccaagcataatatagcaaggactaacccctataccttctgcataatgaattaactagaaataactttgcaaggagagccaaagctaagacccccgaaaccagacgagctacctaagaacagctaaaagagcacacccgtctatgtagcaaaatagtgggaagatttataggtagaggcgacaaacctaccgagcctggtgatagctggttgtccaagatagaatcttagttcaactttaaatttgcccacagaaccctctaaatccccttgtaaatttaactgttagtccaaagaggaacagctctttggacactaggaaaaaaccttgtagagagagtaaaaaatttaacacccatagtaggcctaaaagcagccaccaattaagaaagcgttcaagctcaacacccactacctaaaaaatcccaaacatataactgaactcctcacacccaattggaccaatctatcaccctatagaagaactaatgttagtataagtaacatgaaaacattctcctccgcataagcctgcgtcagattaaaacactgaactgacaattaacagcccaatatctacaatcaaccaacaagtcattattaccctcactgtcaacccaacacaggcatgctcataaggaaaggttaaaaaaagtaaaaggaactcggcaaatcttaccccgcctgtttaccaaaaacatcacctctagcatcaccagtattagaggcaccgcctgcccagtgacacatgtttaacggccgcggtaccctaaccgtgcaaaggtagcataatcacttgttccttaaatagggacctgtatgaatggctccacgagggttcagctgtctcttacttttaaccagtgaaattgacctgcccgtgaagaggcgggcatgacacagcaagacgagaagaccctatggagctttaatttattaatgcaaacagtacctaacaaacccacaggtcctaaactaccaaacctgcattaaaaatttcggttggggcgacctcggagcagaacccaacctccgagcagtacatgctaagacttcaccagtcaaagcgaactactatactcaattgatccaataacttgaccaacggaacaagttaccctagggataacagcgcaatcctattctagagtccatatcaacaatagggtttacgacctcgatgttggatcaggacatcccgatggtgcagccgctattaaaggttcgtttgttcaacgattaaagtcctacgtgatctgagttcagaccggagtaatccaggtcggtttctatctacnttcaaattcctccctgtacgaaaggacaagagaaataaggcctacttcacaaagcgccttcccccgtaaatgatatcatctcaacttagtattatacccacacccacccaagaacagggtttgttaagatggcagagcccggtaatcgcataaaacttaaaactttacagtcagaggttcaattcctcttcttaacaacatacccatggccaacctcctactcctcattgtacccattctaatcgcaatggcattcctaatgcttaccgaacgaaaaattctaggctatatacaactacgcaaaggccccaacgttgtaggcccctacgggctactacaacccttcgctgacgccataaaactcttcaccaaggagcccctaaaacccgccacatctaccatcaccctctacatcaccgccccgaccttagctctcaccatcgctcttctactatgaacccccctccccatacccaaccccctggtcaacctcaacctaggcctcctatttattctagccacctctagcctagccgtttactcaatcctctgatcagggtgagcatcaaactcaaactacgccctgatcggcgcactgcgagcagtagcccaaacaatctcatatgaagtcaccctagccatcattctactatcaacattactaataagtggctcctttaacctctccacccttatcacaacacaagaacacctctgattactcctgccatcatgacccttggccataatatgatttatctccacactagcagagaccaaccgaacccccttcgaccttgccgaaggggagtccgaactagtctcaggcttcaacatcgaatacgccgcaggccccttcgccctattcttcatagccgaatacacaaacattattataataaacaccctcaccactacaatcttcctaggaacaacatatgacgcactctcccctgaactctacacaacatattttgtcaccaagaccctacttctaacctccctgttcttatgaattcgaacagcatacccccgattccgctacgaccaactcatacacctcctatgaaaaaacttcctaccactcaccctagcattacttatatgatatgtctccatacccattacaatctccagcattccccctcaaacctaagaaatatgtctgataaaagagttactttgatggagtaaataataggagcttaaacccccttatttctaggactatgagaatcgaacccatccctgagaatccaaaattctccgtgccacctatcacaccccatcctaaagtaaggtcagctaaataagctatcgggcccataccccgaaaatgttggttatacccttcccgtactaattaatcccctggcccaacccgtcatctactctaccatctttgcaggcacactcatcacagcgctaagctcgcactgattttttacctgagtaggcctagaaataaacatgctagcttttattccagttctaaccaaaaaaataaaccctcgttccacagaagctgccatcaagtatttcctcacgcaagcaaccgcatccataatccttctaatagctatcctcttcaacaatatactctccggacaatgaaccataaccaatactaccaatcaatactcatcattaataatcataatggctatagcaataaaactaggaatagccccctttcacttctgagtcccagaggttacccaaggcacccctctgacatccggcctgcttcttctcacatgacaaaaactagcccccatctcaatcatataccaaatctctccctcactaaacgtaagccttctcctcactctctcaatcttatccatcatagcaggcagttgaggtggattaaaccaaacccagctacgcaaaatcttagcatactcctcaattacccacataggatgaataatagcagttctaccgtacaaccctaacataaccattcttaatttaactatttatattatcctaactactaccgcattcctactactcaacttaaactccagcaccacgaccctactactatctcgcacctgaaacaagctaacatgactaacacccttaattccatccaccctcctctccctaggaggcctgcccccgctaaccggctttttgcccaaatgggccattatcgaagaattcacaaaaaacaatagcctcatcatccccaccatcatagccaccatcaccctccttaacctctacttctacctacgcctaatctactccacctcaatcacactactccccatatctaacaacgtaaaaataaaatgacagtttgaacatacaaaacccaccccattcctccccacactcatcgcccttaccacgctactcctacctatctccccttttatactaataatcttatagaaatttaggttaaatacagaccaagagccttcaaagccctcagtaagttgcaatacttaatttctgtaacagctaaggactgcaaaaccccactctgcatcaactgaacgcaaatcagccactttaattaagctaagcccttactagaccaatgggacttaaacccacaaacacttagttaacagctaagcaccctaatcaactggcttcaatctacttctcccgccgccgggaaaaaaggcgggagaagccccggcaggtttgaagctgcttcttcgaatttgcaattcaatatgaaaatcacctcggagctggtaaaaagaggcctaacccctgtctttagatttacagtccaatgcttcactcagccattttacctcacccccactgatgttcgccgaccgttgactattctctacaaaccacaaagacattggaacactatacctattattcggcgcatgagctggagtcctaggcacagctctaagcctccttattcgagccgagctgggccagccaggcaaccttctaggtaacgaccacatctacaacgttatcgtcacagcccatgcatttgtaataatcttcttcatagtaatacccatcataatcggaggctttggcaactgactagttcccctaataatcggtgcccccgatatggcgtttccccgcataaacaacataagcttctgactcttacctccctctctcctactcctgctcgcatctgctatagtggaagccggagcaggaacaggttgaacagtctaccctcccttagcagggaactactcccaccctggagcctccgtagacctaaccatcttctccttacacctagcaggtgtctcctctatcttaggggccatcaatttcatcacaacaattatcaatataaaaccccctgccataacccaataccaaacgcccctcttcgtctgatccgtcctaatcacagcagtcctacttctcctatctctcccagtcctagctgctggcatcactatactactaacagaccgcaacctcaacaccaccttcttcgaccccgccggaggaggagaccccattctataccaacacctattctgatttttcggtcaccctgaagtttatattcttatcctaccaggcttcggaataatctcccatattgtaacttactactccggaaaaaaagaaccatttggatacataggtatggtctgagctatgatatcaattggcttcctagggtttatcgtgtgagcacaccatatatttacagtaggaatagacgtagacacacgagcatatttcacctccgctaccataatcatcgctatccccaccggcgtcaaagtatttagctgactcgccacactccacggaagcaatatgaaatgatctgctgcagtgctctgagccctaggattcatctttcttttcaccgtaggtggcctgactggcattgtattagcaaactcatcactagacatcgtactacacgacacgtactacgttgtagctcacttccactatgtcctatcaataggagctgtatttgccatcataggaggcttcattcactgatttcccctattctcaggctacaccctagaccaaacctacgccaaaatccatttcactatcatattcatcggcgtaaatctaactttcttcccacaacactttctcggcctatccggaatgccccgacgttactcggactaccccgatgcatacaccacatgaaacatcctatcatctgtaggctcattcatttctctaacagcagtaatattaataattttcatgatttgagaagccttcgcttcgaagcgaaaagtcctaatagtagaagaaccctccataaacctggagtgactatatggatgccccccaccctaccacacattcgaagaacccgtatacataaaatctagacaaaaaaggaaggaatcgaaccccccaaagctggtttcaagccaaccccatggcctccatgactttttcaaaaaggtattagaaaaaccatttcataactttgtcaaagttaaattataggctaaatcctatatatcttaatggcacatgcagcgcaagtaggtctacaagacgctacttcccctatcatagaagagcttatcacctttcatgatcacgccctcataatcattttccttatctgcttcctagtcctgtatgcccttttcctaacactcacaacaaaactaactaatactaacatctcagacgctcaggaaatagaaaccgtctgaactatcctgcccgccatcatcctagtcctcatcgccctcccatccctacgcatcctttacataacagacgaggtcaacgatccctcccttaccatcaaatcaattggccaccaatggtactgaacctacgagtacaccgactacggcggactaatcttcaactcctacatacttcccccattattcctagaaccaggcgacctgcgactccttgacgttgacaatcgagtagtactcccgattgaagcccccattcgtataataattacatcacaagacgtcttgcactcatgagctgtccccacattaggcttaaaaacagatgcaattcccggacgtctaaaccaaaccactttcaccgctacacgaccgggggtatactacggtcaatgctctgaaatctgtggagcaaaccacagtttcatgcccatcgtcctagaattaattcccctaaaaatctttgaaatagggcccgtatttaccctatagcaccccctctaccccctctagagcccactgtaaagctaacttagcattaaccttttaagttaaagattaagagaaccaacacctctttacagtgaaatgccccaactaaatactaccgtatggcccaccataattacccccatactccttacactattcctcatcacccaactaaaaatattaaacacaaactaccacctacctccctcaccaaagcccataaaaataaaaaattataacaaaccctgagaaccaaaatgaacgaaaatctgttcgcttcattcattgcccccacaatcctaggcctacccgccgcagtactgatcattctatttccccctctattgatccccacctccaaatatctcatcaacaaccgactaatcaccacccaacaatgactaatcaaactaacctcaaaacaaatgataaccatacacaacactaaaggacgaacctgatctcttatactagtatccttaatcatttttattgccacaactaacctcctcggactcctgcctcactcatttacaccaaccacccaactatctataaacctagccatggccatccccttatgagcgggcgcagtgattataggctttcgctctaagattaaaaatgccctagcccacttcttaccacaaggcacacctacaccccttatccccatactagttattatcgaaaccatcagcctactcattcaaccaatagccctggccgtacgcctaaccgctaacattactgcaggccacctactcatgcacctaattggaagcaccaccctagcaatatcaaccattaaccttccctctacacttatcatcttcacaattctaattctactgactatcctagaaatcgctgtcgccttaatccaagcctacgttttcacacttctagtaagcctctacctgcacgacaacacataatgacccaccaatcacatgcctatcatatagtaaaacccagcccatgacccctaacaggggccctctcagccctcctaatgacctccggcctagccatgtgatttcacttccactccataacgctcctcatactaggcctactaaccaacacactaaccatataccaatgatggcgcgatgtaacacgagaaagcacataccaaggccaccacacaccacctgtccaaaaaggccttcgatacgggataatcctatttattacctcagaagtttttttcttcgcaggatttttctgagccttttaccactccagcctagcccctaccccccaattaggagggcactggcccccaacaggcatcaccccgctaaatcccctagaagtcccactcctaaacacatccgtattactcgcatcaggagtatcaatcacctgagctcaccatagtctaatagaaaacaaccgaaaccaaataattcaagcactgctcattacaattttactgggtctctattttaccctcctacaagcctcagagtacttcgagtctcccttcaccatttccgacggcatctacggctcaacattttttgtagccacaggcttccacggacttcacgtcattattggctcaactttcctcactatctgcttcatccgccaactaatatttcactttacatccaaacatcactttggcttcgaagccgccgcctgatactggcattttgtagatgtggtttgactatttctgtatgtctccatctattgatgagggtcttactcttttagtataaatagtaccgttaacttccaattaactagttttgacaacattcaaaaaagagtaataaacttcgccttaattttaataatcaacaccctcctagccttactactaataattattacattttgactaccacaactcaacggctacatagaaaaatccaccccttacgagtgcggcttcgaccctatatcccccgcccgcgtccctttctccataaaattcttcttagtagctattaccttcttattatttgatctagaaattgccctccttttacccctaccatgagccctacaaacaactaacctgccactaatagttatgtcatccctcttattaatcatcatcctagccctaagtctggcctatgagtgactacaaaaaggattagactgagccgaattggtatatagtttaaacaaaacgaatgatttcgactcattaaattatgataatcatatttaccaaatgcccctcatttacataaatattatactagcatttaccatctcacttctaggaatactagtatatcgctcacacctcatgtcctccctactatgcctagaaggaataatactatcgctgttcattatagctactctcataaccctcaacacccactccctcttagccaatattgtgcctattgccatactagtctttgccgcctgcgaagcagcggtgggcctagccctactagtctcaatctccaacacatatggcctagactacgtacataacctaaacctactccaatgctaaaactaatcgtcccaacaattatattactaccactgacatgactttccaaaaaacacataatttgaatcaacacaaccacccacagcctaattattagcatcatccctctactattttttaaccaaatcaacaacaacctatttagctgttccccaaccttttcctccgaccccctaacaacccccctcctaatactaactacctgactcctacccctcacaatcatggcaagccaacgccacttatccagtgaaccactatcacgaaaaaaactctacctctctatactaatctccctacaaatctccttaattataacattcacagccacagaactaatcatattttatatcttcttcgaaaccacacttatccccaccttggctatcatcacccgatgaggcaaccagccagaacgcctgaacgcaggcacatacttcctattctacaccctagtaggctcccttcccctactcatcgcactaatttacactcacaacaccctaggctcactaaacattctactactcaccctcactgcccaagaactatcaaactcctgagccaacaacttaatatgactagcttacacaatagcttttatagtaaagatacctctttacggactccacttatgactccctaaagcccatgtcgaagcccccatcgctgggtcaatagtacttgccgcagtactcttgaaactaggcggctatggcataatacgcctcacactcattctcaaccccctgacaaaacacatagcctaccccttccttgtactatccctatgaggcataattataacaagctccatctgcctacgacaaacagacctaaaatcgctcattgcatactcttcaatcagccacatagccctcgtagtaacagccattctcatccaaaccccctgaagcttcaccggcgcagtcattctcataatcgcccacggacttacatcctcattactattctgcctagcaaactcaaactacgaacgcactcacagtcgcatcataatcctctctcaaggacttcaaactctactcccactaatagctttttgatgacttttagcaagcctcgctaacctcgccttaccccccactattaacctactgggagaactctctgtgctagtaaccacgttctcctgatcaaatatcactctcctacttacaggactcaacatactagtcacagccctatactccctctacatatttaccacaacacaatggggctcactcacccaccacattaacaacataaaaccctcattcacacgagaaaacaccctcatgttcatacacctatcccccattctcctcctatccctcaaccccgacatcattaccgggttttcctcttgtaaatatagtttaaccaaaacatcagattgtgaatctgacaacagaggcttacgaccccttatttaccgagaaagctcacaagaactgctaactcatgcccccatgtctaacaacatggctttctcaacttttaaaggataacagctatccattggtcttaggccccaagaattttggtgcaactccaaataaaagtaataaccatgcacactactataaccaccctaaccctaacttccctaattccccccatccttaccaccctcgttaaccctaacaaaaaaaactcatacccccattatgtaaaatccattgtcgcatccacctttattatcagtctcttccccacaacaatattcatgtgcctagaccaagaagttattatctcgaactgacactgagccacaacccaaacaacccagctctccctaagcttcaaactagactacttctccataatattcatccctgtagcattgttcgttacatggtccatcatagaattctcactgtgatatataaactcagacccaaacattaatcagttcttcaaatatctactcatcttcctaattaccatactaatcttagttaccgctaacaacctattccaactgttcatcggctgagagggcgtaggaattatatccttcttgctcatcagttgatgatacgcccgagcagatgccaacacagcagccattcaagcaatcctatacaaccgtatcggcgatatcggtttcatcctcgccttagcatgatttatcctacactccaactcatgagacccacaacaaatagcccttctaaacgctaatccaagcctcaccccactactaggcctcctcctagcagcagcaggcaaatcagcccaattaggtctccacccctgactcccctcagccatagaaggccccaccccagtctcagccctactccactcaagcactatagttgtagcaggaatcttcttactcatccgcttccaccccctagcagaaaatagcccactaatccaaactctaacactatgcttaggcgctatcaccactctgttcgcagcagtctgcgcccttacacaaaatgacatcaaaaaaatcgtagccttctccacttcaagtcaactaggactcataatagttacaatcggcatcaaccaaccacacctagcattcctgcacatctgtacccacgccttcttcaaagccatactatttatgtgctccgggtccatcatccacaaccttaacaatgaacaagacattcgaaaaataggaggactactcaaaaccatacctctcacttcaacctccctcaccattggcagcctagcattagcaggaatacctttcctcacaggtttctactccaaagaccacatcatcgaaaccgcaaacatatcatacacaaacgcctgagccctatctattactctcatcgctacctccctgacaagcgcctatagcactcgaataattcttctcaccctaacaggtcaacctcgcttccccacccttactaacattaacgaaaataaccccaccctactaaaccccattaaacgcctggcagccggaagcctattcgcaggatttctcatcactaacaacatttcccccgcatcccccttccaaacaacaatccccctctacctaaaactcacagccctcgctgtcactttcctaggacttctaacagccctagacctcaactacctaaccaacaaacttaaaataaaatccccactatgcacattttatttctccaacatactcggattctaccctagcatcacacaccgcacaatcccctatctaggccttcttacgagccaaaacctgcccctactcctcctagacctaacctgactagaaaagctattacctaaaacaatttcacagcaccaaatctccacctccatcatcacctcaacccaaaaaggcataattaaactttacttcctctctttcttcttcccactcatcctaaccctactcctaatcacataacctattcccccgagcaatttcaattacaatatatacaccaacaaacaatgttcaaccagtaactactactaatcaacgcccataatcatacaaagcccccgcaccaataggatcctcccgaatcaaccctgacccctctccttcataaattattcagcttcctacactattaaagtttaccacaaccaccaccccatcatactctttcacccacagcaccaatcctacctccatcgctaaccccactaaaacactcaccaagacctcaacccctgacccccatgcctcaggatactcctcaatagccatcgctgtagtatatccaaagacaaccatcattccccctaaataaattaaaaaaactattaaacccatataacctcccccaaaattcagaataataacacacccgaccacaccgctaacaatcaatactaaacccccataaataggagaaggcttagaagaaaaccccacaaaccccattactaaacccacactcaacagaaacaaagcatacatcattattctcgcacggactacaaccacgaccaatgatatgaaaaaccatcgttgtatttcaactacaagaacaccaatgaccccaatacgcaaaattaaccccctaataaaattaattaaccactcactcatcgacctccccaccccatccaacatctccgcatgatgaaacttcggctcactccttggcgcctgcctgatcctccaaatcaccacaggactattcctagccatgcactactcaccagacgcctcaaccgccttttcatcaatcgcccacatcactcgagacgtaaattatggctgaatcatccgctaccttcacgccaatggcgcctcaatattctttatctgcctcttcctacacatcgggcgaggcctatattacggatcatttctctactcagaaacctgaaacatcggcattatcctcctgcttgcaactatagcaacagccttcataggctatgtcctcccgtgaggccaaatatcattctgaggggccacagtaattacaaacttactatccgccatcccatacattgggacagacctagttcaatgaatctgaggaggctactcagtagacagtcccaccctcacacgattctttacctttcacttcatcttgcccttcattattgcagccctagcagcactccacctcctattcttgcacgaaacgggatcaaacaaccccctaggaatcacctcccattccgataaaatcaccttccacccttactacacaatcaaagacgccctcggcttacttctcttccttctctccttaatgacattaacactattctcaccagacctcctaggcgacccagacaattataccctagccaaccccttaaacacccctccccacatcaagcccgaatgatatttcctattcgcctacacaattctccgatccgtccctaacaaactaggaggcgtccttgccctattactatccatcctcatcctagcaataatccccatcctccatatatccaaacaacaaagcataatatttcgcccactaagccaatcactttattgactcctagccgcagacctcctcattctaacctgaatcggaggacaaccagtaagctacccttttaccatcattggacaagtagcatccgtactatacttcacaacaatcctaatcctaataccaactatctccctaattgaaaacaaaatactcaaatggacctgtccttgtagtataaactaatacaccagtcttgtaaaccggagatgaaaacctttttccaaggacaaatcagagaaaaagtctttaactccaccattagcacccaaagctaagattctaatttaaactattctctgttctttcatggggaagcagatttgggtaccacccaagtattgactcacccatcaacaaccgctatgtatttcgtacattactgccagccaccatgaatattgtacggtaccataaatacttgaccacctgtagtacataaaaacccaatccacatcaaaaccccctccccatgcttacaagcaagtacagcaatcaacccccaactatcacacatcaactgcaactccaaagccacccctcacccactaggataccaacaaacctacccacccttaacagtacatagcacataaagccatttaccgtacatagcacattacagtcaaatcccttctcgtccccatggatgacccccctcagataggggtcccttgaccaccatcctccgtgaaatcaatatcccgcacaagagtgctactctcctcgctccgggcccataacacttgggggtagctaaagtgaactgtatccgacatctggttcctacttcagggccataaagcctaaatagcccacacgttccccttaaataagacatcacgatg

SEQ ID NO: 96 - DNA, 16574 bp, Homo sapiens mitochondrial
  3112: "n" refers to a nucleotide at position 3107 of the Cambridge Reference Sequence (CRS, Anderson et al. 1981 Nature 290:457-465), later determined to be absent from the human mtDNA sequence according to the revised CRS (rCRS, Andrews et al. 1999 Nature Genetics 23:147); "n" therefore represents a single nucleotide deletion at a position corresponding to nucleotide 3107 of SEQ ID NO:1 as provided herein.
gatcacaggtctatcaccctattaaccactcacgggagctctccatgcatttggtattttcgtctggggggtatgcacgcgatagcattgcgagacgctggagccggagcaccctatgtcgcagtatctgtctttgattcctgcctcatcctattatttatcgcacctacgttcaatattacaggcgaacatacttactaaagtgtgttaattaattaatgcttgtaggacataataataacaattgaatgtctgcacagccgctttccacacagacatcataacaaaaaatttccaccaaaccccccctccccccgcttctggccacagcacttaaacacatctctgccaaaccccaaaaacaaagaaccctaacaccagcctaaccagatttcaaattttatcttttggcggtatgcacttttaacagtcaccccccaactaacacattatttttccctcccactcccatactactaatctcatcaatacaacccccgcccatcctacccagcacacacacaccacacgctgctaaccccataccccgaaccaaccaaaccccaaagacaccccccacagtttatgtagcttacctcctcaaagcaatacactgaaaatgtttagacgggctcacatcaccccataaacaaataggtttggtcctagcctttctattagctcttagtaagattacacatgcaagcatccccgttccagtgagttcaccctctaaatcaccacgatcaaaagggacaagcatcaagcacgcagcaatgcagctcaaaacgcttagcctagccacacccccacgggaaacagcagtgattaacctttagcaataaacgaaagtttaactaagctatactaaccccagggttggtcaatttcgtgccagccaccgcggtcacacgattaacccaagtcaatagaagccggcgtaaagagtgttttagatcaccccctccccaataaagctaaaactcacctgagttgtaaaaaactccagttgacacaaaatagactacgaaagtggctttaacatatctgaacacacaatagctaagacccaaactgggattagataccccactatgcttagccctaaacctcaacagttaaatcaacaaaactgctcgccagaacactacgagccacagcttaaaactcaaaggacctggcggtgcttcatatccctctagaggagcctgttctgtaatcgataaaccccgatcaacctcaccacctcttgctcagcctatataccgccatcttcagcaaaccctgatgaaggctacaaagtaagcgcaagtacccacgtaaagacgttaggtcaaggtgtagcccatgaggtggcaagaaatgggctacattttctaccccagaaaactacgatagcccttatgaaacttaagggtcgaaggtggatttagcagtaaactgagagtagagtgcttagttgaacagggccctgaagcgcgtacacaccgcccgtcaccctcctcaagtatacttcaaaggacatttaactaaaacccctacgcatttatatagaggagacaagtcgtaacatggtaagtgtactggaaagtgcacttggacgaaccagagtgtagcttaacacaaagcacccaacttacacttaggagatttcaacttaacttgaccgctctgagctaaacctagccccaaacccactccaccttactaccagacaaccttagccaaaccatttacccaaataaagtataggcgatagaaattgaaacctggcgcaatagatatagtaccgcaagggaaagatgaaaaattataaccaagcataatatagcaaggactaacccctataccttctgcataatgaattaactagaaataactttgcaaggagagccaaagctaagacccccgaaaccagacgagctacctaagaacagctaaaagagcacacccgtctatgtagcaaaatagtgggaagatttataggtagaggcgacaaacctaccgagcctggtgatagctggttgtccaagatagaatcttagttcaactttaaatttgcccacagaaccctctaaatccccttgtaaatttaactgttagtccaaagaggaacagctctttggacactaggaaaaaaccttgtagagagagtaaaaaatttaacacccatagtaggcctaaaagcagccaccaattaagaaagcgttcaagctcaacacccactacctaaaaaatcccaaacatataactgaactcctcacacccaattggaccaatctatcaccctatagaagaactaatgttagtataagtaacatgaaaacattctcctccgcataagcctgcgtcagattaaaacactgaactgacaattaacagcccaatatctacaatcaaccaacaagtcattattaccctcactgtcaacccaacacaggcatgctcataaggaaaggttaaaaaaagtaaaaggaactcggcaaatcttaccccgcctgtttaccaaaaacatcacctctagcatcaccagtattagaggcaccgcctgcccagtgacacatgtttaacggccgcggtaccctaaccgtgcaaaggtagcataatcacttgttccttaaatagggacctgtatgaatggctccacgagggttcagctgtctcttacttttaaccagtgaaattgacctgcccgtgaagaggcgggcataacacagcaagacgagaagaccctatggagctttaatttattaatgcaaacagtacctaacaaacccacaggtcctaaactaccaaacctgcattaaaaatttcggttggggcgacctcggagcagaacccaacctccgagcagtacatgctaagacttcaccagtcaaagcgaactactatactcaattgatccaataacttgaccaacggaacaagttaccctagggataacagcgcaatcctattctagagtccatatcaacaatagggtttacgacctcgatgttggatcaggacatcccgatggtgcagccgctattaaaggttcgtttgttcaacgattaaagtcctacgtgatctgagttcagaccggagtaatccaggtcggtttctatctacnttcaaattcctccctgtacgaaaggacaagagaaataaggcctacttcacaaagcgccttcccccgtaaatgatatcatctcaacttagtattatacccacacccacccaagaacagggtttgttaagatggcagagcccggtaatcgcataaaacttaaaactttacagtcagaggttcaattcctcttcttaacaacatacccatggccaacctcctactcctcattgtacccattctaatcgcaatggcattcctaatgcttaccgaacgaaaaattctaggctatatacaactacgcaaaggccccaacgttgtaggcccctacgggctactacaacccttcgctgacgccataaaactcttcaccaaagagcccctaaaacccgccacatctaccatcaccctctacatcaccgccccgaccttagctctcaccatcgctcttctactatgaacccccctccccatacccaaccccctggtcaacctcaacctaggcctcctatttattctagccacctctagcctagccgtttactcaatcctctgatcagggtgagcatcaaactcaaactacgccctgatcggcgcactgcgagcagtagcccaaacaatctcatatgaagtcaccctagccatcattctactatcaacattactaataagtggctcctttaacctctccacccttatcacaacacaagaacacctctgattactcctgccatcatgacccttggccataatatgatttatctccacactagcagagaccaaccgaacccccttcgaccttgccgaaggggagtccgaactagtctcaggcttcaacatcgaatacgccgcaggccccttcgccctattcttcatagccgaatacacaaacattattataataaacaccctcaccactacaatcttcctaggaacaacatatgacgcactctcccctgaactctacacaacatattttgtcaccaagaccctacttctaacctccctgttcttatgaattcgaacagcatacccccgattccgctacgaccaactcatacacctcctatgaaaaaacttcctaccactcaccctagcattacttatatgatatgtctccatacccattacaatctccagcattccccctcaaacctaagaaatatgtctgataaaagagttactttgatagagtaaataataggagcttaaacccccttatttctaggactatgagaatcgaacccatccctgagaatccaaaattctccgtgccacctatcacaccccatcctaaagtaaggtcagctaaataagctatcgggcccataccccgaaaatgttggttatacccttcccgtactaattaatcccctggcccaacccgtcatctactctaccatctttgcaggcacactcatcacagcgctaagctcgcactgattttttacctgagtaggcctagaaataaacatgctagcttttattccagttctaaccaaaaaaataaaccctcgttccacagaagctgccatcaagtatttcctcacgcaagcaaccgcatccataatccttctaatagctatcctcttcaacaatatactctccggacaatgaaccataaccaatactaccaatcaatactcatcattaataatcataatggctatagcaataaaactaggaatagccccctttcacttctgagtcccagaggttacccaaggcacccctctgacatccggcctgcttcttctcacatgacaaaaactagcccccatctcaatcatataccaaatctctccctcactaaacgtaagccttctcctcactctctcaatcttatccatcatagcaggcagttgaggtggattaaaccaaacccagctacgcaaaatcttagcatactcctcaattacccacataggatgaataatagcagttctaccgtacaaccctaacataaccattcttaatttaactatttatattatcctaactactaccgcattcctactactcaacttaaactccagcaccacgaccctactactatctcgcacctgaaacaagctaacatgactaacacccttaattccatccaccctcctctccctaggaggcctgcccccgctaaccggctttttgcccaaatgggccattatcgaagaattcacaaaaaacaatagcctcatcatccccaccatcatagccaccatcaccctccttaacctctacttctacctacgcctaatctactccacctcaatcacactactccccatatctaacaacgtaaaaataaaatgacagtttgaacatacaaaacccaccccattcctccccacactcatcgcccttaccacgctactcctacctatctccccttttatactaataatcttatagaaatttaggttaaatacagaccaagagccttcaaagccctcagtaagttgcaatacttaatttctgtaacagctaaggactgcaaaaccccactctgcatcaactgaacgcaaatcagccactttaattaagctaagcccttactagaccaatgggacttaaacccacaaacacttagttaacagctaagcaccctaatcaactggcttcaatctacttctcccgccgccgggaaaaaaggcgggagaagccccggcaggtttgaagctgcttcttcgaatttgcaattcaatatgaaaatcacctcggagctggtaaaaagaggcctaacccctgtctttagatttacagtccaatgcttcactcagccattttacctcacccccactgatgttcgccgaccgttgactattctctacaaaccacaaagacattggaacactatacctattattcggcgcatgagctggagtcctaggcacagctctaagcctccttattcgagccgagctgggccagccaggcaaccttctaggtaacgaccacatctacaacgttatcgtcacagcccatgcatttgtaataatcttcttcatagtaatacccatcataatcggaggctttggcaactgactagttcccctaataatcggtgcccccgatatggcgtttccccgcataaacaacataagcttctgactcttacctccctctctcctactcctgctcgcatctgctatagtggaggccggagcaggaacaggttgaacagtctaccctcccttagcagggaactactcccaccctggagcctccgtagacctaaccatcttctccttacacctagcaggtgtctcctctatcttaggggccatcaatttcatcacaacaattatcaatataaaaccccctgccataacccaataccaaacgcccctcttcgtctgatccgtcctaatcacagcagtcctacttctcctatctctcccagtcctagctgctggcatcactatactactaacagaccgcaacctcaacaccaccttcttcgaccccgccggaggaggagaccccattctataccaacacctattctgatttttcggtcaccctgaagtttatattcttatcctaccaggcttcggaataatctcccatattgtaacttactactccggaaaaaaagaaccatttggatacataggtatggtctgagctatgatatcaattggcttcctagggtttatcgtgtgagcacaccatatatttacagtaggaatagacgtagacacacgagcatatttcacctccgctaccataatcatcgctatccccaccggcgtcaaagtatttagctgactcgccacactccacggaagcaatatgaaatgatctgctgcagtgctctgagccctaggattcatctttcttttcaccgtaggtggcctgactggcattgtattagcaaactcatcactagacatcgtactacacgacacgtactacgttgtagcccacttccactatgtcctatcaataggagctgtatttgccatcataggaggcttcattcactgatttcccctattctcaggctacaccctagaccaaacctacgccaaaatccatttcactatcatattcatcggcgtaaatctaactttcttcccacaacactttctcggcctatccggaatgccccgacgttactcggactaccccgatgcatacaccacatgaaacatcctatcatctgtaggctcattcatttctctaacagcagtaatattaataattttcatgatttgagaagccttcgcttcgaagcgaaaagtcctaatagtagaagaaccctccataaacctggagtgactatatggatgccccccaccctaccacacattcgaagaacccgtatacataaaatctagacaaaaaaggaaggaatcgaaccccccaaagctggtttcaagccaaccccatggcctccatgactttttcaaaaaggtattagaaaaaccatttcataactttgtcaaagttaaattataggctaaatcctatatatcttaatggcacatgcagcgcaagtaggtctacaagacgctacttcccctatcatagaagagcttatcacctttcatgatcacgccctcataatcattttccttatctgcttcctagtcctgtatgcccttttcctaacactcacaacaaaactaactaatactaacatctcagacgctcaggaaatagaaaccgtctgaactatcctgcccgccatcatcctagtcctcatcgccctcccatccctacgcatcctttacataacagacgaggtcaacgatccctcccttaccatcaaatcaattggccaccaatggtactgaacctacgagtacaccgactacggcggactaatcttcaactcctacatacttcccccattattcctagaaccaggcgacctgcgactccttgacgttgacaatcgagtagtactcccgattgaagcccccattcgtataataattacatcacaagacgtcttgcactcatgagctgtccccacattaggcttaaaaacagatgcaattcccggacgtctaaaccaaaccactttcaccgctacacgaccgggggtatactacggtcaatgctctgaaatctgtggagcaaaccacagtttcatgcccatcgtcctagaattaattcccctaaaaatctttgaaatagggcccgtatttaccctatagcaccccctctaccccctctagagcccactgtaaagctaacttagcattaaccttttaagttaaagattaagaggaccaacacctctttacagtgaaatgccccaactaaatactaccgtatggcccaccataattacccccatactccttacactattcctcatcacccaactaaaaatattaaacacaaactaccacctacctccctcaccaaagcccataaaaataaaaaattataacaaaccctgagaaccaaaatgaacgaaaatctgttcgcttcattcattgcccccacaatcctaggcctacccgccgcagtactgatcattctatttccccctctattgatccccacctccaaatatctcatcaacaaccgactaatcaccacccaacaatgactaatcaaactaacctcaaaacaaatgataaccatacacaacactaaaggacgaacctgatctcttatactagtatccttaatcatttttattgccacaactaacctcctcggactcctgcctcactcatttacaccaaccacccaactatctataaacctagccatggccatccccttatgagcgggcgcagtgattataggctttcgctctaagattaaaaatgccctagcccacttcttaccacaaggcacacctacaccccttatccccatactagttattatcgaaaccatcagcctactcattcaaccaatagccctggccgtacgcctaaccgctaacattactgcaggccacctactcatgcacctaattggaagcgccaccctagcaatatcaaccattaaccttccctctacacttatcatcttcacaattctaattctactgactatcctagaaatcgctgtcgccttaatccaagcctacgttttcacacttctagtaagcctctacctgcacgacaacacataatgacccaccaatcacatgcctatcatatagtaaaacccagcccatgacccctaacaggggccctctcagccctcctaatgacctccggcctagccatgtgatttcacttccactccataacgctcctcatactaggcctactaaccaacacactaaccatataccaatgatggcgcgatgtaacacgagaaagcacataccaaggccaccacacaccacctgtccaaaaaggccttcgatacgggataatcctatttattacctcagaagtttttttcttcgcaggatttttctgagccttttaccactccagcctagcccctaccccccaattaggagggcactggcccccaacaggcatcaccccgctaaatcccctagaagtcccactcctaaacacatccgtattactcgcatcaggagtatcaatcacctgagctcaccatagtctaatagaaaacaaccgaaaccaaataattcaagcactgcttattacaattttactgggtctctattttaccctcctacaagcctcagagtacttcgagtctcccttcaccatttccgacggcatctacggctcaacattttttgtagccacaggcttccacggacttcacgtcattattggctcaactttcctcactatctgcttcatccgccaactaatatttcactttacatccaaacatcactttggcttcgaagccgccgcctgatactggcattttgtagatgtggtttgactatttctgtatgtctccatctattgatgagggtcttactcttttagtataaatagtaccgttaacttccaattaactagttttgacaacattcaaaaaagagtaataaacttcgccttaattttaataatcaacaccctcctagccttactactaataattattacattttgactaccacaactcaacggctacatagaaaaatccaccccttacgagtgcggcttcgaccctatatcccccgcccgcgtccctttctccataaaattcttcttagtagctattaccttcttattatttgatctagaaattgccctccttttacccctaccatgagccctacaaacaactaacctgccactaatagttatgtcatccctcttattaatcatcatcctagccctaagtctggcctatgagtgactacaaaaaggattagactgaaccgaattggtatatagtttaaacaaaacgaatgatttcgactcattaaattatgataatcatatttaccaaatgcccctcatttacataaatattatactagcatttaccatctcacttctaggaatactagtatatcgctcacacctcatatcctccctactatgcctagaaggaataatactatcgctgttcattatagctactctcataaccctcaacacccactccctcttagccaatattgtgcctattgccatactagtctttgccgcctgcgaagcagcggtgggcctagccctactagtctcaatctccaacacatatggcctagactacgtacataacctaaacctactccaatgctaaaactaatcgtcccaacaattatattactaccactgacatgactttccaaaaaacacataatttgaatcaacacaaccacccacagcctaattattagcatcatccctctactattttttaaccaaatcaacaacaacctatttagctgttccccaaccttttcctccgaccccctaacaacccccctcctaatactaactacctgactcctacccctcacaatcatggcaagccaacgccacttatccagtgaaccactatcacgaaaaaaactctacctctctatactaatctccctacaaatctccttaattataacattcacagccacagaactaatcatattttatatcttcttcgaaaccacacttatccccaccttggctatcatcacccgatgaggcaaccagccagaacgcctgaacgcaggcacatacttcctattctacaccctagtaggctcccttcccctactcatcgcactaatttacactcacaacaccctaggctcactaaacattctactactcactctcactgcccaagaactatcaaactcctgagccaacaacttaatatgactagcttacacaatagcttttatagtaaagatacctctttacggactccacttatgactccctaaagcccatgtcgaagcccccatcgctgggtcaatagtacttgccgcagtactcttaaaactaggcggctatggtataatacgcctcacactcattctcaaccccctgacaaaacacatagcctaccccttccttgtactatccctatgaggcataattataacaagctccatctgcctacgacaaacagacctaaaatcgctcattgcatactcttcaatcagccacatagccctcgtagtaacagccattctcatccaaaccccctgaagcttcaccggcgcagtcattctcataatcgcccacgggcttacatcctcattactattctgcctagcaaactcaaactacgaacgcactcacagtcgcatcataatcctctctcaaggacttcaaactctactcccactaatagctttttgatgacttctagcaagcctcgctaacctcgccttaccccccactattaacctactgggagaactctctgtgctagtaaccacgttctcctgatcaaatatcactctcctacttacaggactcaacatactagtcacagccctatactccctctacatatttaccacaacacaatggggctcactcacccaccacattaacaacataaaaccctcattcacacgagaaaacaccctcatgttcatacacctatcccccattctcctcctatccctcaaccccgacatcattaccgggttttcctcttgtaaatatagtttaaccaaaacatcagattgtgaatctgacaacagaggcttacgaccccttatttaccgagaaagctcacaagaactgctaactcatgcccccatgtctaacaacatggctttctcaacttttaaaggataacagctatccattggtcttaggccccaaaaattttggtgcaactccaaataaaagtaataaccatgcacactactataaccaccctaaccctgacttccctaattccccccatccttaccaccctcgttaaccctaacaaaaaaaactcatacccccattatgtaaaatccattgtcgcatccacctttattatcagtctcttccccacaacaatattcatgtgcctagaccaagaagttattatctcgaactgacactgagccacaacccaaacaacccagctctccctaagcttcaaactagactacttctccataatattcatccctgtagcattgttcgttacatggtccatcatagaattctcactgtgatatataaactcagacccaaacattaatcagttcttcaaatatctactcatcttcctaattaccatactaatcttagttaccgctaacaacctattccaactgttcatcggctgagaaggcgtaggaattatatccttcttgctcatcagttgatgatacgcccgagcagatgccaacacagcagccattcaagcaatcctatacaaccgtatcggcgatatcggtttcatcctcgccttagcatgatttatcctacactccaactcatgagacccacaacaaatagcccttctaaacgctaatccaagcctcaccccactactaggcctcctcctagcagcagcaggcaaatcagcccaattaggtctccacccctgactcccctcagccatagaaggccccaccccagtctcagccctactccactcaagcactatagttgtagcaggaatcttcttactcatccgcttccaccccctagcagaaaatagcccactaatccaaactctaacactatgcttaggcgctatcaccactctgttcgcagcagtctgcgcccttacacaaaatgacatcaaaaaaatcgtagccttctccacttcaagtcaactaggactcataatagttacaatcggcatcaaccaaccacacctagcattcctgcacatctgtacccacgccttcttcaaagccatactatttatgtgctccgggtccatcatccacaaccttaacaatgaacaagatattcgaaaaataggaggactactcaaaaccatgcctctcacttcaacctccctcaccattggcagcctagcattagcaggaatacctttcctcacaggtttctactccaaagaccacatcatcgaaaccgcaaacatatcatacacaaacgcctgagccctatctattactctcatcgctacctccctgacaagcgcctatagcactcgaataattcttctcaccctaacaggtcaacctcgcttccccacccttactaacattaacgaaaataaccccaccctactaaaccccattaaacgcctggcagccggaagcctattcgcaggatttctcattactaacaacatttcccccgcatcccccttccaaacaacaatccccctctacctaaaactcacagccctcgctgtcactttcctaggacttctaacagccctagacctcaactacctaaccaacaaacttaaaataaaatccccactatgcacattttatttctccaacatactcggattctaccctagcatcacacaccgcacaatcccctatctaggccttcttacgagccaaaacctgcccctactcctcctagacctaacctgactagaaaagctattacctaaaacaatttcacagcaccaaatctccacctccatcatcacctcaacccaaaaaggcataattaaactttacttcctctctttcttcttcccactcatcctaaccctactcctaatcacataacctattcccccgagcaatctcaattacaatatatacaccaacaaacaatgttcaaccagtaactactactaatcaacgcccataatcatacaaagcccccgcaccaataggatcctcccgaatcaaccctgacccctctccttcataaattattcagcttcctacactattaaagtttaccacaaccaccaccccatcatactctttcacccacagcaccaatcctacctccatcgctaaccccactaaaacactcaccaagacctcaacccctgacccccatgcctcaggatactcctcaatagccatcgctgtagtatatccaaagacaaccatcattccccctaaataaattaaaaaaactattaaacccatataacctcccccaaaattcagaataataacacacccgaccacaccgctaacaatcaatactaaacccccataaataggagaaggcttagaagaaaaccccacaaaccccattactaaacccacactcaacagaaacaaagcatacatcattattctcgcacggactacaaccacgaccaatgatatgaaaaaccatcgttgtatttcaactacaagaacaccaatgaccccaatacgcaaaactaaccccctaataaaattaattaaccactcattcatcgacctccccaccccatccaacatctccgcatgatgaaacttcggctcactccttggcgcctgcctgatcctccaaatcaccacaggactattcctagccatgcactactcaccagacgcctcaaccgccttttcatcaatcgcccacatcactcgagacgtaaattatggctgaatcatccgctaccttcacgccaatggcgcctcaatattctttatctgcctcttcctacacatcgggcgaggcctatattacggatcatttctctactcagaaacctgaaacatcggcattatcctcctgcttgcaactatagcaacagccttcataggctatgtcctcccgtgaggccaaatatcattctgaggggccacagtaattacaaacttactatccgccatcccatacattgggacagacctagttcaatgaatctgaggaggctactcagtagacagtcccaccctcacacgattctttacctttcacttcatcttgcccttcattattgcagccctagcagcactccacctcctattcttgcacgaaacgggatcaaacaaccccctaggaatcacctcccattccgataaaatcaccttccacccttactacacaatcaaagacgccctcggcttacttctcttccttctctccttaatgacattaacactattctcaccagacctcctaggcgacccagacaattataccctagccaaccccttaaacacccctccccacatcaagcccgaatgatatttcctattcgcctacacaattctccgatccgtccctaacaaactaggaggcgtccttgccctattactatccatcctcatcctagcaataatccccatcctccatatatccaaacaacaaagcataatatttcgcccactaagccaatcactttattgactcctagccgcagacctcctcattctaacctgaatcggaggacaaccagtaagctacccttttaccatcattggacaagtagcatccgtactatacttcacaacaatcctaatcctaataccaactatctccctaattgaaaacaaaatactcaaatgggcctgtccttgtagtataaactaatacaccagtcttgtaaaccggagatgaaaacctttttccaaggacaaatcagagaaaaagtctttaactccaccattagcacccaaagctaagattctaatttaaactattctctgttctttcatggggaagcagatttgggtaccacccaagtattgactcacccatcaacaaccgctatgtatttcgtacattactgccagccaccatgaatattgtacggtaccataaatacttgaccacctgtagtacataaaaacccaatccacatcaaaaccccctccccatgcttacaagcaagtacagcaatcaaccctcaactatcacacatcaactgcaactccaaagccacccctcacccactaggataccaacaaacctacccatccttaacagcacatagtacataaagccatttaccgtacatagcacattacagtcaaatcccttctcgtccccatggatgacccccctcagataggggtcccttgaccaccatcctccgtgaaatcaatatcccgcacaagagtgctactctcctcgctccgggcccataacacttgggggtagctaaagtgaactgtatccgacatctggttcctacttcagggtcataaagcctaaatagcccacacgttccccttaaataagacatcacgatg

SEQ ID NO: 97 - DNA, 16571 bp, Homo sapiens mitochondrial
  3109: "n" refers to a nucleotide at position 3107 of the Cambridge Reference Sequence (CRS, Anderson et al. 1981 Nature 290:457-465), later determined to be absent from the human mtDNA sequence according to the revised CRS (rCRS, Andrews et al. 1999 Nature Genetics 23:147); "n" therefore represents a single nucleotide deletion at a position corresponding to nucleotide 3107 of SEQ ID NO:1 as provided herein.
gatcacaggtctatcaccctattaaccactcacgggagctctccatgcatttggtattttcgtctggggggtgtgcacgcgatagcattgcgagacgctggagccggagcaccctatgtcgcagtatctgtctttgattcctgcctcatcctattatttatcgcacctacgttcaatattacaggcgaacatacttactaaagtgtgttaattaattaatgcttgtaggacataataataacaattgaatgtctgcacagccgctttccacacagacatcataacaaaaaatttccaccaaaccccccctcccccccgcttctggccacagcacttaaacacatctctgccaaaccccaaaaacaaagaaccctaacaccagcctaaccagatttcaaattttatcttttggcggtatgcacttttaacagtcaccccccaactaacacattattttcccctcccactcccatactactaatctcatcaatacaacccccgcccatcctacccagcacacacacaccgctgctaaccccataccccgaaccaaccaaaccccaaagacaccccccacagtttatgtagcttacctcctcaaagcaatacactgaaaatgtttagacgggctcacatcaccccataaacaaataggtttggtcctagcctttctattagctcttagtaagattacacatgcaagcatccccgttccagtgagttcaccctctaaatcaccacgatcaaaagggacaagcatcaagcacgcagcaatgcagctcaaaacgcttagcctagccacacccccacgggaaacagcagtgattaacctttagcaataaacgaaagtttaactaagctatactaaccccagggttggtcaatttcgtgccagccaccgcggtcacacgattaacccaagtcaatagaagccggcgtaaagagtgttttagatcaccccctccccaataaagctaaaactcacctgagttgtaaaaaactccagttgacacaaaatagactacgaaagtggctttaacatatctgaacacacaatagctaagacccaaactgggattagataccccactatgcttagccctaaacctcaacagttaaatcaacaaaactgctcgccagaacactacgagccacagcttaaaactcaaaggacctggcggtgcttcatatccctctagaggagcctgttctgtaatcgataaaccccgatcaacctcaccacctcttgctcagcctatataccgccatcttcagcaaaccctgatgaaggctacaaagtaagcgcaagtacccacgtaaagacgttaggtcaaggtgtagcccatgaggtggcaagaaatgggctacattttctaccccagaaaactacgatagcccttatgaaacttaagggtcgaaggtggatttagcagtaaactgagagtagagtgcttagttgaacagggccctgaagcgcgtacacaccgcccgtcaccctcctcaagtatacttcaaaggacatttaactaaaacccctacgcatttatatagaggagacaagtcgtaacatggtaagtgtactggaaagtgcacttggacgaaccagagtgtagcttaacacaaagcacccaacttacacttaggagatttcaacttaacttgaccgctctgagctaaacctagccccaaacccactccaccttactaccagacaaccttagccaaaccatttacccaaataaagtataggcgatagaaattgaaacctggcgcaatagatatagtaccgcaagggaaagatgaaaaattataaccaagcataatatagcaaggactaacccctataccttctgcataatgaattaactagaaataactttgcaaggagagccaaagctaagacccccgaaaccagacgagctacctaagaacagctaaaagagcacacccgtctatgtagcaaaatagtgggaagatttataggtagaggcgacaaacctaccgagcctggtgatagctggttgtccaagatagaatcttagttcaactttaaatttgcccacagaaccctctaaatccccttgtaaatttaactgttagtccaaagaggaacagctctttggacactaggaaaaaaccttgtagagagagtaaaaaatttaacacccatagtaggcctaaaagcagccaccaattaagaaagcgttcaagctcaacacccactacctaaaaaatcccaaacatataactgaactcctcacacccaattggaccaatctatcaccctatagaagaactaatgttagtataagtaacatgaaaacattctcctccgcataagcctgcgtcagattaaaacactgaactgacaattaacagcccaatatctacaatcaaccaacaagtcattattaccctcactgtcaacccaacacaggcatgctcataaggaaaggttaaaaaaagtaaaaggaactcggcaaatcttaccccgcctgtttaccaaaaacatcacctctagcatcaccagtattagaggcaccgcctgcccagtgacacatgtttaacggccgcggtaccctaaccgtgcaaaggtagcataatcacttgttccttaaatagggacctgtatgaatggctccacgagggttcagctgtctcttacttttaaccagtgaaattgacctgcccgtgaagaggcgggcataacacagcaagacgagaagaccctatggagctttaatttattaatgcaaacagtacctaacaaacccacaggtcctaaactaccaaacctgcattaaaaatttcggttggggcgacctcggagcagaacccaacctccgagcagtacatgctaagacttcaccagtcaaagcgaactactatactcaattgatccaataacttgaccaacggaacaagttaccctagggataacagcgcaatcctattctagagtccatatcaacaatagggtttacgacctcgatgttggatcaggacatcccaatggtgcagccgctattaaaggttcgtttgttcaacgattaaagtcctacgtgatctgagttcagaccggagtaatccaggtcggtttctatctacnttcaaattcctccctgtacgaaaggacaagagaaataaggcctacttcacaaagcgccttcccccgtaaatgatatcatctcaacttagtattatacccacacccacccaagaacagggtttgttaagatggcagagcccggtaatcgcataaaacttaaaactttacagtcagaggttcaattcctcttcttaacaacatacccatggccaacctcctactcctcattgtacccattctaatcgcaatggcattcctaatgcttaccgaacgaaaaattctaggctatatacaactacgcaaaggccccaacgttgtaggcccctacgggctactacaacccttcgctgacgccataaaactcttcaccaaagagcccctaaaacccgccacatctaccatcaccctctacatcaccgccccgaccttagctctcaccatcgctcttctactatgaacccccctccccatacccaaccccctggtcaacctcaacctaggcctcctatttattctagccacctctagcctagccgtttactcaatcctctgatcagggtgagcatcaaactcaaactacgccctgatcggcgcactgcgagcagtagcccaaacaatctcatatgaagtcaccctagccatcattctactatcaacattactaataagtggctcctttaacctctccacccttatcacaacacaagaacacctctgattactcctgccatcatgacccttggccataatatgatttatctccacactagcagagaccaaccgaacccccttcgaccttgccgaaggggagtccgaactagtctcaggcttcaacatcgaatacgccgcaggccccttcgccctattcttcatagccgaatacacaaacattattataataaacaccctcaccactacaatcttcctaggaacaacatatgacgcactctcccctgaactctacacaacatattttgtcaccaagaccctacttctaacctccctgttcttatgaattcgaacagcatacccccgattccgctacgaccaactcatacacctcctatgaaaaaacttcctaccactcaccctagcattacttatatgatatgtctccatacccattacaatctccagcattccccctcaaacctaagaaatatgtctgataaaagagttactttgatagagtaaataataggagcttaaacccccttatttctaggactatgagaatcgaacccatccctgagaatccaaaattctccgtgccacctatcacaccccatcctaaagtaaggtcagctaaataagctatcgggcccataccccgaaaatgttggttatacccttcccgtactaattaatcccctggcccaacccgtcatctactctaccatctttgcaggcacactcatcacagcgctaagctcgcactgattttttacctgagtaggcctagaaataaacatgctagcttttattccagttctaaccaaaaaaataaaccctcgttccacagaagctgccaccaagtatttcctcacgcaagcaaccgcatccataatccttctaatagctatcctcttcaacaatatactctccggacaatgaaccataaccaatactaccaatcaatactcatcattaataatcataatggctatagcaataaaactaggaatagccccctttcacttctgagtcccagaggttacccaaggcacccctctgacatccggcctgcttcttctcacatgacaaaaactagcccccatctcaatcatataccaaatctctccctcactaaacgtaagccttctcctcactctctcaatcttatccatcatagcaggcagttgaggtggattaaaccaaacccagctacgcaaaatcttagcatactcctcaattacccacataggatgaataatagcagttctaccgtacaaccctaacataaccattcttaatttaactatttatattatcctaactactaccgcattcctactactcaacttaaactccagcaccacgaccctactactatctcgcacctgaaacaagctaacatgactaacacccttaattccatccaccctcctctccctaggaggcctgcccccgctaaccggctttttgcccaaatgggccattatcgaagaattcacaaaaaacaatagcctcatcatccccaccatcatagccaccatcaccctccttaacctctacttctacctacgcctaatctactccacctcaatcacactactccccatatctaacaacgtaaaaataaaatgacagtttgaacatacaaaacccaccccattcctccccacactcatcgcccttaccacgctacttctacctatctccccttttatactaataatcttatagaaatttaggttaaatacagaccaagagccttcaaagccctcagtaagttgcaatacttaatttctgtaacagctaaggactgcaaaaccccactctgcatcaactgaacgcaaatcagccactttaattaagctaagcccttactagaccaatgggacttaaacccacaaacacttagttaacagctaagcaccctaatcaactggcttcaatctacttctcccgccgccgggaaaaaaggcgggagaagccccggcaggtttgaagctgcttcttcgaatttgcaattcaatatgaaaatcacctcggagctggtaaaaagaggcctaacccctgtctttagatttacagtccaatgcttcactcagccattttacctcacccccactgatgttcgccgaccgttgactattctctacaaaccacaaagacattggaacactatacctattattcggcgcatgagctggagtcctaggcacagctctaagcctccttattcgagccgagctgggccagccaggcaaccttctaggtaacgaccacatctacaacgttatcgtcacagcccatgcatttgtaataatcttcttcatagtaatacccatcataatcggaggctttggcaactgactagttcccctaataatcggtgcccccgatatggcgtttccccgcataaacaacataagcttctgactcttacctccctctctcctactcctgctcgcatctgctatagtggaggccggagcaggaacaggttgaacagtctaccctcccttagcagggaactactcccaccctggagcctccgtagacctaaccatcttctccttacacctagcaggcgtctcctctatcttaggggccatcaatttcatcacaacaattatcaatataaaaccccctgccataacccaataccaaacgcccctcttcgtctgatccgtcctaatcacagcagtcctacttctcctatctctcccagtcctagctgctggcatcactatactactaacagaccgcaacctcaacaccaccttcttcgaccccgccggaggaggagaccccattctataccaacacctattctgatttttcggtcaccctgaagtttatattcttatcctaccaggcttcggaataatctcccatattgtaacttactactccggaaaaaaagaaccatttggatacataggtatggtctgagctatgatatcaattggcttcctagggtttatcgtgtgagcacaccatatatttacagtaggaatagacgtagacacacgagcatatttcacctccgctaccataatcatcgctatccccaccggcgtcaaagtatttagctgactcgccacactccacggaagcaatatgaaatgatctgctgcagtgctctgagccctaggattcatctttcttttcaccgtaggtggcctgactggcattgtattagcaaactcatcactagacatcgtactacacgacacgtactacgttgtagcccacttccactatgtcctatcaataggagctgtatttgccatcataggaggcttcattcactgatttcccctattctcaggctacaccctagaccaaacctacgccaaaatccatttcactatcatattcatcggcgtaaatctaactttcttcccacaacactttctcggcctatccggaatgccccgacgttactcggactaccccgatgcatacaccacatgaaacatcctatcatctgtaggctcattcatttctctaacagcagtaatattaataattttcatgatttgagaagccttcgcttcgaagcgaaaagtcctaatagtagaagaaccctccataaacctggagtgactatatggatgccccccaccctaccacacattcgaagaacccgtatacataaaatctagacaaaaaaggaaggaatcgaaccccccaaagctggtttcaagccaaccccatggcctccatgactttttcaaaaaggtattagaaaaaccatttcataactttgtcaaagttaaattataggctaaatcctatatatcttaatggcacatgcagcgcaagtaggtctacaagacgctacttcccctatcatagaagagcttatcacctttcatgatcacgccctcataatcattttccttatctgcttcctagtcctgtatgcccttttcctaacactcacaacaaaactaactaatactaacatctcagacgctcaggaaatagaaaccgtctgaactatcctgcccgccatcatcctagtcctcatcgccctcccatccctacgcatcctttacataacagacgaggtcaacgatccctcccttaccatcaaatcaattggccaccaatggtactgaacctacgagtacaccgactacggcggactaatcttcaactcctacatacttcccccattattcctagaaccaggcgacctgcgactccttgacgttgacaatcgagtagtactcccgattgaagcccccattcgtataataattacatcacaagacgtcttgcactcatgagctgtccccacattaggcttaaaaacagatgcaattcccggacgtctaaaccaaaccactttcaccgctacacgaccgggggtatactacggtcaatgctctgaaatctgtggagcaaaccacagtttcatgcccatcgtcctagaattaattcccctaaaaatctttgaaatagggcccgtatttaccctatagcaccccctctaccccctctagagcccactgtaaagctaacttagcattaaccttttaagttaaagattaagagaaccaacacctctttacagtgaaatgccccaactaaatactaccgtatggcccaccataattacccccatactccttacactattcctcatcacccaactaaaaatattaaacacaaactaccacctacctccctcaccaaagcccataaaaataaaaaattataacaaaccctgagaaccaaaatgaacgaaaatctgttcgcttcattcattgcccccacaatcctaggcctacccgccgcagtactgatcattctatttccccctctattgatccccacctccaaatatctcatcaacaaccgactaatcaccacccaacaatgactaatcaaactaacctcaaaacaaatgataaccatacacaacactaaaggacgaacctgatctcttatactagtatccttaatcatttttattgccacaactaacctcctcggactcctgcctcactcatttacaccaaccacccaactatctataaacctagccatggccatccccttatgagcgggcgcagtgattataggctttcgctctaagattaaaaatgccctagcccacttcttaccacaaggcacacctacaccccttatccccatactagttattatcgaaaccatcagcctactcattcaaccaatagccctggccgtacgcctaaccgctaacattactgcaggccacctactcatgcacctaattggaagcgccaccctagcaatatcaaccattaaccttccctctacacttatcatcttcacaattctaattctactgactatcctagaaatcgctgtcgccttaatccaagcctacgttttcacacttctagtaagcctctacctgcacgacaacacataatgacccaccaatcacatgcctatcatatagtaaaacccagcccatgacccctaacaggggccctctcagccctcctaatgacctccggcctagccatgtgatttcacttccactccataacgctcctcatactaggcctactaaccaacacactaaccatataccaatgatggcgcgatgtaacacgagaaagcacataccaaggccaccacacaccacctgtccaaaaaggccttcgatacgggataatcctatttattacctcagaagtttttttcttcgcaggatttttctgagccttttaccactccagcctagcccctaccccccaattaggagggcactggcccccaacaggcatcaccccgctaaatcccctagaagtcccactcctaaacacatccgtattactcgcatcaggagtatcaatcacctgagctcaccatagtctaatagaaaacaaccgaaaccaaataattcaagcactgcttattacaattttactgggtctctattttaccctcctacaagcctcagagtacttcgagtctcccttcaccatttccgacggcatctacggctcaacattttttgtagccacaggcttccacggacttcacgtcattattggctcaactttcctcactatctgcttcatccgccaactaatatttcactttacatccaaacatcactttggcttcgaagccgccgcctgatactggcattttgtagatgtggtttgactatttctgtatgtctccatctattgatgagggtcttactcttttagtataaatagtaccgttaacttccaattaactagttttgacaacattcaaaaaagagtaataaacttcgccttaattttaataatcaacaccctcctagccttactactaataattattacattttgactaccacaactcaacggctacatagaaaaatccaccccttacgagtgcggcttcgaccctatatcccccgcccgcgtccctttctccataaaattcttcttagtagctattaccttcttattatttgatctagaaattgccctccttttacccctaccatgagccctacaaacaactaacctgccactaatagttatgtcatccctcttattaatcatcatcctagccctaagtctggcctatgagtgactacaaaaaggattagactgaaccgaattggtatatagtttaaacaaaacgaatgatttcgactcattaaattatgataatcatatttaccaaatgcccctcatttacataaatattatactagcatttaccatctcacttctaggaatactagtatatcgctcacacctcatatcctccctactatgcctagaaggaataatactatcgctgttcattatagctactctcataaccctcaacacccactccctcttagccaatattgtgcctattgccatactagtctttgccgcctgcgaagcagcggtgggcctagccctactagtctcaatctccaacacatatggcctagactacgtacataacctaaacctactccaatgctaaaactaatcgtcccaacaattatattactaccactgacatgactttccaaaaaacacataatttgaatcaacacaaccacccacagcctaattattagcatcatccctctactattttttaaccaaatcaacaacaacctatttagctgttccccaaccttttcctccgaccccctaacaacccccctcctaatactaactacctgactcctacccctcacaatcatggcaagccaacgccacttatccagtgaaccactatcacgaaaaaaactctacctctctatactaatctccctacaaatctccttaattataacattcacagccacagaactaatcatattttatatcttcttcgaaaccacacttatccccaccttggctatcatcacccgatgaggcaaccagccagaacgcctgaacgcaggcacatacttcctattctacaccctagtaggctcccttcccctactcatcgcactaacttacactcacaacaccctaggctcactaaacattctactactcactctcactgcccaagaactatcaaactcctgagccaacaacttaatatgactagcttacacaatagcttttatagtaaagatacctctttacggactccacttatgactccctaaagcccatgtcgaagcccccatcgctgggtcaatagtacttgccgcagtactcttaaaactaggcggctatggtataatacgcctcacactcattctcaaccccctgacaaaacacatagcctaccccttccttgtactatccctatgaggcataattataacaagctccatctgcctacgacaaacagacctaaaatcgctcattgcatactcttcaatcagccacatagccctcgtagtaacagccattctcatccaaaccccctgaagcttcaccggcgcagtcattctcataatcgcccacgggcttacatcctcattactattctgcctagcaaactcaaactacgaacgcactcacagtcgcatcataatcctctctcaaggacttcaaactctactcccactaatagctttttgatgacttctagcaagcctcgctaacctcgccttaccccccactattaacctactgggagaactctctgtgctagtaaccacgttctcctgatcaaatatcactctcctacttacaggactcaacatactagtcacagccctatactccctctacatatttaccacaacacaatggggctcactcacccaccacattaacaacataaaaccctcattcacacgagaaaacaccctcatgttcatacacctatcccccattctcctcctatccctcaaccccgacatcattaccgggttttcctcttgtaaatatagtttaaccaaaacatcagattgtgaatctgacaacagaggcttacgaccccttatttaccgagaaagctcacaagaactgctaactcatgcccccatgtctaacaacatggctttctcaacttttaaaggataacagctatccattggtcttaggccccaaaaattttggtgcaactccaaataaaagtaataaccatgcacactactataaccaccctaaccctgacttccctaattccccccatccttaccaccctcgttaaccctaacaaaaaaaactcatacccccattatgtaaaatccattgtcgcatccacctttattatcagtctcttccccacaacaatattcatgtgcctagaccaagaagttattatctcgaactgacactgagccacaacccaaacaacccagctctccctaagcttcaaactagactacttctccataatattcatccctgtagcattgttcgttacatggtccatcatagaattctcactgtgatatataaactcagacccaaacattaatcagttcttcaaatatctactcatcttcctaattaccatactaatcttagttaccgctaacaacctattccaactgttcatcggctgagagggcgtaggaattatatccttcttgctcatcagttgatgatacgcccgagcagatgccaacacagcagccattcaagcaatcctatacaaccgtatcggcgatatcggtttcatcctcgccttagcatgatttatcctacactccaactcatgagacccacaacaaatagcccttctaaacgctaatccaagcctcaccccactactaggcctcctcctagcagcagcaggcaaatcagcccaattaggtctccacccctgactcccctcagccatagaaggccccaccccagtctcagccctactccactcaagcactatagttgtagcaggaatcttcttactcatccgcttccaccccctagcagaaaatagcccactaatccaaactctaacactatgcttaggcgctatcaccactctgttcgcagcagtctgcgcccttacacaaaatgacatcaaaaaaatcgtagccttctccacttcaagtcaactaggactcataatagttacaatcggcatcaaccaaccacacctagcattcctgcacatctgtacccacgccttcttcaaagccatactatttatgtgctccgggtccatcatccacaaccttaacaatgaacaagatattcgaaaaataggaggactactcaaaaccatacctctcacttcaacctccctcaccattggcagcctagcattagcaggaatacctttcctcacaggtttctactccaaagaccacatcatcgaaaccgcaaacatatcatacacaaacgcctgagccctatctattactctcatcgctacctccctgacaagcgcctatagcactcgaataattcttctcaccctaacaggtcaacctcgcttccccacccttactaacattaacgaaaataaccccaccctactaaaccccattaaacgcctggcagccggaagcctattcgcaggatttctcattactaacaacatttcccccgcatcccccttccaaacaacaatccccctctacctaaaactcacagccctcgctgtcactttcctaggacttctaacagccctagacctcaactacctaaccaacaaacttaaaataaaatccccactatgcacattttatttctccaacatactcggattctaccctagcatcacacaccgcacaatcccctatctaggccttcttacgagccaaaacctgcccctactcctcctagacctaacctgactagaaaagctattacctaaaacaatttcacagcaccaaatctccacctccatcatcacctcaacccaaaaaggcataattaaactttacttcctctctttcttcttcccactcatcctaaccctactcctaatcacataacctattcccccgagcaatctcaattacaatatatacaccaacaaacaatgttcaaccagtaactactactaatcaacgcccataatcatacaaagcccccgcaccaataggatcctcccgaatcaaccctgacccctctccttcataaattattcagcttcctacactattaaagtttaccacaaccaccaccccatcatactctttcacccacagcaccaatcctacctccatcgctaaccccactaaaacactcaccaagacctcaacccctgacccccatgcctcaggatactcctcaatagccatcgctgtagtatatccaaagacaaccatcattccccctaaataaattaaaaaaactattaaacccatataacctcccccaaaattcagaataataacacacccgaccacaccgctaacaatcaatactaaacccccataaataggagaaggcttagaagaaaaccccacaaaccccattactaaacccacactcaacagaaacaaagcatacatcattattctcgcacggactacaaccacgaccaatgatatgaaaaaccatcgttgtatttcaactacaagaacaccaatgaccccaatacgcaaaactaaccccctaataaaattaattaaccactcattcatcgacctccccaccccatccaacatctccgcatgatgaaacttcggctcactccttggcgcctgcctgatcctccaaatcaccacaggactattcctagccatgcactactcaccagacgcctcaaccgccttttcatcaatcgcccacatcactcgagacgtaaattatggctgaatcatccgctaccttcacgccaatggcgcctcaatattctttatctgcctcttcctacacatcgggcgaggcctatattacggatcatttctctactcagaaacctgaaacatcggcattatcctcctgcttgcaactatagcaacagccttcataggctatgtcctcccgtgaggccaaatatcattctgaggggccacagtaattacaaacttactatccgccatcccatacattgggacagacctagttcaatgaatctgaggaggctactcagtagacagtcccaccctcacacgattctttacctttcacttcatcttgcccttcattattgcagccctagcagcactccacctcctattcttgcacgaaacgggatcaaacaaccccctaggaatcacctcccattccgataaaatcaccttccacccttactacacaatcaaagacgccctcggcttacttctcttccttctctccttaatgacattaacactattctcaccagacctcctaggcgacccagacaattataccctagccaaccccttaaacacccctccccacatcaagcccgaatgatatttcctattcgcctacacaattctccgatccgtccctaacaaactaggaggcgtccttgccctattactatccatcctcatcctagcaataatccccatcctccatatatccaaacaacaaagcataatatttcgcccactaagccaatcactttattgactcctagccgcagacctcctcattctaacctgaatcggaggacaaccagtaagctacccttttaccatcattggacaagtagcatccgtactatacttcacaacaatcctaatcctaataccaactatctccctaattgaaaacaaaatactcaaatgggcctgtccttgtagtataaactaatacaccagtcttgtaaaccggagatgaaaacctttttccaaggacaaatcagagaaaaagtctttaactccaccattagcacccaaagctaagattctaatttaaactattctctgttctttcatggggaagcagatttgggtaccacccaagtattgactcacccatcaacaaccgctatgtatttcgtacattactgccagccaccatgaatattgtacggtaccataaatacttgaccacctgtagtacatgaaaacccaatccacatcaaaaccccctccccatgcttacaagcaagcacagcaatcaaccctcaactatcacacatcaactgcaactccaaagccacccctcacccactaggataccaacaaacctacccacccttaacagtacatagtacataaagccatttaccgtacatagcacattacagtcaaatcccttctcgtccccatggatgacccccctcagataggggtcccttgaccaccatcctccgtgaaatcaatatcccgcacaagagtgctactctcctcgctccgggcccataacacttgggggtagctaaagtgaactgtatccgacatctggttcctacttcagggccataaagcctaaatagcccacacgttccccttaaataagacatcacgatg

SEQ ID NO: 98 - DNA, 16570 bp, Homo sapiens mitochondrial
  3108: "n" refers to a nucleotide at position 3107 of the Cambridge Reference Sequence (CRS, Anderson et al. 1981 Nature 290:457-465), later determined to be absent from the human mtDNA sequence according to the revised CRS (rCRS, Andrews et al. 1999 Nature Genetics 23:147); "n" therefore represents a single nucleotide deletion at a position corresponding to nucleotide 3107 of SEQ ID NO:1 as provided herein.
gatcacaggtctatcaccctattaaccactcacgggagctctccatgcatttggtattttcgtctggggggtgtgcacgcgatagcattgcgagacgctggagccggagcaccctatgtcgcagtatctgtctttgattcctgcctcattctattatttatcgcacctacgttcaatattacaggcgaacatacttactaaagtgtgttaattaattaatgcttgtaggacataataataacaattgaatgtctgcacagccgctttccacacagacatcataacaaaaaatttccaccaaaccccccctcccccgccttctggccacagcacttaaacacatctctgccaaaccccaaaaacaaagaaccctaacaccagcctaaccagatttcaaattttatcttttggcggtatgcacttttaacagtcaccccccaactaacacattattttcccctcccactcccatactactaatctcatcaatacaacccccgcccatcctacccagcacacacacaccgctgctaaccccataccccgaaccaaccaaaccccaaagacaccccccacagtttatgtagcttacctcctcaaagcaatacactgaaaatgtttagacgggctcacatcaccccataaacaaataggtttggtcctagcctttctattagctcttagtaagattacacatgcaagcatccccgttccagtgagttcaccctctaaatcaccacgatcaaaagggacaagcatcaagcacgcagcaatgcagctcaaaacgcttagcctagccacacccccacgggaaacagcagtgattaacctttagcaataaacgaaagtttaactaagctatactaaccccagggttggtcaatttcgtgccagccaccgcggtcacacgattaacccaagtcaatagaagccggcgtaaagagtgttttagatcaccccctccccaataaagctaaaactcacctgagttgtaaaaaactccagttgacacaaaatagactacgaaagtggctttaacatatctgaacacacaatagctaagacccaaactgggattagataccccactatgcttagccctaaacctcaacagttaaatcaacaaaactgctcgccagaacactacgagccacagcttaaaactcaaaggacctggcggtgcttcatatccctctagaggagcctgttctgtaatcgataaaccccgatcaacctcaccacctcttgctcagcctatataccgccatcttcagcaaaccctgatgaaggctacaaagtaagcgcaagtacccacgtaaagacgttaggtcaaggtgtagcccatgaggtggcaagaaatgggctacattttctaccccagaaaactacgatagcccttatgaaacttaagggtcgaaggtggatttagcagtaaactgagagtagagtgcttagttgaacagggccctgaagcgcgtacacaccgcccgtcaccctcctcaagtatacttcaaaggacatttaactaaaacccctacgcatttatatagaggagacaagtcgtaacatggtaagtgtactggaaagtgcacttggacgaaccagagtgtagcttaacacaaagcacccaacttacacttaggagatttcaacttaacttgaccgctctgagctaaacctagccccaaacccactccaccttactaccagacaaccttagctaaaccatttacccaaataaagtataggcgatagaaattgaaacctggcgcaatagatatagtaccgcaagggaaagatgaaaaattataaccaagcataatatagcaaggactaacccctataccttctgcataatgaattaactagaaataactttgcaaggagagccaaagctaagacccccgaaaccagacgagctacctaagaacagctaaaagagcacacccgtctatgtagcaaaatagtgggaagatttataggtagaggcgacaaacctaccgagcctggtgatagctggttgtccaagatagaatcttagttcaactttaaatttgcccacagaaccctctaaatccccttgtaaatttaactgttagtccaaagaggaacagctctttggacactaggaaaaaaccttgtagagagagtaaaaaatttaacacccatagtaggcctaaaagcagccaccaattaagaaagcgttcaagctcaacacccactacctaaaaaatcccaaacatataactgaactcctcacacccaattggaccaatctatcaccctatagaagaactaatgttagtataagtaacatgaaaacattctcctccgcataagcctgcgtcagattaaaacactgaactgacaattaacagcccaatatctacaatcaaccaacaagtcattattaccctcactgtcaacccaacacaggcatgctcataaggaaaggttaaaaaaagtaaaaggaactcggcaaatcttaccccgcctgtttaccaaaaacatcacctctagcatcaccagtattagaggcaccgcctgcccagtgacacatgtttaacggccgcggtaccctaaccgtgcaaaggtagcataatcacttgttccttaaatagggacctgtatgaatggctccacgagggttcagctgtctcttacttttaaccagtgaaattgacctgcccgtgaagaggcgggcatgacacagcaagacgagaagaccctatggagctttaatttattaatgcaaacagtacctaacaaacccacaggtcctaaactaccaaacctgcattaaaaatttcggttggggcgacctcggagcagaacccaacctccgagcagtacatgctaagacttcaccagtcaaagcgaactactatactcaattgatccaataacttgaccaacggaacaagttaccctagggataacagcgcaatcctattctagagtccatatcaacaatagggtttacgacctcgatgttggatcaggacatcccgatggtgcagccgctattaaaggttcgtttgttcaacgattaaagtcctacgtgatctgagttcagaccggagtaatccaggtcggtttctatctacnttcaaattcctccctgtacgaaaggacaagagaaataaggcctacttcacaaagcgccttcccccgtaaatgatatcatctcaacttagcattatacccacacccacccaagaacagggtttgttaagatggcagagcccggtaatcgcataaaacttaaaactttacagtcagaggttcaattcctcttcttaacaacatacccatggccaacctcctactcctcattgtacccattctaatcgcaatggcattcctaatgcttaccgaacgaaaaattctaggctatatacaactacgcaaaggccccaacgttgtaggcccctacgggctactacaacccttcgctgacgccataaaactcttcaccaaagagcccctaaaacccgccacatctaccatcaccctctacatcaccgccccgaccttagctctcaccatcgctcttctactatgaacccccctccccatacccaaccccctggtcaacctcaacctaggcctcctatttattctagccacctctagcctagccgtttactcaatcctctgatcagggtgagcatcaaactcaaactacgccctgatcggcgcactgcgagcagtagcccaaacaatctcatatgaagtcaccctagccatcattctactatcaacattactaataagtggctcctttaacctctccacccttatcacaacacaagaacacctctgattgctcctgccatcatgacccttggccataatatgatttatctccacactagcagagaccaaccgaacccccttcgaccttgccgaaggggagtccgaactagtctcaggcttcaacatcgaatacgccgcaggccccttcgccctattcttcatagccgaatacacaaacattattataataaacaccctcaccactacaatcttcctaggaacaacatatgacgcactctcccctgaactctacacaacatattttgtcaccaagaccctacttctaacctccctgttcttatgaattcgaacagcatacccccgattccgctacgaccaactcatacacctcctatgaaaaaacttcctaccactcaccctagcattacttatatgatatgtctccatacccattacaatctccagcattccccctcaaacctaagaaatatgtctgataaaagagttactttgatagagtaaataataggagcttaaacccccttatttctaggactatgagaatcgaacccatccctgagaatccaaaattctccgtgccacctatcacaccccatcctaaagtaaggtcagctaaataagctatcgggcccataccccgaaaatgttggttatacccttcccgtactaattaatcccctggcccaacccgtcatctactctaccatctttgcaggcacactcatcacagcgctaagctcgcactgattttttacctgagtaggcctagaaataaacatgctagcttttattccagttctaaccaaaaaaataaaccctcgttccacagaagctgccatcaagtatttcctcacgcaagcaaccgcatccataatccttctaatagctatcctcttcaacaatatactctccggacaatgaaccataaccagtactaccaatcaatactcatcattaataatcataatggctatagcaataaaactaggaatagccccctttcacttctgagtcccagaggttacccaaggcacccctctgacatccggcctgcttcttctcacatgacaaaaactagcccccatctcaatcatataccaaatctctccctcactaaacgtaagccttctcctcactctctcaatcttatccatcatagcaggcagttgaggtggattaaaccaaacccagctacgcaaaatcttagcatactcctcaattacccacataggatgaataatagcagttctaccgtacaaccctaacataaccattcttaatttaactatttatattatcctaactactaccgcattcctactactcaacttaaactccagcaccacgaccctactactatctcgcacctgaaacaagctaacatgactaacacccttaattccatccaccctcctctccctaggaggcctgcccccgctaaccggctttttgcccaaatgggccattatcgaagaattcacaaaaaacaatagcctcatcatccccaccatcatagccaccatcaccctccttaacctctacttctacctacgcctaatctactccacctcaatcacactactccccatatctaacaacgtaaaaataaaatgacagtttgaacatacaaaacccaccccattcctccccacactcatcgcccttaccacgctactcctacctatctccccttttatactaataatcttatagaaatttaggttaaatacagaccaagagccttcaaagccctcagtaagttgcaatacttaatttctgtaacagctaaggactgcaaaaccccactctgcatcaactgaacgcaaatcagccactttaattaagctaagcccttactagaccaatgggacttaaacccacaaacacttagttaacagctaagcaccctaatcaactggcttcaatctacttctcccgccgccgggaaaaaaggcgggagaagccccggcaggtttgaagctgcttcttcgaatttgcaattcaatatgaaaatcacctcggagctggtaaaaagaggcctaacccctgtctttagatttacagtccaatgcttcactcagccattttacctcacccccactgatgttcgccgaccgttgactattctctacaaaccacaaagacattggaacactatacctattattcggcgcatgagctggagtcctaggcacagctctaagcctccttattcgagccgagctgggccagccaggcaaccttctaggtaacgaccacatctacaacgttatcgtcacagcccatgcatttgtaataatcttcttcatagtaatacccatcataatcggaggctttggcaactgactagttcccctaataatcggtgcccccgatatggcgtttccccgcataaacaacataagcttctgactcttacctccctctctcctactcctgctcgcatctgctatagtggaggccggagcaggaacaggttgaacagtctaccctcccttagcagggaactactcccaccctggagcctccgtagacctaaccatcttctccttacacctagcaggtgtctcctctatcttaggggccatcaatttcatcacaacaattatcaatataaaaccccctgccataacccaataccaaacgcccctcttcgtctgatccgtcctaatcacagcagtcctacttctcctatctctcccagtcctagctgctggcatcactatactactaacagaccgcaacctcaacaccaccttcttcgaccccgccggaggaggagaccccattctataccaacacctattctgatttttcggtcaccctgaagtttatattcttatcctaccaggcttcggaataatctcccatattgtaacttactactccggaaaaaaagaaccatttggatacataggtatggtctgagctatgatatcaattggcttcctagggtttatcgtgtgagcacaccatatatttacagtaggaatagacgtagacacacgagcatatttcacctccgctaccataatcatcgctatccccaccggcgtcaaagtatttagctgactcgccacactccacggaagcaatatgaaatgatctgctgcagtgctctgagccctaggattcatctttcttttcaccgtaggtggcctgactggcattgtattagcaaactcatcactagacatcgtactacacgacacgtactacgttgtagctcacttccactatgtcctatcaataggagctgtatttgccatcataggaggcttcattcactgatttcccctattctcaggctacaccctagaccaaacctacgccaaaatccatttcactatcatattcatcggcgtaaatctaactttcttcccacaacactttctcggcctatccggaatgccccgacgttactcggactaccccgatgcatacaccacatgaaacatcctatcatctgtaggctcattcatttctctaacagcagtaatattaataattttcatgatttgagaagccttcgcttcgaagcgaaaagtcctaatagtagaagaaccctccataaacctggagtgactatatggatgccccccaccctaccacacattcgaagaacccgtatacataaaatctagacaaaaaaggaaggaatcgaaccccccaaagctggtttcaagccaaccccatggcctccatgactttttcaaaaaggtattagaaaaaccatttcataactttgtcaaagttaaattataggctaaatcctatatatcttaatggcacatgcagcgcaagtaggtctacaagacgctacttcccctatcatagaagagcttatcacctttcatgatcacgccctcataatcattttccttatctgcttcctagtcctgtatgcccttttcctaacactcacaacaaaactaactaatactaacatctcagacgctcaggaaatggaaaccgtctgaactatcctgcccgccatcatcctagtcctcatcgccctcccatccctacgcatcctttacataacagacgaggtcaacgatccctcccttaccatcaaatcaattggccaccaatggtactgaacctacgagtacaccgactacggcggactaatcttcaactcctacatacttcccccattattcctagaaccaggcgacctgcgactccttgacgttgacaatcgagtagtactcccgattgaagcccccattcgtataataattacatcacaagacgtcttgcactcatgagctgtccccacattaggcttaaaaacagatgcaattcccggacgtctaaaccaaaccactttcaccgctacacgaccgggggtatactacggtcaatgctctgaaatctgtggagcaaaccacagtttcatgcccatcgtcctagaattaattcccctaaaaatctttgaaatagggcccgtatttaccctatagcaccccctctaccccctctagagcccactgtaaagctaacttagcattaaccttttaagttaaagattaagagaaccaacacctctttacagtgaaatgccccaactaaatactaccgtatggcccaccataattacccccatactccttacactattcctcatcacccaactaaaaatattaaacacaaactaccacctacctccctcaccaaagcccataaaaataaaaaattataacaaaccctgagaaccaaaatgaacgaaaatctgttcgcttcattcattgcccccacaatcctaggcctacccgccgcagtactgatcattctatttccccctctattgatccccacctccaaatatctcatcaacaaccgactaatcaccacccaacaatgactaatcaaactaacctcaaaacaaatgataaccatacacaacactaaaggacgaacctgatctcttatactagtatccttaatcatttttattgccacaactaacctcctcggactcctgcctcactcatttacaccaaccacccaactatctataaacctagccatggccatccccttatgagcgggcgcagtgattataggctttcgctctaagattaaaaatgccctagcccacttcttaccacaaggcacacctacaccccttatccccatactagttattatcgaaaccatcagcctactcattcaaccaatagccctggccgtacgcctaaccgctaacattactgcaggccacctactcatgcacctaattggaagcgccaccctagcaatatcaaccattaaccttccctctacacttatcatcttcacaattctaattctactgactatcctagaaatcgctgtcgccttaatccaagcctacgttttcacacttctagtaagcctctacctgcacgacaacacataatgacccaccaatcacatgcctatcatatagtaaaacccagcccatgacccctaacaggggccctctcagccctcctaatgacctccggcctagccatgtgatttcacttccactccataacgctcctcatactaggcctactaaccaacacactaaccatataccaatgatggcgcgatgtaacacgagaaagcacataccaaggccaccacacaccacctgtccaaaaaggccttcgatacgggataatcctatttattacctcagaaatttttttcttcgcaggatttttctgagccttttaccactccagcctagcccctaccccccaattaggagggcactggcccccaacaggcatcaccccgctaaatcccctagaagtcccactcctaaacacatccgtattactcgcatcaggagtatcaatcacctgagctcaccatagtctaatagaaaacaaccgaaaccaaataattcaagcactgcttattacaattttactgggtctctattttaccctcctacaagcctcagagtacttcgagtctcccttcaccatttccgacggcatctacggctcaacattttttgtagccacaggcttccacggacttcacgtcattattggctcaactttcctcactatctgcttcatccgccaactaatatttcactttacatccaaacatcactttggcttcgaagccgccgcctgatactggcattttgtagatgtggtttgactatttctgtatgtctccatctattgatgagggtcttactcttttagtataaatagtaccgttaacttccaattaactagttttgacaacattcaaaaaagagtaataaacttcgccttaattttaataatcaacaccctcctagccttactactaataattattacattttgactaccacaactcaacggctacatagaaaaatccaccccttacgagtgcggcttcgaccctatatcccccgcccgcgtccctttctccataaaattcttcttagtagctattaccttcttattatttgatctagaaattgccctccttttacccctaccatgagccctacaaacaactaacctgccactaatagttatgtcatccctcttattaatcatcatcctagccctaagtctggcctatgagtgactacaaaaaggattagactgaaccgaattggtatatagtttaaacaaaacgaatgatttcgactcattaaattatgataatcatatttaccaaatgcccctcatttacataaatattatactagcatttaccatctcacttctaggaatactagtatatcgctcacacctcatatcctccctactatgcctagaaggaataatactatcgctgttcattatagctactctcataaccctcaacacccactccctcttagccaatattgtgcctattgccatactagtctttgccgcctgcgaagcagcggtgggcctagccctactagtctcaatctccaacacatatggcctagactacgtacataacctaaacctactccaatgctaaaactaatcgtcccaacaattatattactaccactgacatgactttccaaaaaacacataatttgaatcaacacaaccacccacagcctaattattagcatcatccctctactattttttaaccaaatcaacaacaacctatttagctgttccccaaccttttcctccgaccccctaacaacccccctcctaatactaactacctgactcctacccctcacaatcatggcaagccaacgccacttatccagtgaaccactatcacgaaaaaaactctacctctctatactaatctccctacaaatctccttaattataacattcacagccacagaactaatcatattttatatcttcttcgaaaccacacttatccccaccttggctatcatcacccgatgaggcaaccagccagaacgcctgaacgcaggcacatacttcctattctacaccctagtaggctcccttcccctactcatcgcactaatttacactcacaacaccctaggctcactaaacattctactactcactctcactgcccaagaactatcaaactcctgagccaacaacttaatatgactagcttacacaatagcttttatagtaaagatacctctttacggactccacttatgactccctaaagcccatgtcgaagcccccatcgctgggtcaatagtacttgccgcagtactcttgaaactaggcggctatggtataatacgcctcacactcattctcaaccccctgacaaaacacatagcctaccccttccttgtactatccctatgaggcataattataacaagctccatctgcctacgacaaacagacctaaaatcgctcattgcatactcttcaatcagccacatagccctcgtagtaacagccattctcatccaaaccccctgaagcttcaccggcgcagtcattctcataatcgcccacggacttacatcctcattactattctgcctagcaaactcaaactacgaacgcactcacagtcgcatcataatcctctctcaaggacttcaaactctactcccactaatagctttttgatgacttctagcaagcctcgctaacctcgccttaccccccactattaacctactgggagaactctctgtgctagtaaccacgttctcctgatcaaatatcactctcctacttacaggactcaacatactagtcacagccctatactccctctacatatttaccacaacacaatggggctcactcacccaccacattaacaacataaaaccctcattcacacgagaaaacaccctcatgttcatacacctatcccccattctcctcctatccctcaaccccgacatcattaccgggttttcctcttgtaaatatagtttaaccaaaacatcagattgtgaatctgacaacagaggcttacgaccccttatttaccgagaaagctcacaagaactgctaactcatgcccccatgtctaacaacatggctttctcaacttttaaaggataacagctatccattggtcttaggccccaagaattttggtgcaactccaaataaaagtaataaccatgcacactactataaccaccctaaccctaacttccctaattccccccatccttaccaccctcattaaccctaacaaaaaaaactcatacccccattatgtaaaatccattgtcgcatccacctttattatcagtctcttccccacaacaatattcatgtgcctagaccaagaagttattatctcgaactgacactgagccacaacccaaacaacccagctctccctaagcttcaaactagactacttctccataatattcatccctgtagcattgttcgttacatggtccatcatagaattctcactgtgatatataaactcagacccaaacattaatcagttcttcaaatatctactcatcttcctaattaccatactaatcttagttaccgctaacaacctattccaactgttcatcggctgagagggcgtaggaattatatccttcttgctcatcagttgatgatacgcccgagcagatgccaacacagcagccattcaagcaatcctatacaaccgtatcggcgatatcggtttcatcctcgccttagcatgatttatcctacactccaactcatgagacccacaacaaatagcccttctaaacgctaatccaagcctcaccccactactaggcctcctcctagcagcagcaggcaaatcagcccaattaggtctccacccctgactcccctcagccatagaaggccccaccccagtctcagccctactccactcaagcactatagttgtagcaggaatcttcttactcatccgcttccaccccctagcagaaaatagcccactaatccaaactctaacactatgcttaggcgctatcaccactctgttcgcagcagtctgcgcccttacacaaaatgacatcaaaaaaatcgtagccttctccacttcaagtcaactaggactcataatagttacaatcggcatcaaccaaccacacctagcattcctgcacatctgtacccacgccttcttcaaagccatactatttatgtgctccgggtccatcatccacaaccttaacaatgaacaagatattcgaaaaataggaggactactcaaaaccatacctctcacttcaacctccctcaccattggcagcctagcattagcaggaatacctttcctcacaggtttctactccaaagaccacatcatcgaaaccgcaaacatatcatacacaaacgcctgagccctatctattactctcatcgctacctccctgacaagcgcctatagcactcgaataatccttctcaccctaacaggtcgacctcgcttccccacccttactaacattaacgaaaataaccccaccctactaaaccccattaaacgcctggcagccggaagcctattcgcaggatttctcattactaacaacatttcccccgcatcccccttccaaacaacaatccccctctacctaaaactcacagccctcgctgtcactttcctaggacttctaacagccctagacctcaactacctaaccaacaaacttaaaataaaatccccactatgcacattttatttctccaacatactcggattctaccctagcatcacacaccgcacaatcccctatctaggccttcttacgagccaaaacctgcccctactcctcctagacctaacctgactagaaaagctattacctaaaacaatttcacagcaccaaatctccacctccatcatcacctcaacccaaaaaggcataattaaactttacttcctctctttcttcttcccactcatcctaaccctactcctaatcacataacctattcccccgagcaatctcaattacaatatacacaccaacaaacaatgttcaaccagtaactactactaatcaacgcccataatcatacaaagcccccgcaccaataggatcctcccgaatcaaccctgacccctctccttcataaattattcagcttcctacactattaaagtttaccacaaccaccaccccatcatactctttcacccacagcaccaatcctacctccatcgctaaccccactaaaacactcaccaagacctcaacccctgacccccatgcctcaggatactcctcaatagccatcgctgtagtatatccaaagacaaccatcattccccctaaataaattaaaaaaactattaaacccatataacctcccccaaaattcagaataataacacacccgaccacaccgctaacaatcaatactaaacccccataaataggagaaggcttagaagaaaaccccacaaaccccattactaaacccacactcaacagaaacaaagcatacatcattattctcgcacggactacaaccacgaccaatgatatgaaaaaccatcgttgtatttcaactacaagaacaccaatgaccccaatacgcaaaattaaccccctaataaaattaattaaccactcattcatcgacctccccaccccatccaacatctccgcatgatgaaacttcggctcactccttggcgcctgcctgatcctccaaatcaccacaggactattcctagccatgcactactcaccagacgcctcaaccgccttttcatcaatcgcccacatcactcgagacgtaaattatggctgaatcatccgctaccttcacgccaatggcgcctcaatattctttatctgcctcttcctacacatcgggcgaggcctatattacggatcatttctctactcagaaacctgaaacatcggcattatcctcctgcttgcaactatagcaacagccttcataggctatgtcctcccgtgaggccaaatatcattctgaggggccacagtaattacaaacttactatccgccatcccatacattgggacagacctagttcaatgaatctgaggaggctactcagtagacagtcccaccctcacacgattctttacctttcacttcatcttgcccttcattattgcagccctagcagcactccacctcctattcttgcacgaaacgggatcaaacaaccccctaggaatcacctcccattccgataaaatcaccttccacccttactacacaatcaaagacgccctcggcttacttctcttccttctctccttaatgacattaacactattctcaccagacctcctaggcgacccagacaactataccctagccaaccccttaaacacccctccccacatcaagcccgaatgatatttcctattcgcctacacaattctccgatccgtccctaacaaactaggaggcgtccttgccctattactatccatcctcatcctagcaataatccccatcctccatatatccaaacaacaaagcataatatttcgcccactaagccaatcactttattgactcctagccgcagacctcctcattctaacctgaatcggaggacaaccagtaagctacccttttaccatcattggacaagtagcatccgtactatacttcacaacaatcctaatcctaataccaactatctccctaattgaaaacaaaatactcaaatgggcctgtccttgtagtataaactaatacaccagtcttgtaaaccggagatgaaaacctttttccaaggacaaatcagagaaaaagtctttaactccaccattagcacccaaagctaagattctaatttaaactattctctgttctttcatggggaagcagatttgggtaccacccaagtattgactcacccatcaacaaccgctatgtatttcgtacattactgccagccaccatgaatattgtacggtaccataaatacttgaccacctgtagtacataaaaacccaatccacatcaaaaccccctcctcatgcttacaagcaagtacagcaatcaaccctcaactatcacacatcaactgcaactccaaagccacccctcacccactaggataccaacaaacctacccacccttaacagtacatagcacataaagccatttaccgtacatagcacattacagtcaaatcccttctcgtccccatggatgacccccctcagataggggtcccttgaccaccatcctccgtgaaatcaatatcccgcacaagagtgctactctcctcgctccgggcccataacacttgggggtagctaaagtgaactgtatccgacatctggttcctacttcagggtcataaagcctaaatagcccacacgttccccttaaataagacatcacgatg

SEQ ID NO: 99 - DNA, 16572 bp, Homo sapiens mitochondrial
  3110: "n" refers to a nucleotide at position 3107 of the Cambridge Reference Sequence (CRS, Anderson et al. 1981 Nature 290:457-465), later determined to be absent from the human mtDNA sequence according to the revised CRS (rCRS, Andrews et al. 1999 Nature Genetics 23:147); "n" therefore represents a single nucleotide deletion at a position corresponding to nucleotide 3107 of SEQ ID NO:1 as provided herein.
gatcacaggtctatcaccctattaaccactcacgggagctctccatgcatttggtattttcgtctggggggtatgcacgcgatagcattgcgagacgctggagccggagcaccctatgtcgcagtatctgtctttgattcctgcctcatcctattatttatcgcacctacgttcaatattacaggcgaacatacttactaaagtgtgttaattaattaatgcttgtaggacataataataacaattgaatgtctgcacagccgctttccacacagacatcataacaaaaaatttccaccaaaccccccctccccccccgcttctggccacagcacttaaacacatctctgccaaaccccaaaaacaaagaaccctaacaccagcctaaccagatttcaaattttatcttttggcggtatgcacttttaacagtcaccccccaactaacacattattttcccctcccactcccatactactaatctcatcaatacaacccccgcccatcctacccagcacacacacaccgctgctaaccccataccccgaaccaaccaaaccccaaagacaccccccacagtttatgtagcttacctcctcaaagcaatacactgaaaatgtttagacgggctcacatcaccccataaacaaataggtttggtcctagcctttctattagctcttagtaagattacacatgcaagcatccccgttccagtgagttcaccctctaaatcaccacgatcaaaagggacaagcatcaagcacgcagcaatgcagctcaaaacgcttagcctagccacacccccacgggaaacagcagtgattaacctttagcaataaacgaaagtttaactaagctatactaaccccagggttggtcaatttcgtgccagccaccgcggtcacacgattaacccaagtcaatagaagccggcgtaaagagtgttttagatcaccccctccccaataaagctaaaactcacctgagttgtaaaaaactccagttgacacaaaatagactacgaaagtggctttaacatatctgaacacacaatagctaagacccaaactgggattagataccccactatgcttagccctaaacctcaacagttaaatcaacaaaactgctcgccagaacactacgagccacagcttaaaactcaaaggacctggcggtgcttcatatccctctagaggagcctgttctgtaatcgataaaccccgatcaacctcaccacctcttgctcagcctatataccgccatcttcagcaaaccctgatgaaggctacaaagtaagcgcaagtacccacgtaaagacgttaggtcaaggtgtagcccatgaggtggcaagaaatgggctacattttctaccccagaaaactacgatagcccttatgaaacttaagggtcgaaggtggatttagcagtaaactgagagtagagtgcttagttgaacagggccctgaagcgcgtacacaccgcccgtcaccctcctcaagtatacttcaaaggacatttaactaaaacccctacgcatttatatagaggagacaagtcgtaacatggtaagtgtactggaaagtgcacttggacgaaccagagtgtagcttaacacaaagcacccaacttacacttaggagatttcaacttaacttgaccgctctgagctaaacctagccccaaacccactccaccttactaccagacaaccttagccaaaccatttacccaaataaagtataggcgatagaaattgaaacctggcgcaatagatatagtaccgcaagggaaagatgaaaaattataaccaagcataatatagcaaggactaacccctataccttctgcataatgaattaactagaaataactttgcaaggagagccaaagctaagacccccgaaaccagacgagctacctaagaacagctaaaagagcacacccgtctatgtagcaaaatagtgggaagatttataggtagaggcgacaaacctaccgagcctggtgatagctggttgtccaagatagaatcttagttcaactttaaatttgcccacagaaccctctaaatccccttgtaaatttaactgttagtccaaagaggaacagctctttggacactaggaaaaaaccttgtagagagagtaaaaaatttaacacccatagtaggcctaaaagcagccaccaattaagaaagcgttcaagctcaacacccactacctaaaaaatcccaaacatataactgaactcctcacacccaattggaccaatctatcaccctatagaagaactaatgttagtataagtaacatgaaaacattctcctccgcataagcctgcgtcagattaaaacactgaactgacaattaacagcccaatatctacaatcaaccaacaagtcattattaccctcactgtcaacccaacacaggcatgctcataaggaaaggttaaaaaaagtaaaaggaactcggcaaatcttaccccgcctgtttaccaaaaacatcacctctagcatcaccagtattagaggcaccgcctgcccagtgacacatgtttaacggccgcggtaccctaaccgtgcaaaggtagcataatcacttgttccttaaatagggacctgtatgaatggctccacgagggttcagctgtctcttacttttaaccagtgaaattgacctgcccgtgaagaggcgggcataacacagcaagacgagaagaccctatggagctttaatttattaatgcaaacagtacctaacaaacccacaggtcctaaactaccaaacctgcattaaaaatttcggttggggcgacctcggagcagaacccaacctccgagcagtacatgctaagacttcaccagtcaaagcgaactactatactcaattgatccaataacttgaccaacggaacaagttaccctagggataacagcgcaatcctattctagagtccatatcaacaatagggtttacgacctcgatgttggatcaggacatcccgatggtgcagccgctattaaaggttcgtttgttcaacgattaaagtcctacgtgatctgagttcagaccggagtaatccaggtcggtttctatctacnttcaaattcctccctgtacgaaaggacaagagaaataaggcctacttcacaaagcgccttcccccgtaaatgatatcatctcaacttagtattatacccacacccacccaagaacagggtttgttaagatggcagagcccggtaatcgcataaaacttaaaactttacagtcagaggttcaattcctcttcttaacaacatacccatggccaacctcctactcctcattgtacccattctaatcgcaatggcattcctaatgcttaccgaacgaaaaattctaggctatatacaactacgcaaaggccccaacgttgtaggcccctacgggctactacaacccttcgctgacgccataaaactcttcaccaaagagcccctaaaacccgccacatctaccatcaccctctacatcaccgccccgaccttagctctcaccatcgctcttctactatgaacccccctccccatacccaaccccctggtcaacctcaacctaggcctcctatttattctagccacctctagcctagccgtttactcaatcctctgatcagggtgagcatcaaactcaaactacgccctgatcggcgcactgcgagcagtagcccaaacaatctcatatgaagtcaccctagccatcattctactatcaacattactaataagtggctcctttaacctctccacccttatcacaacacaagaacacctctgattactcctgccatcatgacccttggccataatatgatttatctccacactagcagagaccaaccgaacccccttcgaccttgccgaaggggagtccgaactagtctcaggcttcaacatcgaatacgccgcaggccccttcgccctattcttcatagccgaatacacaaacattattataataaacaccctcaccactacaatcttcctaggaacaacatatgacgcactctcccctgaactctacacaacatattttgtcaccaagaccctacttctaacctccctgttcttatgaattcgaacagcatacccccgattccgctacgaccaactcatacacctcctatgaaaaaacttcctaccactcaccctagcattacttatatgatatgtctccatacccattacaatctccagcattccccctcaaacctaagaaatatgtctgataaaagagttactttgatagagtaaataataggagcttaaacccccttatttctaggactatgagaatcgaacccatccctgagaatccaaaattctccgtgccacctatcacaccccatcctaaagtaaggtcagctaaataagctatcgggcccataccccgaaaatgttggttatacccttcccgtactaattaatcccctggcccaacccgtcatctactctaccatctttgcaggcacactcatcacagcgctaagctcgcactgattttttacctgagtaggcctagaaataaacatgctagcttttattccagttctaaccaaaaaaataaaccctcgttccacagaagctgccatcaagtatttcctcacgcaagcaaccgcatccataatccttctaatagctatcctcttcaacaatatactctccggacaatgaaccataaccaatactaccaatcaatactcatcattaataatcataatggctatagcaataaaactaggaatagccccctttcacttctgagtcccagaggttacccaaggcacccctctgacatccggcctgcttcttctcacatgacaaaaactagcccccatctcaatcatataccaaatctctccctcactaaacgtaagccttctcctcactctctcaatcttatccatcatagcaggcagttgaggtggattaaaccaaacccagctacgcaaaatcttagcatactcctcaattacccacataggatgaataatagcagttctaccgtacaaccctaacataaccattcttaatttaactatttatattatcctaactactaccgcattcctactactcaacttaaactccagcaccacgaccctactactatctcgcacctgaaacaagctaacatgactaacacccttaattccatccaccctcctctccctaggaggcctgcccccgctaaccggctttttgcccaaatgggccattatcgaagaattcacaaaaaacaatagcctcatcatccccaccatcatagccaccatcaccctccttaacctctacttctacctacgcctaatctactccacctcaatcacactactccccatatctaacaacgtaaaaataaaatgacagtttgaacatacaaaacccaccccattcctccccacactcatcgcccttaccacgctactcctacctatctccccttttatactaataatcttatagaaatttaggttaaatacagaccaagagccttcaaagccctcagtaagttgcaatacttaatttctgtaacagctaaggactgcaaaaccccactctgcatcaactgaacgcaaatcagccactttaattaagctaagcccttactagaccaatgggacttaaacccacaaacacttagttaacagctaagcaccctaatcaactggcttcaatctacttctcccgccgccgggaaaaaaggcgggagaagccccggcaggtttgaagctgcttcttcgaatttgcaattcaatatgaaaatcacctcggagctggtaaaaagaggcctaacccctgtctttagatttacagtccaatgcttcactcagccattttacctcacccccactgatgttcgccgaccgttgactattctctacaaaccacaaagacattggaacactatacctattattcggcgcatgagctggagtcctaggcacagctctaagcctccttattcgagccgagctgggccagccaggcaaccttctaggtaacgaccacatctacaacgttatcgtcacagcccatgcatttgtaataatcttcttcatagtaatacccatcataatcggaggctttggcaactgactagttcccctaataatcggtgcccccgatatggcgtttccccgcataaacaacataagcttctgactcttacctccctctctcctactcctgctcgcatctgctatagtggaggccggagcaggaacaggttgaacagtctaccctcccttagcagggaactactcccaccctggagcctccgtagacctaaccatcttctccttacacctagcaggtgtctcctctatcttaggggccatcaatttcatcacaacaattatcaatataaaaccccctgccataacccaataccaaacgcccctcttcgtctgatccgtcctaatcacagcagtcctacttctcctatctctcccagtcctagctgctggcatcactatactactaacagaccgcaacctcaacaccaccttcttcgaccccgccggaggaggagaccccattctataccaacacctattctgatttttcggtcaccctgaagtttatattcttatcctaccaggcttcggaataatctcccatattgtaacttactactccggaaaaaaagaaccatttggatacataggtatggtctgagctatgatatcaattggcttcctagggtttatcgtgtgagcacaccatatatttacagtaggaatagacgtagacacacgagcatatttcacctccgctaccataatcatcgctatccccaccggcgtcaaagtatttagctgactcgccacactccacggaagcaatatgaaatgatctgctgcagtgctctgagccctaggattcatctttcttttcaccgtaggtggcctgactggcattgtattagcaaactcatcactagacatcgtactacacgacacgtactacgttgtagcccacttccactatgtcctatcaataggagctgtatttgccatcataggaggcttcattcactgatttcccctattctcaggctacaccctagaccaaacctacgccaaaatccatttcactatcatattcatcggcgtaaatctaactttcttcccacaacactttctcggcctatccggaatgccccgacgttactcggactaccccgatgcatacaccacatgaaacatcctatcatctgtaggctcattcatttctctaacagcagtaatattaataattttcatgatttgagaagccttcgcttcgaagcgaaaagtcctaatagtagaagaaccctccataaacctggagtgactatatggatgccccccaccctaccacacattcgaagaacccgtatacataaaatctagacaaaaaaggaaggaatcgaaccccccaaagctggtttcaagccaaccccatggcctccatgactttttcaaaaaggtattagaaaaaccatttcataactttgtcaaagttaaattataggctaaatcctatatatcttaatggcacatgcagcgcaagtaggtctacaagacgctacttcccctatcatagaagagcttatcacctttcatgatcacgccctcataatcattttccttatctgcttcctagtcctgtatgcccttttcctaacactcacaacaaaactaactaatactaacatctcagacgctcaggaaatagaaaccgtctgaactatcctgcccgccatcatcctagtcctcatcgccctcccatccctacgcatcctttacataacagacgaggtcaacgatccctcccttaccatcaaatcaattggccaccaatggtactgaacctacgagtacaccgactacggcggactaatcttcaactcctacatacttcccccattattcctagaaccaggcgacctgcgactccttgacgttgacaatcgagtagtactcccgattgaagcccccattcgtataataattacatcacaagacgtcttgcactcatgagctgtccccacattaggcttaaaaacagatgcaattcccggacgtctaaaccaaaccactttcaccgctacacgaccgggggtatactacggtcaatgctctgaaatctgtggagcaaaccacagtttcatgcccatcgtcctagaattaattcccctaaaaatctttgaaatagggcccgtatttaccctatagcaccccctctaccccctctagagcccactgtaaagctaacttagcattaaccttttaagttaaagattaagagaaccaacacctctttacagtgaaatgccccaactaaatactaccgtatggcccaccataattacccccatactccttacactattcctcatcacccaactaaaaatattaaacacaaactaccacctacctccctcaccaaagcccataaaaataaaaaattataacaaaccctgagaaccaaaatgaacgaaaatctgttcgcttcattcattgcccccacaatcctaggcctacccgccgcagtactgatcattctatttccccctctattgatccccacctccaaatatctcatcaacaaccgactaatcaccacccaacaatgactaatcaaactaacctcaaaacaaatgataaccatacacaacactaaaggacgaacctgatctcttatactagtatccttaatcatttttattgccacaactaacctcctcggactcctgcctcactcatttacaccaaccacccaactatctataaacctagccatggccatccccttatgagcgggcgcagtgattataggctttcgctctaagattaaaaatgccctagcccacttcttaccacaaggcacacctacaccccttatccccatactagttattatcgaaaccatcagcctactcattcaaccaatagccctggccgtacgcctaaccgctaacattactgcaggccacctactcatgcacctaattggaagcgccaccctagcaatatcaaccattaaccttccctctacacttatcatcttcacaattctaattctactgactatcctagaaatcgctgtcgccttaatccaagcctacgttttcacacttctagtaagcctctacctgcacgacaacacataatgacccaccaatcacatgcctatcatatagtaaaacccagcccatgacccctaacaggggccctctcagccctcctaatgacctccggcctagccatgtgatttcacttccactccataacgctcctcatactaggcctactaaccaacacactaaccatataccaatgatggcgcgatgtaacacgagaaagcacataccaaggccaccacacaccacctgtccaaaaaggccttcgatacgggataatcctatttattacctcagaagtttttttcttcgcaggatttttctgagccttttaccactccagcctagcccctaccccccaattaggagggcactggcccccaacaggcatcaccccgctaaatcccctagaagtcccactcctaaacacatccgtattactcgcatcaggagtatcaatcacctgagctcaccatagtctaatagaaaacaaccgaaaccaaataattcaagcactgcttattacaattttactgggtctctattttaccctcctacaagcctcagagtacttcgagtctcccttcaccatttccgacggcatctacggctcaacattttttgtagccacaggcttccacggacttcacgtcattattggctcaactttcctcactatctgcttcatccgccaactaatatttcactttacatccaaacatcactttggcttcgaagccgccgcctgatactggcattttgtagatgtggtttgactatttctgtatgtctccatctattgatgagggtcttactcttttagtataaatagtaccgttaacttccaattaactagttttgacaacattcaaaaaagagtaataaacttcgccttaattttaataatcaacaccctcctagccttactactaataattattacattttgactaccacaactcaacggctacatagaaaaatccaccccttacgagtgcggcttcgaccctatatcccccgcccgcgtccctttctccataaaattcttcttagtagctattaccttcttattatttgatctagaaattgccctccttttacccctaccatgagccctacaaacaactaacctgccactaatagttatgtcatccctcttattaatcatcatcctagccctaagtctggcctatgagtgactacaaaaaggattagactgaaccgaattggtatatagtttaaacaaaacgaatgatttcgactcattaaattatgataatcatatttaccaaatgcccctcatttacataaatattatactagcatttaccatctcacttctaggaatactagtatatcgctcacacctcatatcctccctactatgcctagaaggaataatactatcgctgttcattatagctactctcataaccctcaacacccactccctcttagccaatattgtgcctattgccatactagtctttgccgcctgcgaagcagcggtgggcctagccctactagtctcaatctccaacacatatggcctagactacgtacataacctaaacctactccaatgctaaaactaatcgtcccaacaattatattactaccactgacatgactttccaaaaaacacataatttgaatcaacacaaccacccacagcctaattattagcatcatccctctactattttttaaccaaatcaacaacaacctatttagctgttccccaaccttttcctccgaccccctaacaacccccctcctaatactaactacctgactcctacccctcacaatcatggcaagccaacgccacttatccagtgaaccactatcacgaaaaaaactctacctctctatactaatctccctacaaatctccttaattataacattcacagccacagaactaatcatattttatatcttcttcgaaaccacacttatccccaccttggctatcatcacccgatgaggcaaccagccagaacgcctgaacgcaggcacatacttcctattctacaccctagtaggctcccttcccctactcatcgcactaatttacactcacaacaccctaggctcactaaacattctactactcactctcactgcccaagaactatcaaactcctgagccaacaacttaatatgactagcttacacaatagcttttatagtaaagatacctctttacggactccacttatgactccctaaagcccatgtcgaagcccccatcgctgggtcaatagtacttgccgcagtactcttaaaactaggcggctatggtataatacgcctcacactcattctcaaccccctgacaaaacacatagcctaccccttccttgtactatccctatgaggcataattataacaagctccatctgcctacgacaaacagacctaaaatcgctcattgcatactcttcaatcagccacatagccctcgtagtaacagccattctcatccaaaccccctgaagcttcaccggcgcagtcattctcataatcgcccacgggcttacatcctcattactattctgcctagcaaactcaaactacgaacgcactcacagtcgcatcataatcctctctcaaggacttcaaactctactcccactaatagctttttgatgacttctagcaagcctcgctaacctcgccttaccccccactattaacctactgggagaactctctgtgctagtaaccacgttctcctgatcaaatatcactctcctacttacaggactcaacatactagtcacagccctatactccctctacatatttaccacaacacaatggggctcactcacccaccacattaacaacataaaaccctcattcacacgagaaaacaccctcatgttcatacacctatcccccattctcctcctatccctcaaccccgacatcattaccgggttttcctcttgtaaatatagtttaaccaaaacatcagattgtgaatctgacaacagaggcttacgaccccttatttaccgagaaagctcacaagaactgctaactcatgcccccatgtctaacaacatggctttctcaacttttaaaggataacagctatccattggtcttaggccccaaaaattttggtgcaactccaaataaaagtaataaccatgcacactactataaccaccctaaccctgacttccctaattccccccatccttaccaccctcgttaaccctaacaaaaaaaactcatacccccattatgtaaaatccattgtcgcatccacctttattatcagtctcttccccacaacaatattcatgtgcctagaccaagaagttattatctcgaactgacactgagccacaacccaaacaacccagctctccctaagcttcaaactagactacttctccataatattcatccctgtagcattgttcgttacatggtccatcatagaattctcactgtgatatataaactcagacccaaacattaatcagttcttcaaatatctactcatcttcctaattaccatactaatcttagttaccgctaacaacctattccaactgttcatcggctgagagggcgtaggaattatatccttcttgctcatcagttgatgatacgcccgagcagatgccaacacagcagccattcaagcaatcctatacaaccgtatcggcgatatcggtttcatcctcgccttagcatgatttatcctacactccaactcatgagacccacaacaaatagcccttctaaacgctaatccaagcctcaccccactactaggcctcctcctagcagcagcaggcaaatcagcccaattaggtctccacccctgactcccctcagccatagaaggccccaccccagtctcagccctactccactcaagcactatagttgtagcaggaatcttcttactcatccgcttccaccccctagcagaaaatagcccactaatccaaactctaacactatgcttaggcgctatcaccactctgttcgcagcagtctgcgcccttacacaaaatgacatcaaaaaaatcgtagccttctccacttcaagtcaactaggactcataatagttacaatcggcatcaaccaaccacacctagcattcctgcacatctgtacccacgccttcttcaaagccatactatttatgtgctccgggtccatcatccacaaccttaacaatgaacaagatattcgaaaaataggaggactactcaaaaccatacctctcacttcaacctccctcaccattggcagcctagcattagcaggaatacctttcctcacaggtttctactccaaagaccacatcatcgaaaccgcaaacatatcatacacaaacgcctgagccctatctattactctcatcgctacctccctgacaagcgcctatagcactcgaataattcttctcaccctaacaggtcaacctcgcttccccacccttactaacattaacgaaaataaccccaccctactaaaccccattaaacgcctggcagccggaagcctattcgcaggatttctcattactaacaacatttcccccgcatcccccttccaaacaacaatccccctctacctaaaactcacagccctcgctgtcactttcctaggacttctaacagccctagacctcaactacctaaccaacaaacttaaaataaaatccccactatgcacattttatttctccaacatactcggattctaccctagcatcacacaccgcacaatcccctatctaggccttcttacgagccaaaacctgcccctactcctcctagacctaacctgactagaaaagctattacctaaaacaatttcacagcaccaaatctccacctccatcatcacctcaacccaaaaaggcataattaaactttacttcctctctttcttcttcccactcatcctaaccctactcctaatcacataacctattcccccgagcaatctcaattacaatatatacaccaacaaacaatgttcaaccagtaactactactaatcaacgcccataatcatacaaagcccccgcaccaataggatcctcccgaatcaaccctgacccctctccttcataaattattcagcttcctacactattaaagtttaccacaaccaccaccccatcatactctttcacccacagcaccaatcctacctccatcgctaaccccactaaaacactcaccaagacctcaacccctgacccccatgcctcaggatactcctcaatagccatcgctgtagtataaccaaagacaaccatcattccccctaaataaattaaaaaaactattaaacccatataacctcccccaaaattcagaataataacacacccgaccacaccgctaacaatcaatactaaacccccataaataggagaaggcttagaagaaaaccccacaaaccccattactaaacccacactcaacagaaacaaagcatacatcattattctcgcacggactacaaccacgaccaatgatatgaaaaaccatcgttgtatttcaactacaagaacaccaatgaccccaatacgcaaaactaaccccctaataaaattaattaaccactcattcatcgacctccccaccccatccaacatctccgcatgatgaaacttcggctcactccttggcgcctgcctgatcctccaaatcaccacaggactattcctagccatgcactactcaccagacgcctcaaccgccttttcatcaatcgcccacatcactcgagacgtaaattatggctgaatcatccgctaccttcacgccaatggcgcctcaatattctttatctgcctcttcctacacatcgggcgaggcctatattacggatcatttctctactcagaaacctgaaacatcggcattatcctcctgcttgcaactatagcaacagccttcataggctatgtcctcccgtgaggccaaatatcattctgaggggccacagtaattacaaacttactatccgccatcccatacattgggacagacctagttcaatgaatctgaggaggctactcagtagacagtcccaccctcacacgattctttacctttcacttcatcttgcccttcattattgcagccctagcagcactccacctcctattcttgcacgaaacgggatcaaacaaccccctaggaatcacctcccattccgataaaatcaccttccacccttactacacaatcaaagacgccctcggcttacttctcttccttctctccttaatgacattaacactattctcaccagacctcctaggcgacccagacaattataccctagccaaccccttaaacacccctccccacatcaagcccgaatgatatttcctattcgcctacacaattctccgatccgtccctaacaaactaggaggcgtccttgccctattactatccatcctcatcctagcaataatccccatcctccatatatccaaacaacaaagcataatatttcgcccactaagccaatcactttattgactcctagccgcagacctcctcattctaacctgaatcggaggacaaccagtaagctacccttttaccatcattggacaagtagcatccgtactatacttcacaacaatcctaatcctaataccaactatctccctaattgaaaacaaaatactcaaatgggcctgtccttgtagtataaactaatacaccagtcttgtaaaccggagatgaaaacctttttccaaggacaaatcagagaaaaagtctttaactccaccattagcacccaaagctaagattctaatttaaactattctctgttctttcatggggaagcagatttgggtaccacccaagtattgactcacccatcaacaaccgctatgtatctcgtacattactgccagccaccatgaatattgtacggtaccataaatacttgaccacctgtagtacataaaaacccaatccacatcaaaaccccctccccatgcttacaagcaagtacagcaatcaaccctcaactatcacacatcaactgcaactccaaagccacccctcacccactaggataccaacaaacctacccacccttaacagtacatagtacataaagccatttaccgtacatagcacattacagtcaaatcccttctcgtccccatggatgacccccctcagataggggtcccttgaccaccatcctccgtgaaatcaatatcccgcacaagagtgctactctcctcgctccgggcccataacacttgggggtagctaaagtgaactgtatccgacatctggttcctacttcagggccataaagcctaaatagcccacacgttccccttaaataagacatcacgatg

SEQ ID NO: 100 - DNA, 16571 bp, Homo sapiens mitochondrial
  3109: "n" refers to a nucleotide at position 3107 of the Cambridge Reference Sequence (CRS, Anderson et al. 1981 Nature 290:457-465), later determined to be absent from the human mtDNA sequence according to the revised CRS (rCRS, Andrews et al. 1999 Nature Genetics 23:147); "n" therefore represents a single nucleotide deletion at a position corresponding to nucleotide 3107 of SEQ ID NO:1 as provided herein.
gatcacaggtctatcaccctattaaccactcacgggagctctccatgcatttggtattttcgtctggggggtatgcacgcgatagcattgcgagacgctggagccggagcaccctatgtcgcagtatctgtctttgattcctgcctcatcctattatttatcgcacctacgttcaatattacaggcgaacatacttactaaagtgtgttaattaattaatgcttgtaggacataataacaacaattgaatgtctgcacagccgctttccacacagacatcataacaaaaaatttccaccaaaccccccctccctcccgcttctggccacagcacttaaacacatctctgccaaaccccaaaaacaaagaaccctaacaccagcctaaccagatttcaaattttatcttttggcggtatgcacttttaacagtcaccccccaactaacacattattttcccctcccactcccatactactaatctcatcaatacaacccccgcccatcctacccagcacacacacaccgctgctaaccccataccccgaaccaaccaaaccccaaagacaccccccacagtttatgtagcttacctcctcaaagcaatacactgaaaatgtttagacgggctcacatcaccccataaacaaataggtttggtcctagcctttctattagctcttagtaagattacacatgcaagcatccccgttccagtgagttcaccctctaaatcaccacgatcaaaagggacaagcatcaagcacgcagcaatgcagctcaaaacgcttagcctagccacacccccacgggaaacagcagtgattaacctttagcaataaacgaaagtttaactaagctatactaaccccagggttggtcaatttcgtgccagccaccgcggtcacacgattaacccaagtcaatagaagccggcgtaaagagtgttttagatcaccccctccccaataaagctaaaactcacctgagttgtaaaaaactccagttgacacaaaatagactacgaaagtggctttaacatatctgaacacacaatagctaagacccaaactgggattagataccccactatgcttagccctaaacctcaacagttaaatcaacaaaactgctcgccagaacactacgagccacagcttaaaactcaaaggacctggcggtgcttcatatccctctagaggagcctgttctgtaatcgataaaccccgatcaacctcaccacctcttgctcagcctatataccgccatcttcagcaaaccctgatgaaggctacaaagtaagcgcaagtacccacgtaaagacgttaggtcaaggtgtagcccatgaggtggcaagaaatgggctacattttctaccccagaaaactacgatagcccttatgaaacttaagggtcgaaggtggatttagcagtaaactgagagtagagtgcttagttgaacagggccctgaagcgcgtacacaccgcccgtcaccctcctcaagtatacttcaaaggacatttaactaaaacccctacgcatttatatagaggagacaagtcgtaacatggtaagtgtactggaaagtgcacttggacgaaccagagtgtagcttaacacaaagcacccaacttacacttaggagatttcaacttaacttgaccgctctgagctaaacctagccccaaacccactccaccttactaccagacaaccttagccaaaccatttacccaaataaagtataggcgatagaaattgaaacctggcgcaatagatatagtaccgcaagggaaagatgaaaaattataaccaagcataatatagcaaggactaacccctataccttctgcataatgaattaactagaaataactttgcaaggagagccaaagctaagacccccgaaaccagacgagctacctaagaacagctaaaagagcacacccgtctatgtagcaaaatagtgggaagatttataggtagaggcgacaaacctaccgagcctggtgatagctggttgtccaagatagaatcttagttcaactttaaatttgcccacagaaccctctaaatccccttgtaaatttaactgttagtccaaagaggaacagctctttggacactaggaaaaaaccttgtagagagagtaaaaaatttaacacccatagtaggcctaaaagcagccaccaattaagaaagcgttcaagctcaacacccactacctaaaaaatcccaaacatataactgaactcctcacacccaattggaccaatctatcaccctatagaagaactaatgttagtataagtaacatgaaaacattctcctccgcataagcctgcgtcagattaaaacactgaactgacaattaacagcccaatatctacaatcaaccaacaagtcattattaccctcactgtcaacccaacacaggcatgctcataaggaaaggttaaaaaaagtaaaaggaactcggcaaatcttaccccgcctgtttaccaaaaacatcacctctagcatcaccagtattagaggcaccgcctgcccagtgacacatgtttaacggccgcggtaccctaaccgtgcaaaggtagcataatcacttgttccttaaatagggacctgtatgaatggctccacgagggttcagctgtctcttacttttaaccagtgaaattgacctgcccgtgaagaggcgggcataacacagcaagacgagaagaccctatggagctttaatttattaatgcaaacagtacctaacaaacccacaggtcctaaactaccaaacctgcattaaaaatttcggttggggcgacctcggagcagaacccaacctccgagcagtacatgctaagacttcaccagtcaaagcgaactactatactcaattgatccaataacttgaccaacggaacaagttaccctagggataacagcgcaatcctattctagagtccatatcaacaatagggtttacgacctcgatgttggatcaggacatcccgatggtgcagccgctattaaaggttcgtttgttcaacgattaaagtcctacgtgatctgagttcagaccggagtaatccaggtcggtttctatctacnttcaaattcctccctgtacgaaaggacaagagaaataaggcctacttcacaaagcgccttcccccgtaaatgatatcatctcaacttagtattatacccacacccacccaagaacagggtttgttaagatggcagagcccggtaatcgcataaaacttaaaactttacagtcagaggttcaattcctcttcttaacaacatacccatggccaacctcctactcctcattgtacccattctaatcgcaatggcattcctaatgcttaccgaacgaaaaattctaggctatatacaactacgcaaaggccccaacgttgtaggcccctacgggctactacaacccttcgctgacgccataaaactcttcaccaaagagcccctaaaacccgccacatctaccatcaccctctacatcaccgccccgaccttagctctcaccatcgctcttctactatgaacccccctccccatacccaaccccctggtcaacctcaacctaggcctcctatttattctagccacctctagcctagccgtttactcaatcctctgatcagggtgagcatcaaactcaaactacgccctgatcggcgcactgcgagcagtagcccaaacaatctcatatgaagtcaccctagccatcattctactatcaacattactaataagtggctcctttaacctctccacccttatcacaacacaagaacacctctgattactcctgccatcatgacccttggccataatatgatttatctccacactagcagagaccaaccgaacccccttcgaccttgccgaaggggagtccgaactagtctcaggcttcaacatcgaatacgccgcaggccccttcgccctattcttcatagccgaatacacaaacattattataataaacaccctcaccactacaatcttcctaggaacaacatatgacgcactctcccctgaactctacacaacatattttgtcaccaagaccctacttctaacctccctgttcttatgaattcgaacagcatacccccgattccgctacgaccaactcatacacctcctatgaaaaaacttcctaccactcaccctagcattacttatatgacatgtctccatacccattacaatctccagcattccccctcaaacctaagaaatatgtctgataaaagagttactttgatagagtaaataataggagcttaaacccccttatttctaggactatgagaatcgaacccatccctgagaatccaaaattctccgtgccacctatcacaccccatcctaaagtaaggtcagctaaataagctatcgggcccataccccgaaaatgttggttatacccttcccgtactaattaatcccctggcccaacccgtcatctactctaccatctttgcaggcacactcatcacagcgctaagctcgcactgattttttacctgagtaggcctagaaataaacatgctagcttttattccagttctaaccaaaaaaataaaccctcgttccacagaagctgccatcaagtatttcctcacgcaagcaaccgcatccataatccttctaatagctatcctcttcaacaatatactctccggacaatgaaccataaccaatactaccaatcaatactcatcattaataatcataatggctatagcaataaaactaggaatagccccctttcacttctgagtcccagaggttacccaaggcacccctctgacatccggcctgcttcttctcacatgacaaaaactagcccccatctcaatcatataccaaatctctccctcactaaacgtaagccttctcctcactctctcaatcttatccatcatagcaggcagttgaggtggattaaaccaaacccagctacgcaaaatcttagcatactcctcaattacccacataggatgaataatagcagttctaccgtacaaccctaacataaccattcttaatttaactatttatattatcctaactactaccgcattcctactactcaacttaaactccagcaccacgaccctactactatctcgcacctgaaacaagctaacatgactaacacccttaattccatccaccctcctctccctaggaggcctgcccccgctaaccggctttttgcccaaatgggccattatcgaagaattcacaaaaaacaatagcctcatcatccccaccatcatagccaccatcaccctccttaacctctacttctacctacgcctaatctactccacctcaatcacactactccccatatctaacaacgtaaaaataaaatgacagtttgaacatacaaaacccaccccattcctccccacactcatcgcccttaccacgctactcctacctatctccccttttatactaataatcttatagaaatttaggttaaatacagaccaagagccttcaaagccctcagtaagttgcaatacttaatttctgtaacagctaaggactgcaaaaccccactctgcatcaactgaacgcaaatcagccactttaattaagctaagcccttactagaccaatgggacttaaacccacaaacacttagttaacagctaagcaccctaatcaactggcttcaatctacttctcccgccgccgggaaaaaaggcgggagaagccccggcaggtttgaagctgcttcttcgaatttgcaattcaatatgaaaatcacctcggagctggtaaaaagaggcctaacccctgtctttagatttacagtccaatgcttcactcagccattttacctcacccccactgatgttcgccgaccgttgactattctctacaaaccacaaagacattggaacactatacctattattcggcgcatgagctggagtcctaggcacagctctaagcctccttattcgagccgagctgggccagccaggcaaccttctaggtaacgaccacatctacaacgttatcgtcacagcccatgcatttgtaataatcttcttcatagtaatacccatcataatcggaggctttggcaactgactagttcccctaataatcggtgcccccgatatggcgtttccccgcataaacaacataagcttctgactcttacctccctctctcctactcctgctcgcatctgctatagtggaggccggagcaggaacaggttgaacagtctaccctcccttagcagggaactactcccaccctggagcctccgtagacctaaccatcttctccttacacctagcaggtgtctcctctatcttaggggccatcaatttcatcacaacaattatcaatataaaaccccctgccataacccaataccaaacgcccctcttcgtctgatccgtcctaatcacagcagtcctacttctcctatctctcccagtcctagctgctggcatcactatactactaacagaccgcaacctcaacaccaccttcttcgaccccgccggaggaggagaccccattctataccaacacctattctgatttttcggtcaccctgaagtttatattcttatcctaccaggcttcggaataatctcccatattgtaacttactactccggaaaaaaagaaccatttggatacataggtatggtctgagctatgatatcaattggcttcctagggtttatcgtgtgagcacaccatatatttacagtaggaatagacgtagacacacgagcatatttcacctccgctaccataatcatcgctatccccaccggcgtcaaagtatttagctgactcgccacactccacggaagcaatatgaaatgatctgctgcagtgctctgagccctaggattcatctttcttttcaccgtaggtggcctgactggcattgtattagcaaactcatcactagacatcgtactacacgacacgtactacgttgtagcccacttccactatgtcctatcaataggagctgtatttgccatcataggaggcttcattcactgatttcccctattctcaggctacaccctagaccaaacctacgccaaaatccatttcactatcatattcatcggcgtaaatctaactttcttcccacaacactttctcggcctatccggaatgccccgacgttactcggactaccccgatgcatacaccacatgaaacatcctatcatctgtaggctcattcatttctctaacagcagtaatattaataattttcatgatttgagaagccttcgcttcgaagcgaaaagtcctaatagtagaagaaccctccataaacctggagtgactatatggatgccccccaccctaccacacattcgaagaacccgtatacataaaatctagacaaaaaaggaaggaatcgaaccccccaaagctggtttcaagccaaccccatggcctccatgactttttcaaaaaggtattagaaaaaccatttcataactttgtcaaagttaaattataggctaaatcctatatatcttaatggcacatgcagcgcaagtaggtctacaagacgctacttcccctatcatagaagagcttatcacctttcatgatcacgccctcataatcattttccttatctgcttcctagtcctgtatgcccttttcctaacactcacaacaaaactaactaatactaacatctcagacgctcaggaaatagaaaccgtctgaactatcctgcccgccatcatcctagtcctcatcgccctcccatccctacgcatcctttacataacagacgaggtcaacgatccctcccttaccatcaaatcaattggccaccaatggtactgaacctacgagtacaccgactacggcggactaatcttcaactcctacatacttcccccattattcctagaaccaggcgacctgcgactccttgacgttgacaatcgagtagtactcccgattgaagcccccattcgtataataattacatcacaagacgtcttgcactcatgagctgtccccacattaggcttaaaaacagatgcaattcccggacgtctaaaccaaaccactttcaccgctacacgaccgggggtatactacggtcaatgctctgaaatctgtggagcaaaccacagtttcatgcccatcgtcctagaattaattcccctaaaaatctttgaaatagggcccgtatttaccctatagcaccccctctaccccctctagagcccactgtaaagctaacttagcattaaccttttaagttaaagattaagagaaccaacacctctttacagtgaaatgccccaactaaatactaccgtatggcccaccataattacccccatactccttacactattcctcatcacccaactaaaaatattaaacacaaactaccacctacctccctcaccaaagcccataaaaataaaaaattataacaaaccctgagaaccaaaatgaacgaaaatctgttcgcttcattcattgcccccacaatcctaggcctacccgccgcagtactgatcattctatttccccctctattgatccccacctccaaatatctcatcaacaaccgactaatcaccacccaacaatgactaatcaaactaacctcaaaacaaatgataaccatacacaacactaaaggacgaacctgatctcttatactagtatccttaatcatttttattgccacaactaacctcctcggactcctgcctcactcatttacaccaaccacccaactatctataaacctagccatggccatccccttatgagcgggcgcagtgattataggctttcgctctaagattaaaaatgccctagcccacttcttaccacaaggcacacctacaccccttatccccatactagttattatcgaaaccatcagcctactcattcaaccaatagccctggccgtacgcctaaccgctaacattactgcaggccacctactcatgcacctaattggaagcgccaccctagcaatatcaaccattaaccttccctctacacttatcatcttcacaattctaattctactgactatcctagaaatcgctgtcgccttaatccaagcctacgttttcacacttctagtaagcctctacctgcacgacaacacataatgacccaccaatcacatgcctatcatatagtaaaacccagcccatgacccctaacaggggccctctcagccctcctaatgacctccggcctagccatgtgatttcacttccactccataacgctcctcatactaggcctactaaccaacacactaaccatataccaatgatgacgcgatgtaacacgagaaagcacataccaaggccaccacacaccacctgtccaaaaaggccttcgatacgggataatcctatttattacctcagaagtttttttcttcgcaggatttttctgagccttttaccactccagcctagcccctaccccccaattaggagggcactggcccccaacaggcatcaccccgctaaatcccctagaagtcccactcctaaacacatccgtattactcgcatcaggagtatcaatcacctgagctcaccatagtctaatagaaaacaaccgaaaccaaataattcaagcactgcttattacaattttactgggtctctattttaccctcctacaagcctcagagtacttcgagtctcccttcaccatttccgacggcatctacggctcaacattttttgtagccacaggcttccacggacttcacgtcattattggctcaactttcctcactatctgcttcatccgccaactaatatttcactttacatccaaacatcactttggcttcgaagccgccgcctgatactggcattttgtagatgtggtttgactatttctgtatgtctccatctattgatgagggtcttactcttttagtataaatagtaccgttaacttccaattaactagttttgacaacattcaaaaaagagtaataaacttcgccttaattttaataatcaacaccctcctagccttactactaataattattacattttgactaccacaactcaacggctacatagaaaaatccaccccttacgagtgcggcttcgaccctatatcccccgcccgcgtccctttctccataaaattcttcttagtagctattaccttcttattatttgatctagaaattgccctccttttacccctaccatgagccctacaaacaactaacctgccactaatagttatgtcatccctcttattaatcatcatcctagccctaagtctggcctatgagtgactacaaaaaggattagactgaaccgaattggtatatagtttaaacaaaacgaatgatttcgactcattaaattatgataatcatatttaccaaatgcccctcatttacataaatattatactagcatttaccatctcacttctaggaatactagtatatcgctcacacctcatatcctccctactatgcctagaaggaataatactatcgctgttcattatagctactctcataaccctcaacacccactccctcttagccaatattgtgcctattgccatactagtctttgccgcctgcgaagcagcggtgggcctagccctactagtctcaatctccaacacatatggcctagactacgtacataacctaaacctactccaatgctaaaactaatcgtcccaacaattatattactaccactgacatgactttccaaaaaacacataatttgaatcaacacaaccacccacagcctaattattagcatcatccctctactattttttaaccaaatcaacaacaacctatttagctgttccccaaccttttcctccgaccccctaacaacccccctcctaatactaactacctgactcctacccctcacaatcatggcaagccaacgccacttatccagtgaaccactatcacgaaaaaaactctacctctctatactaatctccctacaaatctccttaattataacattcacagccacagaactaatcatattttatatcttcttcgaaaccacacttatccccaccttggctatcatcacccgatgaggcaaccagccagaacgcctgaacgcaggcacatacttcctattctacaccctagtaggctcccttcccctactcatcgcactaacttacactcacaacaccctaggctcactaaacattctactactcactctcactgcccaagaactatcaaactcctgagccaacaacttaatatgactagcttacacaatagcttttatagtaaagatacctctttacggactccacttatgactccctaaagcccatgtcgaagcccccatcgctgggtcaatagtacttgccgcagtactcttaaaactaggcggctatggtataatacgcctcacactcattctcaaccccctgacaaaacacatagcctaccccttccttgtactatccctatgaggcataattataacaagctccatctgcctacgacaaacagacctaaaatcgctcattgcatactcttcaatcagccacatagccctcgtagtaacagccattctcatccaaaccccctgaagcttcaccggcgcagtcattctcataatcgcccacgggcttacatcctcattactattctgcctagcaaactcaaactacgaacgcactcacagtcgcatcataatcctctctcaaggacttcaaactctactcccactaatagctttttgatgacttctagcaagcctcgctaacctcgccttaccccccactattaacctactgggagaactctctgtgctagtaaccacgttctcctgatcaaatatcactctcctacttacaggactcaacatactagtcacagccctatactccctctacatatttaccacaacacaatggggctcactcacccaccacattaacaacataaaaccctcattcacacgagaaaacaccctcatgttcatacacctatcccccattctcctcctatccctcaaccccgacatcattaccgggttttcctcttgtaaatatagtttaaccaaaacatcagattgtgaatctgacaacagaggcttacgaccccttatttaccgagaaagctcacaagaactgctaactcatgcccccatgtctaacaacatggctttctcaacttttaaaggataacagctatccattggtcttaggccccaaaaattttggtgcaactccaaataaaagtaataaccatgcacactactataaccaccctaaccctgacttccctaattccccccatccttaccaccctcgttaaccctaacaaaaaaaactcatacccccattatgtaaaatccattgtcgcatccacctttattatcagtctcttccccacaacaatattcatgtgcctagaccaagaagttattatctcgaactgacactgagccacaacccaaacaacccagctctccctaagcttcaaactagactacttctccataatattcatccctgtagcattgttcgttacatggtccatcatagaattctcactgtgatatataaactcagacccaaacattaatcagttcttcaaatatctactcatcttcctaattaccatactaatcttagttaccgctaacaacctattccaactgttcatcggctgagagggcgtaggaattatatccttcttgctcatcagttgatgatacgcccgagcagatgccaacacagcagccattcaagcaatcctatacaaccgtatcggcgatatcggtttcatcctcgccttagcatgatttatcctacactccaactcatgagacccacaacaaatagcccttctaaacgctaatccaagcctcaccccactactaggcctcctcctagcagcagcaggcaaatcagcccaattaggtctccacccctgactcccctcagccatagaaggccccaccccagtctcagccctactccactcaagcactatagttgtagcaggaatcttcttactcatccgcttccaccccctagcagaaaatagcccactaatccaaactctaacactatgcttaggcgctatcaccactctgttcgcagcagtctgcgcccttacacaaaatgacatcaaaaaaatcgtagccttctccacttcaagtcaactaggactcataatagttacaatcggcatcaaccaaccacacctagcattcctgcacatctgtacccacgccttcttcaaagccatactatttatgtgctccgggtccatcatccacaaccttaacaatgaacaagatattcgaaaaataggaggactactcaaaaccatacctctcacttcaacctccctcaccattggcagcctagcattagcaggaatacctttcctcacaggtttctactccaaagaccacatcatcgaaaccgcaaacatatcatacacaaacgcctgagccctatctattactctcatcgctacctccctgacaagcgcctatagcactcgaataattcttctcaccctaacaggtcaacctcgcttccccacccttactaacattaacgaaaataaccccaccctactaaaccccattaaacgcctggcagccggaagcctattcgcaggatttctcattactaacaacatttcccccgcatcccccttccaaacaacaatccccctctacctaaaactcacagccctcgctgtcactttcctaggacttctaacagccctagacctcaactacctaaccaacaaacttaaaataaaatccccactatgcacattttatttctccaacatactcggattctaccctagcatcacacaccgcacaatcccctatctaggccttcttacgagccaaaacctgcccctactcctcctagacctaacctgactagaaaagctattacctaaaacaatttcacagcaccaaatctccacctccatcatcacctcaacccaaaaaggcataattaaactttacttcctctctttcttcttcccactcatcctaaccctactcctaatcacataacctattcccccgagcaatctcaattacaatatatacaccaacaaacaatgttcaaccagtaactactactaatcaacgcccataatcatacaaagcccccgcaccaataggatcctcccgaatcaaccctgacccctctccttcataaattattcagcttcctacactattaaagtttaccacaaccaccaccccatcatactctttcacccacagcaccaatcctacctccatcgctaaccccactaaaacactcaccaagacctcaacccctgacccccatgcctcaggatactcctcaatagccatcgctgtagtatatccaaagacaaccatcattccccctaaataaattaaaaaaactattaaacccatataacctcccccaaaattcagaataataacacacccgaccacaccgctaacaatcaatactaaacccccataaataggagaaggcttagaagaaaaccccacaaaccccattactaaacccacactcaacagaaacaaagcatacatcattattctcgcacggactacaaccacgaccaatgatatgaaaaaccatcgttgtatttcaactacaagaacaccaatgaccccaatacgcaaaactaaccccctaataaaattaattaaccactcattcatcgacctccccaccccatccaacatctccgcatgatgaaacttcggctcactccttggcgcctgcctgatcctccaaatcaccacaggactattcctagccatgcactactcaccagacgcctcaaccgccttttcatcaatcgcccacatcactcgagacgtaaattatggctgaatcatccgctaccttcacgccaatggcgcctcaatattctttatctgcctcttcctacacatcgggcgaggcctatattacggatcatttctctactcagaaacctgaaacatcggcattatcctcctgcttgcaactatagcaacagccttcataggctatgtcctcccgtgaggccaaatatcattctgaggggccacagtaattacaaacttactatccgccatcccatacattgggacagacctagttcaatgaatctgaggaggctactcagtagacagtcccaccctcacacgattctttacctttcacttcatcttgcccttcattattgcagccctagcagcactccacctcctattcttgcacgaaacgggatcaaacaaccccctaggaatcacctcccattccgataaaatcaccttccacccttactacacaatcaaagacgccctcggcttacttctcttccttctctccttaatgacattaacactattctcaccagacctcctaggcgacccagacaattataccctagccaaccccttaaacacccctccccacatcaagcccgaatgatatttcctattcgcctacacaattctccgatccgtccctaacaaactaggaggcgtccttgccctattactatccatcctcatcctagcaataatccccatcctccatatatccaaacaacaaagcataatatttcgcccactaagccaatcactttattgactcctagccgcagacctcctcattctaacctgaatcggaggacaaccagtaagctacccttttaccatcattggacaagtagcatccgtactatacttcacaacaatcctaatcctaataccaactatctccctaattgaaaacaaaatactcaaatgggcctgtccttgtagtataaactaatacaccagtcttgtaaaccggagatgaaaacctttttccaaggacaaatcagagaaaaagtctttaactccaccattagcacccaaagctaagattctaatttaaactattctctgttctttcatggggaagcagatttgggtaccacccaagtattgactcacccatcaacaaccgctatgtatttcgtacattactgccagccaccatgaatattgtacggtaccataaatacttgaccacctgtagtacataaaaacccaatccacatcaaaaccccctccccatgcttacaagcaagtacagcaatcaaccctcaactatcacacatcaactgcaactccaaagccacccctcacccactaggataccaacaaacctacccacccttaacagtacatagtacataaagccatttaccgtacatagcacattacagtcaaatcccttctcgcccccatggatgacccccctcagataggggtcccttgaccaccatcctccgtgaaatcaatatcccgcacaagagtgctactctcctcgctccgggcccataacacttgggggtagctaaggtgaactgtatccgacatctggttcctacttcagggtcataaagcctaaatagcccacacgttccccttaaataagacatcacgatg

SEQ ID NO: 101 - DNA, 16570 bp, Homo sapiens mitochondrial
  3108: "n" refers to a nucleotide at position 3107 of the Cambridge Reference Sequence (CRS, Anderson et al. 1981 Nature 290:457-465), later determined to be absent from the human mtDNA sequence according to the revised CRS (rCRS, Andrews et al. 1999 Nature Genetics 23:147); "n" therefore represents a single nucleotide deletion at a position corresponding to nucleotide 3107 of SEQ ID NO:1 as provided herein.
gatcacaggtctatcaccctattaaccactcacgggagctctccatgcatttggtattttcgtctggggggtatgcacgcgatagcattgcgagacgctggagccggagcaccctatgtcgcagtatctgtctttgattcctgcctcatcccattatttatcgcacctacgttcaatattacaggcgaacatacttactaaagtgtgttaattaattaatgcttgtaggacataataataacaattgaatgtctgcacagccgctttccacacagacatcataacaaaaaatttccaccaaaccccccctctccccgcttctggccacagcacttaaacacatctctgccaaaccccaaaaacaaagaaccctaacaccagcctaaccagatttcaaattttatcttttggcggtatgcacttttaacagtcaccccccaactaacacattattttcccctcccactcccatactactaatctcatcaatacaacccccgcccatcctacccagcacacacacaccgctgctaaccccataccccgaaccaaccaaaccccaaagacaccccccacagtttatgtagcttacctcctcaaagcaatacactgaaaatgtttagacgggctcacatcaccccataaacaaataggtttggtcctagcctttctattagctcttagtaagattacacatgcaagcatccccgttccagtgagttcaccctctaaatcaccacgatcaaaagggacaagcatcaagcacgcagcaatgcagctcaaaacgcttagcctagccacacccccacgggaaacagcagtgattaacctttagcaataaacgaaagtttaactaagctatactaaccccagggttggtcaatttcgtgccagccaccgcggtcacacgattaacccaagtcaatagaagccggcgtaaagagtgttttagatcaccccctccccaataaagctaaaactcacctgagttgtaaaaaactccagttgacacaaaatagactacgaaagtggctttaacatatctgaacacacaatagctaagacccaaactgggattagataccccactatgcttagccctaaacctcaacagttaaatcaacaaaactgctcgccagaacactacgagccacagcttaaaactcaaaggacctggcggtgcttcatatccctctagaggagcctgttctgtaatcgataaaccccgatcaacctcaccacctcttgctcagcctatataccgccatcttcagcaaaccctgatgaaggctacaaagtaagcgcaagtacccacgtaaagacgttaggtcaaggtgtagcccatgaggtggcaagaaatgggctacattttctaccccagaaaactacgatagcccttatgaaacttaagggtcgaaggtggatttagcagtaaactgagagtagagtgcttagttgaacagggccctgaagcgcgtacacaccgcccgtcaccctcctcaagtatacttcaaaggacatttaactaaaacccctacgcatttatatagaggagacaagtcgtaacatggtaagtgtactggaaagtgcacttggacgaaccagagtgtagcttaacacaaagcacccaacttacacttaggagatttcaacttaacttgaccgctctgagctaaacctagccccaaacccactccaccttactaccagacaaccttagccaaaccatttacccaaataaagtataggcgatagaaattgaaacctggcgcaatagatatagtaccgcaagggaaagatgaaaaattataaccaagcataatatagcaaggactaacccctataccttctgcataatgaattaactagaaataactttgcaaggagagccaaagctaagacccccgaaaccagacgagctacctaagaacagctaaaagagcacacccgtctatgtagcaaaatagtgggaagatttataggtagaggcgacaaacctaccgagcctggtgatagctggttgtccaagatagaatcttagttcaactttaaatttgcccacagaaccctctaaatccccttgtaaatttaactgttagtccaaagaggaacagctctttggacactaggaaaaaaccttgtagagagagtaaaaaatttaacacccatagtaggcctaaaagcagccaccaattaagaaagcgttcaagctcaacacccactacctaaaaaatcccaaacatataactgaactcctcacacccaattggaccaatctatcaccctatagaagaactaatgttagtataagtaacatgaaaacattctcctccgcataagcctgcgtcagattaaaacactgaactgacaattaacagcccaatatctacaatcaaccaacaagtcattattaccctcactgtcaacccaacacaggcatgctcataaggaaaggttaaaaaaagtaaaaggaactcggcaaatcttaccccgcctgtttaccaaaaacatcacctctagcatcaccagtattagaggcaccgcctgcccagtgacacatgtttaacggccgcggtaccctaaccgtgcaaaggtagcataatcacttgttccttaaatagggacctgtatgaatggctccacgagggttcagctgtctcttacttttaaccagtgaaattgacctgcccgtgaagaggcgggcataacacagcaagacgagaagaccctatggagctttaatttattaatgcaaacagtacctaacaaacccacaggtcctaaactaccaaacctgcattaaaaatttcggttggggcgacctcggagcagaacccaacctccgagcagtacatgctaagacttcaccagtcaaagcgaactactatactcaattgatccaataacttgaccaacggaacaagttaccctagggataacagcgcaatcctattctagagtccatatcaacaatagggtttacgacctcgatgttggatcaggacatcccgatggtgcagccgctattaaaggttcgtttgttcaacgattaaagtcctacgtgatctgagttcagaccggagtaatccaggtcggtttctatctacnttcaaattcctccctgtacgaaaggacaagagaaataaggcctacttcacaaagcgccttcccccgtaaatgatatcatctcaacttagtattatacccacacccacccaagaacagggtttgttaagatggcagagcccggtaatcgcataaaacttaaaactttacagtcagaggttcaattcctcttcttaacaacatacccatggccaacctcctactcctcattgtacccattctaatcgcaatggcattcctaatgcttaccgaacgaaaaattctaggctatatacaactacgcaaaggccccaacgttgtaggcccctacgggctactacaacccttcgctgacgccataaaactcttcaccaaagagcccctaaaacccgccacatctaccatcaccctctacatcaccgccccgaccttagctctcaccatcgctcttctactatgaacccccctccccatacccaaccccctggtcaacctcaacctaggcctcctatttattctagccacctctagcctagccgtttactcaatcctctgatcagggtgagcatcaaactcaaactacgccctgatcggcgcactgcgagcagtagcccaaacaatctcatatgaagtcaccctagccatcattctactatcaacattactaataagtggctcctttaacctctccacccttatcacaacacaagaacacctctgattactcctgccatcatgacccttggccataatatgatttacctccacactagcagagaccaaccgaacccccttcgaccttgccgaaggggagtccgaactagtctcaggcttcaacatcgaatacgccgcaggccccttcgccctattcttcatagccgaatacacaaacattattataataaacaccctcaccactacaatcttcctaggaacaacatatgacgcactctcccctgaactctacacaacatattttgtcaccaagaccctacttctaacctccctgttcttatgaattcgaacagcatacccccgattccgctacgaccaactcatacacctcctatgaaaaaacttcctaccactcaccctagcattacttatatgatatgtctccatacccattacaatctccagcattccccctcaaacctaagaaatatgtctgataaaagagttactttgatagagtaaataataggagcttaaacccccttatttctaggactatgagaatcgaacccatccctgagaatccaaaattctccgtgccacctatcacaccccatcctaaagtaaggtcagctaaataagctatcgggcccataccccgaaaatgttggttatacccttcccgtactaattaatcccctggcccaacccgtcatctactctaccatctttgcaggcacactcatcacagcgctaagctcgcactgattttttacctgagtaggcctagaaataaacatgctagcttttattccagttctaaccaaaaaaataaaccctcgttccacagaagctgccatcaagtatttcctcacgcaagcaaccgcatccataatccttctaatagctatcctcttcaacaatatactctccggacaatgaaccataaccaatactaccaatcaatactcatcattaataatcataatggctatagcaataaaactaggaatagccccctttcacttctgagtcccagaggttacccaaggcacccctctgacatccggcctgcttcttctcacatgacaaaaactagcccccatctcaatcatataccaaatctctccctcactaaacgtaagccttctcctcactctctcaatcttatccatcatagcaggcagttgaggtggattaaaccaaacccagctacgcaaaatcttagcatactcctcaattacccacataggatgaataatagcagttctaccgtacaaccctaacataaccattcttaatttaactatttatattatcctaactactaccgcattcctactactcaacttaaactccagcaccacgaccctactactatctcgcacctgaaacaagctaacatgactaacacccttaattccatccaccctcctctccctaggaggcctgcccccgctaaccggctttttgcccaaatgggccattatcgaagaattcacaaaaaacaatagcctcatcatccccaccatcatagccaccatcaccctccttaacctctacttctacctacgcctaatctactccacctcaatcacactactccccatatctaacaacgtaaaaataaaatgacagtttgaacatacaaaacccaccccattcctccccacactcatcgcccttaccacgctactcctacctatctccccttttatactaataatcttatagaaatttaggttaaatacagaccaagagccttcaaagccctcagtaagttgcaatacttaatttctgtaacagctaaggactgcaaaaccccactctgcatcaactgaacgcaaatcagccactttaattaagctaagcccttactagaccaatgggacttaaacccacaaacacttagttaacagctaagcaccctaatcaactggcttcaatctacttctcccgccgccgggaaaaaaggcgggagaagccccggcaggtttgaagctgcttcttcgaatttgcaattcaatatgaaaatcacctcggagctggtaaaaagaggcctaacccctgtctttagatttacagtccaatgcttcactcagccattttacctcacccccactgatgttcgccgaccgttgactattctctacaaaccacaaagacattggaacactatacctattattcggcgcatgagctggagtcctaggcacagctctaagcctccttattcgagccgagctgggccagccaggcaaccttctaggtaacgaccacatctacaacgttatcgtcacagcccatgcatttgtaataatcttcttcatagtaatacccatcataatcggaggctttggcaactgactagttcccctaataatcggtgcccccgatatggcgtttccccgcataaacaacataagcttctgactcttacctccctctctcctactcctgctcgcatctgctatagtggaggccggagcaggaacaggttgaacagtctaccctcccttagcagggaactactcccaccctggagcctccgtagacctaaccatcttctccttacacctagcaggtgtctcctctatcttaggggccatcaatttcatcacaacaattatcaatataaaaccccctgccataacccaataccaaacgcccctcttcgtctgatccgtcctaatcacagcagtcctacttctcctatctctcccagtcctagctgctggcatcactatactactaacagaccgcaacctcaacaccaccttcttcgaccccgccggaggaggagaccccattctataccaacacctattctgatttttcggtcaccctgaagtttatattcttatcctaccaggcttcggaataatctcccatattgtaacttactactccggaaaaaaagaaccatttggatacataggtatggtctgagctatgatatcaattggcttcctagggtttatcgtgtgagcacaccacatatttacagtaggaatagacgtagacacacgagcatatttcacctccgctaccataatcatcgctatccccaccggcgtcaaagtatttagctgactcgccacactccacggaagcaatatgaaatgatctgctgcagtgctctgagccctaggattcatctttcttttcaccgtaggtggcctgactggcattgtattagcaaactcatcactagacatcgtactacacgacacgtactacgttgtagcccacttccactatgtcctatcaataggagctgtatttgccatcataggaggcttcattcactgatttcccctattctcaggctacaccctagaccaaacctacgccaaaatccatttcactatcatattcatcggcgtaaatctaactttcttcccacaacactttctcggcctatccggaatgccccgacgttactcggactaccccgatgcatacaccacatgaaacatcctatcatctgtaggctcattcatttctctaacagcagtaatattaataattttcatgatttgagaagccttcgcttcgaagcgaaaagtcctaatagtagaagaaccctccataaacctggagtgactatatggatgccccccaccctaccacacattcgaagaacccgtatacataaaatctagacaaaaaaggaaggaatcgaaccccccaaagctggtttcaagccaaccccatggcctccatgactttttcaaaaaggtattagaaaaaccatttcataactttgtcaaagttaaattataggctaaatcctatatatcttaatggcacatgcagcgcaagtaggtctacaagacgctacttcccctatcatagaagagcttatcacctttcatgatcacgccctcataatcattttccttatctgcttcctagtcctgtatgcccttttcctaacactcacaacaaaactaactaatactaacatctcagacgctcaggaaatagaaaccgtctgaactatcctgcccgccatcatcctagtcctcatcgccctcccatccctacgcatcctttacataacagacgaggtcaacgatccctcccttaccatcaaatcaattggccaccaatggtactgaacctacgagtacaccgactacggcggactaatcttcaactcctacatacttcccccattattcctagaaccaggcgacctgcgactccttgacgttgacaatcgagtagtactcccgattgaagcccccattcgtataataattacatcacaagacgtcttgcactcatgagctgtccccacattaggcttaaaaacagatgcaattcccggacgtctaaaccaaaccactttcaccgctacacgaccgggggtatactacggtcaatgctctgaaatctgtggagcaaaccacagtttcatgcccatcgtcctagaattaattcccctaaaaatctttgaaatagggcccgtatttaccctatagcaccccctctaccccctctagagcccactgtaaagctaacttagcattaaccttttaagttaaagattaagagaaccaacacctctttacagtgaaatgccccaactaaatactaccgtatggcccaccataattacccccatactccttacactattcctcatcacccaactaaaaatattaaacacaaactaccacctacctccctcaccaaagcccataaaaataaaaaattataacaaaccctgagaaccaaaatgaacgaaaatctgttcgcttcattcattgcccccacaatcctaggcctacccgccgcagtactgatcattctatttccccctctattgatccccacctccaaatatctcatcaacaaccgactaatcaccacccaacaatgactaatcaaactaacctcaaaacaaatgataaccatacacaacactaaaggacgaacctgatctcttatactagtatccttaatcatttttattgccacaactaacctcctcggactcctgcctcactcatttacaccaaccacccaactatctataaacctagccatggccatccccttatgagcgggcgcagtgattataggctttcgctctaagattaaaaatgccctagcccacttcttaccacaaggcacacctacaccccttatccccatactagttattatcgaaaccatcagcctactcattcaaccaatagccctagccgtacgcctaaccgctaacattactgcaggccacctactcatgcacctaattggaagcgccaccctagcaatatcaaccattaaccttccctctacacttatcatcttcacaattctaattctactgactatcctagaaatcgctgtcgccttaatccaagcctacgttttcacacttctagtaagcctctacctgcacgacaacacataatgacccaccaatcacatgcctatcatatagtaaaacccagcccatgacccctaacaggggccctctcagccctcctaatgacctccggcctagccatgtgatttcacttccactccataacgctcctcatactaggcctactaaccaacacactaaccatataccaatgatggcgcgatgtaacacgagaaagcacataccaaggccaccacacaccacctgtccaaaaaggccttcgatacgggataatcctatttattacctcagaagtttttttcttcgcaggatttttctgagccttttaccactccagcctagcccctaccccccaattaggagggcactggcccccaacaggcatcaccccgctaaatcccctagaagtcccactcctaaacacatccgtattactcgcatcaggagtatcaatcacctgagctcaccatagtctaatagaaaacaaccgaaaccaaataattcaagcactgcttattacaattttactgggtctctattttaccctcctacaagcctcagagtacttcgagtctcccttcaccatttccgacggcatctacggctcaacattttttgtagccacaggcttccacggacttcacgtcattattggctcaactttcctcactatctgcttcatccgccaactaatatttcactttacatccaaacatcactttggcttcgaagccgccgcctgatactggcattttgtagatgtggtttgactatttctgtatgtctccatctattgatgagggtcttactcttttagtataaatagtaccgttaacttccaattaactagttttgacaacattcaaaaaagagtaataaacttcgccttaattttaataatcaacaccctcctagccttactactaataattattacattttgactaccacaactcaacggctacatagaaaaatccaccccttacgagtgcggcttcgaccctatatcccccgcccgcgtccctttctccataaaattcttcttagtagctattaccttcttattatttgatctagaaattgccctccttttacccctaccatgagccctacaaacaactaacctgccactaatagttatgtcatccctcttattaatcatcatcctagccctaagtctggcctatgagtgactacaaaaaggattagactgaaccgaattggtatatagtttaaacaaaacgaatgatttcgactcattaaattatgataatcatatttaccaaatgcccctcatttacataaatattatactagcatttaccatctcacttctaggaatactagtatatcgctcacacctcatatcctccctactatgcctagaaggaataatactatcgctgttcattatagctactctcataaccctcaacacccactccctcttagccaatattgtgcctattgccatactagtctttgccgcctgcgaagcagcggtgggcctagccctactagtctcaatctccaacacatatggcctagactacgtacataacctaaacctactccaatgctaaaactaatcgtcccaacaattatattactaccactgacatgactttccaaaaaacacataatttgaatcaacacaaccacccacagcctaattattagcatcatccctctactattttttaaccaaatcaacaacaacctatttagctgttccccaaccttttcctccgaccccctaacaacccccctcctaatactaactacctgactcctacccctcacaatcatggcaagccaacgccacttatccagtgaaccactatcacgaaaaaaactctacctctctatactaatctccctacaaatctccttaattataacattcacagccacagaactaatcatattttatatcttcttcgaaaccacacttatccccaccttggctatcatcacccgatgaggcaaccagccagaacgcctgaacgcaggcacatacttcctattctacaccctagtaggctcccttcccctactcatcgcactaatttacactcacaacaccctaggctcactaaacattctactactcactctcactgcccaagaactatcaaactcctgagccaacaacttaatatgactagcttacacaatagcttttatagtaaagatacctctttacggactccacttatgactccctaaagcccatgtcgaagcccccatcgctgggtcaatagtacttgccgcagtactcttaaaactaggcggctatggtataatacgcctcacactcattctcaaccccctgacaaaacacatagcctaccccttccttgtactatccctatgaggcataattataacaagctccatctgcctacgacaaacagacctaaaatcgctcattgcatactcttcaatcagccacatagccctcgtagtaacagccattctcatccaaaccccctgaagcttcaccggcgcagtcattctcataatcgcccacgggcttacatcctcattactattctgcctagcaaactcaaactacgaacgcactcacagtcgcatcataatcctctctcaaggacttcaaactctactcccactaatagctttttgatgacttctagcaagcctcgctaacctcgccttaccccccactattaacctactgggagaactctctgtgctagtaaccacgttctcctgatcaaatatcactctcctacttacaggactcaacatactagtcacagccctatactccctctacatatttaccacaacacaatggggctcactcacccaccacattaacaacataaaaccctcattcacacgagaaaacaccctcatgttcatacacctatcccccattctcctcctatccctcaaccccgacatcattaccgggttttcctcttgtaaatatagtttaaccaaaacatcagattgtgaatctgacaacagaggcttacgaccccttatttaccgagaaagctcacaagaactgctaactcatgcccccatgtctaacaacatggctttctcaacttttaaaggataacagctatccattggtcttaggccccaaaaattttggtgcaactccaaataaaagtaataaccatgcacactactataaccaccctaaccctgacttccctaattccccccatccttaccaccctcgttaaccctaacaaaaaaaactcatacccccattatgtaaaatccattgtcgcatccacctttattatcagtctcttccccacaacaatattcatgtgcctagaccaagaagttattatctcgaactgacactgagccacaacccaaacaacccagctctccctaagcttcaaactagactacttctccataatattcatccctgtagcattgttcgttacatggtccatcatagaattctcactgtgatatataaactcagacccaaacattaatcagttcttcaaatatctactcatcttcctaattaccatactaatcttagttaccgctaacaacctattccaactgttcatcggctgagagggcgtaggaattatatccttcttgctcatcagttgatgatacgcccgagcagatgccaacacagcagccattcaagcaatcctatacaaccgtatcggcgatatcggtttcatcctcgccttagcatgatttatcctacactccaactcatgagacccacaacaaatagcccttctaaacgctaatccaagcctcaccccactactaggcctcctcctagcagcagcaggcaaatcagcccaattaggtctccacccctgactcccctcagccatagaaggccccaccccagtctcagccctactccactcaagcactatagttgtagcaggaatcttcttactcatccgcttccaccccctagcagaaaatagcccactaatccaaactctaacactatgcttaggcgctatcaccactctgttcgcagcagtctgcgcccttacacaaaatgacatcaaaaaaatcgtagccttctccacttcaagtcaactaggactcataatagttacaatcggcatcaaccaaccacacctagcattcctgcacatctgtacccacgccttcttcaaagccatactatttatgtgctccgggtccatcatccacaaccttaacaatgaacaagatatccgaaaaataggaggactactcaaaaccatacctctcacttcaacctccctcaccattggcagcctagcattagcaggaatacctttcctcacaggtttctactccaaagaccacatcatcgaaaccgcaaacatatcatacacaaacgcctgagccctatctattactctcatcgctacctccctgacaagcgcctatagcactcgaataattcttctcaccctaacaggtcaacctcgcttccccacccttactaacattaacgaaaataaccccaccctactaaaccccattaaacgcctggcagccggaagcctattcgcaggatttctcattactaacaacatttcccccgcatcccccttccaaacaacaatccccctctacctaaaactcacagccctcgctgtcactttcctaggacttctaacagccctagacctcaactacctaaccaacaaacttaaaataaaatccccactatgcacattttatttctccaacatactcggattctaccctagcatcacacaccgcacaatcccctatctaggccttcttacgagccaaaacctgcccctactcctcctagacctaacctgactagaaaagctattacctaaaacaatttcacagcaccaaatctccacctccatcatcacctcaacccaaaaaggcataattaaactttacttcctctctttcttcttcccactcatcctaaccctactcctaatcacataacctattcccccgagcaatctcaattacaatatatacaccaacaaacaatgttcaaccagtaactactactaatcaacgcccataatcatacaaagcccccgcaccaataggatcctcccgaatcaaccctgacccctctccttcataaattattcagcttcctacactattaaagtttaccacaaccaccaccccatcatactctttcacccacagcaccaatcctacctccatcgctaaccccactaaaacactcaccaagacctcaacccctgacccccatgcctcaggatactcctcaatagccatcgctgtagtatatccaaagacaaccatcattccccctaaataaattaaaaaaactattaaacccatataacctcccccaaaattcagaataataacacacccgaccacaccgctaacaatcaatactaaacccccataaataggagaaggcttagaagaaaaccccacaaaccccattactaaacccacactcaacagaaacaaagcatacatcattattctcgcacggactacaaccacgaccaatgatatgaaaaaccatcgttgtatttcaactacaagaacaccaatgaccccaatacgcaaaactaaccccctaataaaattaattaaccactcattcatcgacctccccaccccatccaacatctccgcatgatgaaacttcggctcactccttggcgcctgcctgatcctccaaatcaccacaggactattcctagccatgcactactcaccagacgcctcaaccgccttttcatcaatcgcccacatcactcgagacgtaaattatggctgaatcatccgctaccttcacgccaatggcgcctcaatattctttatctgcctcttcctacacatcgggcgaggcctatattacggatcatttctctactcagaaacctgaaacatcggcattatcctcctgcttgcaactatagcaacagccttcataggctatgtcctcccgtgaggccaaatatcattctgaggggccacagtaattacaaacttactatccgccatcccatacattgggacagacctagttcaatgaatctgaggaggctactcagtagacagtcccaccctcacacgattctttacctttcacttcatcttgcccttcattattgcagccctagcagcactccacctcctattcttgcacgaaacgggatcaaacaaccccctaggaatcacctcccattccgataaaatcaccttccacccttactacacaatcaaagacgccctcggcttacttctcttccttctctccttaatgacattaacactattctcaccagacctcctaggcgacccagacaattataccctagccaaccccttaaacacccctccccacatcaagcccgaatgatatttcctattcgcctacacaattctccgatccgtccctaacaaactaggaggcgtccttgccctattactatccatcctcatcctagcaataatccccatcctccatatatccaaacaacaaagcataatatttcgcccactaagccaatcactttattgactcctagccgcagacctcctcattctaacctgaatcggaggacaaccagtaagctacccttttaccatcattggacaagtagcatccgtactatacttcacaacaatcctaatcctaataccaactatctccctaattgaaaacaaaatactcaaatgggcctgtccttgtagtataaactaatacaccagtcttgtaaaccggagatgaaaacctttttccaaggacaaatcagagaaaaagtctttaactccaccattagcacccaaagctaagattctaatttaaactattctctgttctttcatggggaagcagatttgggtaccacccaagtattgactcacccatcaacaaccgctatgtatttcgtacattactgccagccaccatgaatattgtacggtaccataaatacttgaccacctgtagtacataaaaacccaatccacatcaaaaccccctccccatgcttacaagcaagtacagtaatcaaccctcaactatcacacatgaactgcaactccaaagctacccctcacccactaggataccaacaaacctacccacccttaacagtacatagtacataaagccatttaccgtacatagcacattacagtcaaatcccttctcgtccccatggatgacccccctcagataggggtcccttgaccaccatcctccgtgaaatcaatatcccgcacaagagtgctactctcctcgctccgggcccataacacttgggggtagctaaagtgaactgtatccgacatctggttcctacttcagggccataaagcctaaatagcccacacgttccccttaaataagacatcacgatg

SEQ ID NO: 102 - DNA, 16570 bp, Homo sapiens mitochondrial
  3108: "n" refers to a nucleotide at position 3107 of the Cambridge Reference Sequence (CRS, Anderson et al. 1981 Nature 290:457-465), later determined to be absent from the human mtDNA sequence according to the revised CRS (rCRS, Andrews et al. 1999 Nature Genetics 23:147); "n" therefore represents a single nucleotide deletion at a position corresponding to nucleotide 3107 of SEQ ID NO:1 as provided herein.
gatcacaggtctatcaccctattaaccactcacgggagctctccatgcatttggtattttcgtctggggggtgtgcacgcgatagcattgcgagacgctggagccggagcaccctatgtcgcagtatctgtctttgattcctgcctcatcctattatttatcgcacctacgttcaatattacaggcgaacatacttactaaagtgtgttaattaattaatgcttgtaggacataataataacaattgaatgtctgcacagccgctttccacacagacatcataacaaaaaatttccaccaaaccccccctcccccgccttctggccacagcacttaaacacatctctgccaaaccccaaaaacaaagaaccctaacaccagcctaaccagatttcaaattttatcttttggcggtatgcacttttaacagtcaccccccaactaacacattattttcccctcccactcccatactactaatctcatcaatacaacccccgcccatcctacccagcacacacacaccgctgctaaccccataccccgaaccaaccaaaccccaaagacaccccccacagtttatgtagcttacctcctcaaagcaatacactgaaaatgtttagacgggctcacatcaccccataaacaaataggtttggtcctagcctttctattagctcttagtaagattacacatgcaagcatccccgttccagtgagttcaccctctaaatcaccacgatcaaaagggacaagcatcaagcacgcagcaatgcagctcaaaacgcttagcctagccacacccccacgggaaacagcagtgattaacctttagcaataaacgaaagtttaactaagctatactaaccccagggttggtcaatttcgtgccagccaccgcggtcacacgattaacccaagtcaatagaagccggcgtaaagagtgttttagatcaccccctccccaataaagctaaaactcacctgagttgtaaaaaactccagttgacacaaaatagactacgaaagtggctttaacatatctgaacacacaatagctaagacccaaactgggattagataccccactatgcttagccctaaacctcaacagttaaatcaacaaaactgctcgccagaacactacgagccacagcttaaaactcaaaggacctggcggtgcttcatatccctctagaggagcctgttctgtaatcgataaaccccgatcaacctcaccacctcttgctcagcctatataccgccatcttcagcaaaccctgatgaaggctacaaagtaagcgcaagtacccacgtaaagacgttaggtcaaggtgtagcccatgaggtggcaagaaatgggctacattttctaccccagaaaactacgatagcccttatgaaacttaagggtcgaaggtggatttagcagtaaactgagagtagagtgcttagttgaacagggccctgaagcgcgtacacaccgcccgtcaccctcctcaagtatacttcaaaggacatttaactaaaacccctacgcatttatatagaggagacaagtcgtaacatggtaagtgtactggaaagtgcacttggacgaaccagagtgtagcttaacacaaagcacccaacttacacttaggagatttcaacttaacttgaccgctctgagctaaacctagccccaaacccactccaccttactaccagacaaccttagccaaaccatttacccaaataaagtataggcgatagaaattgaaacctggcgcaatagatatagtaccgcaagggaaagatgaaaaattataaccaagcataatatagcaaggactaacccctataccttctgcataatgaattaactagaaataactttgcaaggagagccaaagctaagacccccgaaaccagacgagctacctaagaacagctaaaagagcacacccgtctatgtagcaaaatagtgggaagatttataggtagaggcgacaaacctaccgagcctggtgatagctggttgtccaagatagaatcttagttcaactttaaatttgcccacagaaccctctaaatccccttgtaaatttaactgttagtccaaagaggaacagctctttggacactaggaaaaaaccttgtagagagagtaaaaaatttaacacccatagtaggcctaaaagcagccaccaattaagaaagcgttcaagctcaacacccactacctaaaaaatcccaaacatataactgaactcctcacacccaattggaccaatctatcaccctatagaagaactaatgttagtataagtaacatgaaaacattctcctccgcataagcctgcgtcagattaaaacactgaactgacaattaacagcccaatatctacaatcaaccaacaagtcattattaccctcactgtcaacccaacacaggcatgctcataaggaaaggttaaaaaaagtaaaaggaactcggcaaatcttaccccgcctgtttaccaaaaacatcacctctagcatcaccagtattagaggcaccgcctgcccagtgacacatgtttaacggccgcggtaccctaaccgtgcaaaggtagcataatcacttgttccttaaatagggacctgtatgaatggctccacgagggttcagctgtctcttacttttaaccagtgaaattgacctgcccgtgaagaggcgggcataacacagcaagacgagaagaccctatggagctttaatttattaatgcaaacagtacctaacaaacccacaggtcctaaactaccaaacctgcattaaaaatttcggttggggcgacctcggagcagaacccaacctccgagcagtacatgctaagacttcaccagtcaaagcgaactactatactcaattgatccaataacttgaccaacggaacaagttaccctagggataacagcgcaatcctattctagagtccatatcaacaatagggtttacgacctcgatgttggatcaggacatcccaatggtgcagccgctattaaaggttcgtttgttcaacgattaaagtcctacgtgatctgagttcagaccggagtaatccaggtcggtttctatctacnttcaaattcctccctgtacgaaaggacaagagaaataaggcctacttcacaaagcgccttcccccgtaaatgatatcatctcaacttagtattatacccacacccacccaagaacagggtttgttaagatggcagagcccggtaatcgcataaaacttaaaactttacagtcagaggttcaattcctcttcttaacaacatacccatggccaacctcctactcctcattgtacccattctaatcgcaatggcattcctaatgcttaccgaacgaaaaattctaggctatatacaactacgcaaaggccccaacgttgtaggcccctacgggctactacaacccttcgctgacgccataaaactcttcaccaaagagcccctaaaacccgccacatctaccatcaccctctacatcaccgccccgaccttagctctcaccatcgctcttctactatgaacccccctccccatacccaaccccctggtcaacctcaacctaggcctcctatttattctagccacctctagcctagccgtttactcaatcctctgatcagggtgagcatcaaactcaaactacgccctgatcggcgcactgcgagcagtagcccaaacaatctcatatgaagtcaccctagccatcattctactatcaacattactaataagtggctcctttaacctctccacccttatcacaacacaagaacacctctgattactcctgccatcatgacccttggccataatatgatttatctccacactagcagagaccaaccgaacccccttcgaccttgccgaaggggagtccgaactagtctcaggcttcaacatcgaatacgccgcaggccccttcgccctattcttcatagccgaatacacaaacattattataataaacaccctcaccactacaatcttcctaggaacaacatatgacgcactctcccctgaactctacacaacatattttgtcaccaagaccctacttctaacctccctgttcttatgaattcgaacagcatacccccgattccgctacgaccaactcatacacctcctatgaaaaaacttcctaccactcaccctagcattacttatatgatatgtctccatacccattacaatctccagcattccccctcaaacctaagaaatatgtctgataaaagagttactttgatagagtaaataataggagcttaaacccccttatttctaggactatgagaatcgaacccatccctgagaatccaaaattctccgtgccacctatcacaccccatcctaaagtaaggtcagctaaataagctatcgggcccataccccgaaaatgttggttatacccttcccgtactaattaatcccctggcccaacccgtcatctactctaccatctttgcaggcacactcatcacagcgctaagctcgcactgattttttacctgagtaggcctagaaataaacatgctagcttttattccagttctaaccaaaaaaataaaccctcgttccacagaagctgccatcaagtatttcctcacgcaagcaaccgcatccataatccttctaatagctatcctcttcaacaatatactctccggacaatgaaccataaccaatactaccaatcaatactcatcattaataatcataatggctatagcaataaaactaggaatagccccctttcacttctgagtcccagaggttacccaaggcacccctctgacatccggcctgcttcttctcacatgacaaaaactagcccccatctcaatcatataccaaatctctccctcactaaacgtaagccttctcctcactctctcaatcttatccatcatagcaggcagttgaggtggattaaaccaaacccagctacgcaaaatcttagcatactcctcaattacccacataggatgaataatagcagttctaccgtacaaccctaacataaccattcttaatttaactatttatattatcctaactactaccgcattcctactactcaacttaaactccagcaccacgaccctactactatctcgcacctgaaacaagctaacatgactaacacccttaattccatccaccctcctctccctaggaggcctgcccccgctaaccggctttttgcccaaatgggccattatcgaagaattcacaaaaaacaatagcctcatcatccccaccatcatagccaccatcaccctccttaacctctacttctacctacgcctaatctactccacctcaatcacactactccccatatctaacaacgtaaaaataaaatgacagtttgaacatacaaaacccaccccattcctccccacactcatcgcccttaccacgctactcctacctatctccccttttatactaataatcttatagaaatttaggttaaatacagaccaagagccttcaaagccctcagtaagttgcaatacttaatttctgtaacagctaaggactgcaaaaccccactctgcatcaactgaacgcaaatcagccactttaattaagctaagcccttactagaccaatgggacttaaacccacaaacacttagttaacagctaagcaccctaatcaactggcttcaatctacttctcccgccgccgggaaaaaaggcgggagaagccccggcaggtttgaagctgcttcttcgaatttgcaattcaatatgaaaatcacctcggagctggtaaaaagaggcctaacccctgtctttagatttacagtccaatgcttcactcagccattttacctcacccccactgatgttcgccgaccgttgactattctctacaaaccacaaagacattggaacactatacctattattcggcgcatgagctggagtcctaggcacagctctaagcctccttattcgagccgagctgggccagccaggcaaccttctaggtaacgaccacatctacaacgttatcgtcacagcccatgcatttgtaataatcttcttcatagtaatacccatcataatcggaggctttggcaactgactagttcccctaataatcggtgcccccgatatggcgtttccccgcataaacaacataagcttctgactcttacctccctctctcctactcctgctcgcatctgctatagtggaggccggagcaggaacaggttgaacagtctaccctcccttagcagggaactactcccaccctggagcctccgtagacctaaccatcttctccttacacctagcaggtgtctcctctatcttaggggccatcaatttcatcacaacaattatcaatataaaaccccctgccataacccaataccaaacgcccctcttcgtctgatccgtcctaatcacagcagtcctacttctcctatctctcccagtcctagctgctggcatcactatactactaacagaccgcaacctcaacaccaccttcttcgaccccgccggaggaggagaccccattctataccaacacctattctgatttttcggtcaccctgaagtttatattcttatcctaccaggcttcggaataatctcccatattgtaacttactactccggaaaaaaagaaccatttggatacataggtatggtctgagctatgatatcaattggcttcctagggtttatcgtgtgagcacaccatatatttacagtaggaatagacgtagacacacgagcatatttcacctccgctaccataatcatcgctatccccaccggcgtcaaagtatttagctgactcgccacactccacggaagcaatatgaaatgatctgctgcagtgctctgagccctaggattcatctttcttttcaccgtaggtggcctgactggcattgtattagcaaactcatcactagacatcgtactacacgacacgtactacgttgtagcccacttccactatgtcctatcaataggagctgtatttgccatcataggaggcttcattcactgatttcccctattctcaggctacaccctagaccaaacctacgccaaaatccatttcactatcatattcatcggcgtaaatctaactttcttcccacaacactttctcggcctatccggaatgccccgacgttactcggactaccccgatgcatacaccacatgaaacatcctatcatctgtaggctcattcatttctctaacagcagtaatattaataattttcatgatttgagaagccttcgcttcgaagcgaaaagtcctaatagtagaagaaccctccataaacctggagtgactatatggatgccccccaccctaccacacattcgaagaacccgtatacataaaatctagacaaaaaaggaaggaatcgaaccccccaaagctggtttcaagccaaccccatggcctccatgactttttcaaaaaggtattagaaaaaccatttcataactttgtcaaagttaaattataggctaaatcctatatatcttaatggcacatgcagcgcaagtaggtctacaagacgctacttcccctatcatagaagagcttatcacctttcatgatcacgccctcataatcattttccttatctgcttcctagtcctgtatgcccttttcctaacactcacaacaaaactaactaatactaacatctcagacgctcaggaaatagaaaccgtctgaactatcctgcccgccatcatcctagtcctcatcgccctcccatccctacgcatcctttacataacagacgaggtcaacgatccctcccttaccatcaaatcaattggccaccaatggtactgaacctacgagtacaccgactacggcggactaatcttcaactcctacatacttcccccattattcctagaaccaggcgacctgcgactccttgacgttgacaatcgagtagtactcccgattgaagcccccattcgtataataattacatcacaagacgtcttgcactcatgagctgtccccacattaggcttaaaaacagatgcaattcccggacgtctaaaccaaaccactttcaccgctacacgaccgggggtatactacggtcaatgctctgaaatctgtggagcaaaccacagtttcatgcccatcgtcctagaattaattcccctaaaaatctttgaaatagggcccgtatttaccctatagcaccccctctaccccctctagagcccactgtaaagctaacttagcattaaccttttaagttaaagattaagagaaccaacacctctttacagtgaaatgccccaactaaatactaccgtatggcccaccataattacccccatactccttacactattcctcatcacccaactaaaaatattaaacacaaactaccacctacctccctcaccaaagcccataaaaataaaaaattataacaaaccctgagaaccaaaatgaacgaaaatctgttcgcttcattcattgcccccacaatcctaggcctacccgccgcagtactgatcattctatttccccctctattgatccccacctccaaatatctcatcaacaaccgactaatcaccacccaacaatgactaatcaaactaacctcaaaacaaatgataaccatacacaacactaaaggacgaacctgatctcttatactagtatccttaatcatttttattgccacaactaacctcctcggactcctgcctcactcatttacaccaaccacccaactatctataaacctagccatgaccatccccttatgagcgggcgcagtgattataggctttcgctctaagattaaaaatgccctagcccacttcttaccacaaggcacacctacaccccttatccccatactagttattatcgaaaccatcagcctactcattcaaccaatagccctggccgtacgcctaaccgctaacattactgcaggccacctactcatgcacctaattggaagcgccaccctagcaatatcaaccattaaccttccctctacacttatcatcttcacaattctaattctactgactatcctagaaatcgctgtcgccttaatccaagcctacgttttcacacttctagtaagcctctacctgcacgacaacacataatgacccaccaatcacatgcctatcatatagtaaaacccagcccatgacccctaacaggggccctctcagccctcctaatgacctccggcctagccatgtgatttcacttccactccataacgctcctcatactaggcctactaaccaacacactaaccatataccaatgatggcgcgatgtaacacgagaaagcacataccaaggccaccacacaccacctgtccaaaaaggccttcgatacgggataatcctatttattacctcagaagtttttttcttcgcaggatttttctgagccttttaccactccagcctagcccctaccccccaattaggagggcactggcccccaacaggcatcaccccgctaaatcccctagaagtcccactcctaaacacatccgtattactcgcatcaggagtatcaatcacctgagctcaccatagtctaatagaaaacaaccgaaaccaaataattcaagcactgcttattacaattttactgggtctctattttaccctcctacaagcctcagagtacttcgagtctcccttcaccatttccgacggcatctacggctcaacattttttgtagccacaggcttccacggacttcacgtcattattggctcaactttcctcactatctgcttcatccgccaactaatatttcactttacatccaaacatcactttggcttcgaagccgccgcctgatactggcattttgtagatgtggtttgactatttctgtatgtctccatctattgatgagggtcttactcttttagtataaatagtaccgttaacttccaattaactagttttgacaacattcaaaaaagagtaataaacttcgccttaattttaataatcaacaccctcctagccttactactaataattattacattttgactaccacaactcaacggctacatagaaaaatccaccccttacgagtgcggcttcgaccctatatcccccgcccgcgtccctttctccataaaattcttcttagtagctattaccttcttattatttgatctagaaattgccctccttttacccctaccatgagccctacaaacaactaacctgccactaatagttatgtcatccctcttattaatcatcatcctagccctaagtctggcctatgagtgactacaaaaaggattagactgaaccgaattggtatatagtttaaacaaaacgaatgatttcgactcattaaattatgataatcatatttaccaaatgcccctcatttacataaatattatactagcatttaccatctcacttctaggaatactagtatatcgctcacacctcatatcctccctactatgcctagaaggaataatactatcgctgttcattatagctactctcataaccctcaacacccactccctcttagccaatattgtgcctattgccatactagtctttgccgcctgcgaagcagcggtgggcctagccctactagtctcaatctccaacacatatggcctagactacgtacataacctaaacctactccaatgctaaaactaatcgtcccaacaattatattactaccactgacatgactttccaaaaaacacataatttgaatcaacacaaccacccacagcctaattattagcatcatccctctactattttttaaccaaatcaacaacaacctatttagctgttccccaaccttttcctccgaccccctaacaacccccctcctaatactaactacctgactcctacccctcacaatcatggcaagccaacgccacttatccagtgaaccactatcacgaaaaaaactctacctctctatactaatctccctacaaatctccttaattataacattcacagccacagaactaatcatattttatatcttcttcgaaaccacacttatccccaccttggctatcatcacccgatgaggcaaccagccagaacgcctgaacgcaggcacatacttcctattctacaccctagtaggctcccttcccctactcatcgcactaatttacactcacaacaccctaggctcactaaacattctactactcactctcactgcccaagaactatcaaactcctgagccaacaacttaatatgactagcttacacaatagcttttatagtaaagatacctctttacggactccacttatgactccctaaagcccatgtcgaagcccccatcgctgggtcaatagtacttgccgcagtactcttaaaactaggcggctatggtataatacgcctcacactcattctcaaccccctgacaaaacacatagcctaccccttccttgtactatccctatgaggcataattataacaagctccatctgcctacgacaaacagacctaaaatcgctcattgcatactcttcaatcagccacatagccctcgtagtaacagccattctcatccaaaccccctgaagcttcaccggcgcagtcattctcataatcgcccacgggcttacatcctcattactattctgcctagcaaactcaaactacgaacgcactcacagtcgcatcataatcctctctcaaggacttcaaactctactcccactaatagctttttgatgacttctagcaagcctcgctaacctcgccttaccccccactattaacctactgggagaactctctgtgctagtaaccacgttctcctgatcaaatatcactctcctacttacaggactcaacatactagtcacagccctatactccctctacatatttaccacaacacaatggggctcactcacccaccacattaacaacataaaaccctcattcacacgagaaaacaccctcatgttcatacacctatcccccattctcctcctatccctcaaccccgacatcattaccgggttttcctcttgtaaatatagtttaaccaaaacatcagattgtgaatctgacaacagaggcttacgaccccttatttaccgagaaagctcacaagaactgctaactcatgcccccatgtctaacaacatggctttctcaacttttaaaggataacagctatccattggtcttaggccccaaaaattttggtgcaactccaaataaaagtaataaccatgcacactactataaccaccctaaccctgacttccctaattccccccatccttaccaccctcgttaaccctaacaaaaaaaactcatacccccattatgtaaaatccattgtcgcatccacctttattatcagtctcttccccacaacaatattcatgtgcctagaccaagaagttattatctcgaactgacactgagccacaacccaaacaacccagctctccctaagcttcaaactagactacttctccataatattcatccctgtagcattgttcgttacatggtccatcatagaattctcactgtgatatataaactcagacccaaacattaatcagttcttcaaatatctactcatcttcctaattaccatactaatcttagttaccgctaacaacctattccaactgttcatcggctgagagggcgtaggaattatatccttcttgctcatcagttgatgatacgcccgagcagatgccaacacagcagccattcaagcaatcctatacaaccgtatcggcgatatcggtttcatcctcgccttagcatgatttatcctacactccaactcatgagacccacaacaaatagcccttctaaacgctaatccaagcctcaccccactactaggcctcctcctagcagcagcaggcaaatcagcccaattaggtctccacccctgactcccctcagccatagaaggccccaccccagtctcagccctactccactcaagcactatagttgtagcaggaatcttcttactcatccgcttccaccccctagcagaaaatagcccactaatccaaactctaacactatgcttaggcgctatcaccactctgttcgcagcagtctgcgcccttacacaaaatgacatcaaaaaaatcgtagccttctccacttcaagtcaactaggactcataatagttacaatcggcatcaaccaaccacacctagcattcctgcacatctgtacccacgccttcttcaaagccatactatttatgtgctccgggtccatcatccacaaccttaacaatgaacaagatattcgaaaaataggaggactactcaaaaccatacctctcacttcaacctccctcaccattggcagcctagcattagcaggaatacctttcctcacaggtttctactccaaagaccacatcatcgaaaccgcaaacatatcatacacaaacgcctgagccctatctattactctcatcgctacctccctgacaagcgcctatagcactcgaataattcttctcaccctaacaggtcaacctcgcttccccacccttactaacattaacgaaaataaccccaccctactaaaccccattaaacgcctggcagccggaagcctattcgcaggatttctcattactaacaacatttcccccgcatcccccttccaaacaacaatccccctctacctaaaactcacagccctcgctgtcactttcctaggacttctaacagccctagacctcaactacctaaccaacaaacttaaaataaaatccccactatgcacattttatttctccaacatactcggattctaccctagcatcacacaccgcacaatcccctatctaggccttcttacgagccaaaacctgcccctactcctcctagacctaacctgactagaaaagctattacctaaaacaatttcacagcaccaaatctccacctccatcatcacctcaacccaaaaaggcataattaaactttacttcctctctttcttcttcccactcatcctaaccctactcctaatcacataacctattcccccgagcaatctcaattacaatatatacaccaacaaacaatgttcaaccagtaactactactaatcaacgcccataatcatacaaagcccccgcaccaataggatcctcccgaatcaaccctgacccctctccttcataaattattcagcttcctacactattaaagtttaccacaaccaccaccccatcatactctttcacccacagcaccaatcctacctccatcgctaaccccactaaaacactcaccaagacctcaacccctgacccccatgcctcaggatactcctcaatagccatcgctgtagtatatccaaagacaaccatcattccccctaaataaattaaaaaaactattaaacccatataacctcccccaaaattcagaataataacacacccgaccacaccgctaacaatcaatactaaacccccataaataggagaaggcttagaagaaaaccccacaaaccccattactaaacccacactcaacagaaacaaagcatacatcattattctcgcacggactacaaccacgaccaatgatatgaaaaaccatcgttgtatttcaactacaagaacaccaatgaccccaatacgcaaaactaaccccctaataaaattaattaaccactcattcatcgacctccccaccccatccaacatctccgcatgatgaaacttcggctcactccttggcgcctgcctgatcctccaaatcaccacaggactattcctagccatgcactactcaccagacgcctcaaccgccttttcatcaatcgcccacatcactcgagacgtaaattatggctgaatcatccgctaccttcacgccaatggcgcctcaatattctttatctgcctcttcctacacatcgggcgaggcctatattacggatcatttctctactcagaaacctgaaacatcggcattatcctcctgcttgcaactatagcaacagccttcataggctatgtcctcccgtgaggccaaatatcattctgaggggccacagtaattacaaacttactatccgccatcccatacattgggacagacctagttcaatgaatctgaggaggctactcagtagacagtcccaccctcacacgattctttacctttcacttcatcttgcccttcattattgcagccctagcagcactccacctcctattcttgcacgaaacgggatcaaacaaccccctaggaatcacctcccattccgataaaatcaccttccacccttactacacaatcaaagacgccctcggcttacttctcttccttctctccttaatgacattaacactattctcaccagacctcctaggcgacccagacaattataccctagccaaccccttaaacacccctccccacatcaagcccgaatgatatttcctattcgcctacacaattctccgatccgtccctaacaaactaggaggcgtccttgccctattactatccatcctcatcctagcaataatccccatcctccatatatccaaacaacaaagcataatatttcgcccactaagccaatcactttattgactcctagccgcagacctcctcattctaacctgaatcggaggacaaccagtaagctacccttttatcatcattggacaagtagcatccgtactatacttcacaacaatcctaatcctaataccaactatctccctaattgaaaacaaaatactcaaatgggcctgtccttgtagtataaactaatacaccagtcttgtaaaccggagatgaaaacctttttccaaggacaaatcagagaaaaagtctttaactccaccattagcacccaaagctaagattctaatttaaactattctctgttctttcatggggaagcagatttgggtaccacccaagtattgactcacccatcaacaaccgctatgtatttcgtacattactgccagccaccatgaatattgtacggtaccataaatacttgaccacctgtagtacatgaaaacccaatccacatcaaaaccccctccccatgcttacaagcaagtacagcaatcaaccctcaactatcacacatcaactgcaactccaaagccacccctcacccactaggataccaacaaacctacccacccttaacagtacatagtacataaagccatttaccgtacatagcacattacagtcaaatcccttctcgtccccatggatgacccccctcagataggggtcccttgaccaccatcctccgtgaaatcaatatcccgcacaagagtgctactctcctcgctccgggcccataacacttgggggtagctaaagtgaactgtatccgacatctggttcctacttcagggccataaagcctaaatagcccacacgttccccttaaataagacatcacgatg

SEQ ID NO: 103 - DNA, 16570 bp, Homo sapiens mitochondrial
  3108: "n" refers to a nucleotide at position 3107 of the Cambridge Reference Sequence (CRS, Anderson et al. 1981 Nature 290:457-465), later determined to be absent from the human mtDNA sequence according to the revised CRS (rCRS, Andrews et al. 1999 Nature Genetics 23:147); "n" therefore represents a single nucleotide deletion at a position corresponding to nucleotide 3107 of SEQ ID NO:1 as provided herein.
gatcacaggtctatcaccctattaaccactcacgggagctctccatgcatttggtattttcgtctggggggtatgcacgcgatagcattgcgagacgctggagccggagcaccctatgtcgcagtatctgtctttgattcctgcctcatcctattatttatcgcacctacgttcaatattacaggcgaacatacttactaaagtgtgttaattaattaatgcttgtaggacataataataacaattgaatgtctgcacagccgctttccacacagacatcataacaaaaaatttccaccaaaccccccctcccccgccttctggccacagcacttaaacacatctctgccaaaccccaaaaacaaagaaccctaacaccagcctaaccagatttcaaattttatcttttggcggtatgcacttttaacagtcaccccccaactaacacattattttcccctcccactcccatactaccaatctcatcaatacaacccccgcccatcctacccagcacacacacaccgctgctaaccccataccccgaaccaaccaaaccccaaagacaccccccacagtttatgtagcttacctcctcaaagcaatacactgaaaatgtttagacgggctcacatcaccccataaacaaataggtttggtcctagcctttctattagctcttagtaagattacacatgcaagcatccccgttccagtgagttcaccctctaaatcaccacgatcaaaagggacaagcatcaagcacgcagcaatgcagctcaaaacgcttagcctagccacacccccacgggaaacagcagtgattaacctttagcaataaacgaaagtttaactaagctatactaaccccagggttggtcaatttcgtgccagccaccgcggtcacacgattaacccaagtcaatagaagccggcgtaaagagtgttttagatcaccccctccccaataaagctaaaactcacctgagttgtaaaaaactccagttgacacaaaatagactacgaaagtggctttaacatatctgaacacacaatagctaagacccaaactgggattagataccccactatgcttagccctaaacctcaacagttaaatcaacaaaactgctcgccagaacactacgagccacagcttaaaactcaaaggacctggcggtgcttcatatccctctagaggagcctgttctgtaatcgataaaccccgatcaacctcaccacctcttgctcagcctatataccgccatcttcagcaaaccctgatgaaggctacaaagtaagcgcaagtacccacgtaaagacgttaggtcaaggtgtagcccatgaggtggcaagaaatgggctacattttctaccccagaaaactacgatagcccttatgaaacttaagggtcgaaggtggatttagcagtaaactgagagtagagtgcttagttgaacagggccctgaagcgcgtacacaccgcccgtcaccctcctcaagtatacttcaaaggacatttaactaaaacccctacgcatttatatagaggagacaagtcgtaacatggtaagtgtactggaaagtgcacttggacgaaccagagtgtagcttaacacaaagcacccaacttacacttaggagatttcaacttaacttgaccgctctgagctaaacctagccccaaacccactccaccttactaccagacaaccttagccaaaccatttacccaaataaagtataggcgatagaaattgaaacctggcgcaatagatatagtaccgcaagggaaagatgaaaaattataaccaagcataatatagcaaggactaacccctataccttctgcataatgaattaactagaaataactttgcaaggagagccaaagctaagacccccgaaaccagacgagctacctaagaacagctaaaagagcacacccgtctatgtagcaaaatagtgggaagatttataggtagaggcgacaaacctaccgagcctggtgatagctggttgtccaagatagaatcttagttcaactttaaatttgcccacagaaccctctaaatccccttgtaaatttaactgttagtccaaagaggaacagctctttggacactaggaaaaaaccttgtagagagagtaaaaaatttaacacccatagtaggcctaaaagcagccaccaattaagaaagcgttcaagctcaacacccactacctaaaaaatcccaaacatataactgaactcctcacacccaattggaccaatctatcaccctatagaagaactaatgttagtataagtaacatgaaaacattctcctccgcataagcctgcgtcagattaaaacactgaactgacaattaacagcccaatatctacaatcaaccaacaagtcattattaccctcactgtcaacccaacacaggcatgctcataaggaaaggttaaaaaaagtaaaaggaactcggcaaatcttaccccgcctgtttaccaaaaacatcacctctagcatcaccagtattagaggcaccgcctgcccagtgacacatgtttaacggccgcggtaccctaaccgtgcaaaggtagcataatcacttgttccttaaatagggacctgtatgaatggctccacgagggttcagctgtctcttacttttaaccagtgaaattgacctgcccgtgaagaggcgggcataacacagcaagacgagaagaccctatggagctttaatttattaatgcaaacagtacctaacaaacccacaggtcctaaactaccaaacctgcattaaaaatttcggttggggcgacctcggagcagaacccaacctccgagcagtacatgctaagacttcaccagtcaaagcgaactactatactcaattgatccaataacttgaccaacggaacaagttaccctagggataacagcgcaatcctattctagagtccatatcaacaatagggtttacgacctcgatgttggatcaggacatcccaatggtgcagccgctattaaaggttcgtttgttcaacgattaaagtcctacgtgatctgagttcagaccggagtaatccaggtcggtttctatctacnttcaaattcctccctgtacgaaaggacaagagaaataaggcctacttcacaaagcgccttcccccgtaaatgatatcatctcaacttagtattatacccacacccacccaagaacagggtttgttaagatggcagagcccggtaatcgcataaaacttaaaactttacagtcagaggttcaattcctcttcttaacaacatacccatggccaacctcctactcctcattgtacccattctaatcgcaatggcattcctaatgcttaccgaacgaaaaattctaggctatatacaactacgcaaaggccccaacgttgtaggcccctacgggctactacaacccttcgctgacgccataaaactcttcaccaaagagcccctaaaacccgccacatctaccatcaccctctacatcaccgccccaaccttagctctcaccatcgctcttctactatgaacccccctccccatacccaaccccctggtcaacctcaacctaggcctcctatttattctagccacctctagcctagccgtttactcaatcctctgatcagggtgagcatcaaactcaaactacgccctgatcggcgcactgcgagcagtagcccaaacaatctcatatgaagtcaccctagccatcattctactatcaacattactaataagtggctcctttaacctctccacccttatcacaacacaagaacacctctgattactcctgccatcatgacccttggccataatatgatttatctccacactagcagagaccaaccgaacccccttcgaccttgccgaaggggagtccgaactagtctcaggcttcaacatcgaatacgccgcaggccccttcgccctattcttcatagccgaatacacaaacattattataataaacaccctcaccactacaatcttcctaggaacaacatatgacgcactctcccctgaactctacacaacatattttgtcaccaagaccctacttctaacctccctgttcttatgaattcgaacagcatacccccgattccgctacgaccaactcatacacctcctatgaaaaaacttcctaccactcaccctagcattacttatatgatatgtctccatacccattacaatctccagcattccccctcaaacctaagaaatatgtctgataaaagagttactttgatagagtaaataataggagcttaaacccccttatttctaggactatgagaatcgaacccatccctgagaatccaaaattctccgtgccacctatcacaccccatcctaaagtaaggtcagctaaataagctatcgggcccataccccgaaaatgttggttatacccttcccgtactaattaatcccctggcccaacccgtcatctactctaccatctttgcaggcacactcatcacagcgctaagctcgcactgattttttacctgagtaggcctagaaataaacatgctagcttttattccagttctaaccaaaaaaataaaccctcgttccacagaagctgccatcaagtatttcctcacgcaagcaaccgcatccataatccttctaatagctatcctcttcaacaatatactctccggacaatgaaccataaccaatactaccaatcaatactcatcattaataatcataatggctatagcaataaaactaggaatagccccctttcacttctgagtcccagaggttacccaaggcacccctctgacatccggcctgcttcttctcacatgacaaaaactagcccccatctcaatcatataccaaatctctccctcactaaacgtaagccttctcctcactctctcaatcttatccatcatagcaggcagttgaggtggattaaaccaaacccagctacgcaaaatcttagcatactcctcaattacccacataggatgaataatagcagttctaccgtacaaccctaacataaccattcttaatttaactatttatattatcctaactactaccgcattcctactactcaacttaaactccagcaccacgaccctactactatctcgcacctgaaacaagctaacatgactaacacccttaattccatccaccctcctctccctaggaggcctgcccccgctaaccggctttttgcccaaatgggccattatcgaagaattcacaaaaaacaatagcctcatcatccccaccatcatagccaccatcaccctccttaacctctacttctacctacgcctaatctactccacctcaatcacactactccccatatctaacaacgtaaaaataaaatgacagtttgaacatacaaaacccaccccattcctccccacactcatcgcccttaccacgctactcctacctatctccccttttatactaataatcttatagaaatttaggttaaatacagaccaagagccttcaaagccctcagtaagttgcaatacttaatttctgtaacagctaaggactgcaaaaccccactctgcatcaactgaacgcaaatcagccactttaattaagctaagcccttactagaccaatgggacttaaacccacaaacacttagttaacagctaagcaccctaatcaactggcttcaatctacttctcccgccgccgggaaaaaaggcgggagaagccccggcaggtttgaagctgcttcttcgaatttgcaattcaatatgaaaatcacctcggagctggtaaaaagaggcctaacccctgtctttagatttacagtccaatgcttcactcagccattttacctcacccccactgatgttcgccgaccgttgactattctctacaaaccacaaagacattggaacactatacctattattcggcgcatgagctggagtcctaggcacagctctaagcctccttattcgagccgagctgggccagccaggcaaccttctaggtaacgaccacatctacaacgttatcgtcacagcccatgcatttgtaataatcttcttcatagtaatacccatcataatcggaggctttggcaactgactagttcccctaataatcggtgcccccgatatggcgtttccccgcataaacaacataagcttctgactcttacctccctctctcctactcctgctcgcatctgctatagtggaggccggagcaggaacaggttgaacagtctaccctcccttagcagggaactactcccaccctggagcctccgtagacctaaccatcttctccttacacctagcaggtgtctcctctatcttaggggccatcaatttcatcacaacaattatcaatataaaaccccctgccataacccaataccaaacgcccctcttcgtctgatccgtcctaatcacagcagtcctacttctcctatctctcccagtcctagctgctggcatcactatactactaacagaccgcaacctcaacaccaccttcttcgaccccgccggaggaggagaccccattctataccaacacctattctgatttttcggtcaccctgaagtttatattcttatcctaccaggcttcggaataatctcccatattgtaacttactactccggaaaaaaagaaccatttggatacataggtatggtctgagctatgatatcaattggcttcctagggtttatcgtgtgagcacaccatatatttacagtaggaatagacgtagacacacgagcatatttcacctccgctaccataatcatcgctatccccaccggcgtcaaagtatttagctgactcgccacactccacggaagcaatatgaaatgatctgctgcagtgctctgagccctaggattcatctttcttttcaccgtaggtggcctgactggcattgtattagcaaactcatcactagacatcgtactacacgacacgtactacgttgtagcccacttccactatgtcctatcaataggagctgtatttgccatcataggaggcttcattcactgatttcccctattctcaggctacaccctagaccaaacctacgccaaaatccatttcactatcatattcatcggcgtaaatctaactttcttcccacaacactttctcggcctatccggaatgccccgacgttactcggactaccccgatgcatacaccacatgaaacatcctatcatctgtaggctcattcatttctctaacagcagtaatattaataattttcatgatttgagaagccttcgcttcgaagcgaaaagtcctaatagtagaagaaccctccataaacctggagtgactatatggatgccccccaccctaccacacattcgaagaacccgtatacataaaatctagacaaaaaaggaaggaatcgaaccccccaaagctggtttcaagccaaccccatggcctccatgactttttcaaaaaggtattagaaaaaccatttcataactttgtcaaagttaaattataggctaaatcctatatatcttaatggcacatgcagcgcaagtaggtctacaagacgctacttcccctatcatagaagagcttatcacctttcatgatcacgccctcataatcattttccttatctgcttcctagtcctgtatgcccttttcctaacactcacaacaaaactaactaatactaacatctcagacgctcaggaaatagaaaccgtctgaactatcctgcccgccatcatcctagtcctcatcgccctcccatccctacgcatcctttacataacagacgaggtcaacgatccctcccttaccatcaaatcaattggccaccaatggtactgaacctacgagtacaccgactacggcggactaatcttcaactcctacatacttcccccattattcctagaaccaggcgacctgcgactccttgacgttgacaatcgagtagtactcccgattgaagcccccattcgtataataattacatcacaagacgtcttgcactcatgagctgtccccacattaggcttaaaaacagatgcaattcccggacgtctaaaccaaaccactttcaccgctacacgaccgggggtatactacggtcaatgctctgaaatctgtggagcaaaccacagtttcatgcccatcgtcctagaattaattcccctaaaaatctttgaaatagggcccgtatttaccctatagcaccccctctaccccctctagagcccactgtaaagctaacttagcattaaccttttaagttaaagattaagagaaccaacacctctttacagtgaaatgccccaactaaatactaccgtatggcccaccataattacccccatactcattacactattcctcatcacccaactaaaaatattaaacacaaactaccacctacctccctcaccaaagcccataaaaataaaaaattataacaaaccctgagaaccaaaatgaacgaaaatctgttcgcttcattcattgcccccacaatcctaggcctacccgccgcagtactgatcattctatttccccctctattgatccccacctccaaatatctcatcaacaaccgactaatcaccacccaacaatgactaatcaaactaacctcaaaacaaatgataaccatacacaacactaaaggacgaacctgatctcttatactagtatccttaatcatttttattgccacaactaacctcctcggactcctgcctcactcatttacaccaaccacccaactatctataaacctagccatggccatccccttatgagcgggcgcagtgattataggctttcgctctaagattaaaaatgccctagcccacttcttaccacaaggcacacctacaccccttatccccatactagttattatcgaaaccatcagcctactcattcaaccaatagccctggccgtacgcctaaccgctaacattactgcaggccacctactcatgcacctaattggaagcgccaccctagcaatatcaaccattaaccttccctctacacttatcatcttcacaattctaattctactgactatcctagaaatcgctgtcgccttaatccaagcctacgttttcacacttctagtaagcctctacctgcacgacaacacataatgacccaccaatcacatgcctatcatatagtaaaacccagcccatgacccctaacaggggccctctcagccctcctaatgacctccggcctagccatgtgatttcacttccactccataacgctcctcatactaggcctactaaccaacacactaaccatataccaatgatggcgcgatgtaacacgagaaagcacataccaaggccaccacacaccacctgtccaaaaaggccttcgatacgggataatcctatttattacctcagaagtttttttcttcgcaggatttttctgagccttttaccactccagcctagcccctaccccccaattaggagggcactggcccccaacaggcatcaccccgctaaatcccctagaagtcccactcctaaacacatccgtattactcgcatcaggagtatcaatcacctgagctcaccatagtctaatagaaaacaaccgaaaccaaataattcaagcactgcttattacaattttactgggtctctattttaccctcctacaagcctcagagtacttcgagtctcccttcaccatttccgacggcatctacggctcaacattttttgtagccacaggcttccacggacttcacgtcattattggctcaactttcctcactatctgcttcatccgccaactaatatttcactttacatccaaacatcactttggcttcgaagccgccgcctgatactggcattttgtagatgtggtttgactatttctgtatgtctccatctattgatgagggtcttactcttttagtataaatagtaccgttaacttccaattaactagttttgacaacattcaaaaaagagtaataaacttcgccttaattttaataatcaacaccctcctagccttactactaataattattacattttgactaccacaactcaacggctacatagaaaaatccaccccttacgagtgcggcttcgaccctatatcccccgcccgcgtccctttctccataaaattcttcttagtagctattaccttcttattatttgatctagaaattgccctccttttacccctaccatgagccctacaaacaactaacctgccactaatagttatgtcatccctcttattaatcatcatcctagccctaagtctggcctatgagtgactacaaaaaggattagactgaaccgaattggtatatagtttaaacaaaacgaatgatttcgactcattaaattatgataatcatatttaccaaatgcccctcatttacataaatattatactagcatttaccatctcacttctaggaatactagtatatcgctcacacctcatatcctccctactatgcctagaaggaataatactatcgctgttcattatagctactctcataaccctcaacacccactccctcttagccaatattgtgcctattgccatactagtctttgccgcctgcgaagcagcggtgggcctagccctactagtctcaatctccaacacatatggcctagactacgtacataacctaaacctactccaatgctaaaactaatcgtcccaacaattatattactaccactgacatgactttccaaaaaacacataatttgaatcaacacaaccacccacagcctaattattagcatcatccctctactattttttaaccaaatcaacaacaacctatttagctgttccccaaccttttcctccgaccccctaacaacccccctcctaatactaactacctgactcctacccctcacaatcatggcaagccaacgccacttatccagtgaaccactatcacgaaaaaaactctacctctctatactaatctccctacaaatctccttaattataacattcacagccacagaactaatcatattttatatcttcttcgaaaccacacttatccccaccttggctatcatcacccgatgaggcaaccagccagaacgcctgaacgcaggcacatacttcctattctacaccctagtaggctcccttcccctactcatcgcactaatttacactcacaacaccctaggctcactaaacattctactactcactctcactgcccaagaactatcaaactcctgagccaacaacttaatatgactagcttacacaatagcttttatagtaaagatacctctttacggactccacttatgactccctaaagcccatgtcgaagcccccatcgctgggtcaatagtacttgccgcagtactcttaaaactaggcggctatggtataatacgcctcacactcattctcaaccccctgacaaaacacatagcctaccccttccttgtactatccctatgaggcataattataacaagctccatctgcctacgacaaacagacctaaaatcgctcattgcatactcttcaatcagccacatagccctcgtagtaacagccattctcatccaaaccccctgaagcttcaccggcgcagtcattctcataatcgcccacgggcttacatcctcattactattctgcctagcaaactcaaactacgaacgcactcacagtcgcatcataatcctctctcaaggacttcaaactctactcccactaatagctttttgatgacttctagcaagcctcgctaacctcgccttaccccccactattaacctactgggagaactctctgtgctagtaaccacgttctcctgatcaaatatcactctcctacttacaggactcaacatactagtcacagccctatactccctctacatatttaccacaacacaatggggctcactcacccaccacattaacaacataaaaccctcattcacacgagaaaacaccctcatgttcatacacctatcccccattctcctcctatccctcaaccccgacatcattaccgggttttcctcttgtaaatatagtttaaccaaaacatcagattgtgaatctgacaacagaggcttacgaccccttatttaccgagaaagctcacaagaactgctaactcatgcccccatgtctaacaacatggctttctcaacttttaaaggataacagctatccattggtcttaggccccaaaaattttggtgcaactccaaataaaagtaataaccatgcacactactataaccaccctaaccctgacttccctaattccccccatccttaccaccctcgttaaccctaacaaaaaaaactcatacccccattatgtaaaatccattgtcgcatccacctttattatcagtctcttccccacaacaatattcatgtgcctagaccaagaagttattatctcgaactgacactgagccacaacccaaacaacccagctctccctaagcttcaaactagactacttctccataatattcatccctgtagcattgttcgttacatggtccatcatagaattctcactgtgatatataaactcagacccaaacattaatcagttcttcaaatatctactcatcttcctaattaccatactaatcttagttaccgctaacaacctattccaactgttcatcggctgagagggcgtaggaattatatccttcttgctcatcagttgatgatacgcccgagcagatgccaacacagcagccattcaagcaatcctatacaaccgtatcggcgatatcggtttcatcctcgccttagcatgatttatcctacactccaactcatgagacccacaacaaatagcccttctaaacgctaatccaagcctcaccccactactaggcctcctcctagcagcagcaggcaaatcagcccaattaggtctccacccctgactcccctcagccatagaaggccccaccccagtctcagccctactccactcaagcactatagttgtagcaggaatcttcttactcatccgcttccaccccctagcagaaaatagcccactaatccaaactctaacactatgcttaggcgctatcaccactctgttcgcagcagtctgcgcccttacacaaaatgacatcaaaaaaatcgtagccttctccacttcaagtcaactaggactcataatagttacaatcggcatcaaccaaccacacctagcattcctgcacatctgtacccacgccttcttcaaagccatactatttatgtgctccgggtccatcatccacaaccttaacaatgaacaagatattcgaaaaataggaggactactcaaaaccatacctctcacttcaacctccctcaccattggcagcctagcattagcaggaatacctttcctcacaggtttctactccaaagaccacatcatcgaaaccgcaaacatatcatacacaaacgcctgagccctatctattactctcatcgctacctccctgacaagcgcctatagcactcgaataattcttctcaccctaacaggtcaacctcgcttccccacccttactaacattaacgaaaataaccccaccctactaaaccccattaaacgcctggcagccggaagcctattcgcaggatttctcattactaacaacatttcccccgcatcccccttccaaacaacaatccccctctacctaaaactcacagccctcgctgtcactttcctaggacttctaacagccctagacctcaactacctaaccaacaaacttaaaataaaatccccactatgcacattttatttctccaacatactcggattctaccctagcatcacacaccgcacaatcccctatctaggccttcttacgagccaaaacctgcccctactcctcctagacctaacctgactagaaaagctattacctaaaacaatttcacagcaccaaatctccacctccatcatcacctcaacccaaaaaggcataattaaactttacttcctctctttcttcttcccactcatcctaaccctactcctaatcacataacctattcccccgagcaatctcaattacaatatatacaccaacaaacaatgttcaaccagtaactactactaatcaacgcccataatcatacaaagcccccgcaccaataggatcctcccgaatcaaccctgacccctctccttcataaattattcagcttcctacactattaaagtttaccacaaccaccaccccatcatactctttcacccacagcaccaatcctacctccatcgctaaccccactaaaacactcaccaagacctcaacccctgacccccatgcctcaggatactcctcaatagccatcgctgtagtatatccaaagacaaccatcattccccctaaataaattaaaaaaactattaaacccatataacctcccccaaaattcagaataataacacacccgaccacaccgctaacaatcaatactaaacccccataaataggagaaggcttagaagaaaaccccacaaaccccattactaaacccacactcaacagaaacaaagcatacatcattattctcgcacggactacaaccacgaccaatgatatgaaaaaccatcgttgtatttcaactacaagaacaccaatgaccccaatacgcaaaactaaccccctaataaaattaattaaccactcattcatcgacctccccaccccatccaacatctccgcatgatgaaacttcggctcactccttggcgcctgcctgatcctccaaatcaccacaggactattcctagccatgcactactcaccagacgcctcaaccgccttttcatcaatcgcccacatcactcgagacgtaaattatggctgaatcatccgctaccttcacgccaatggcgcctcaatattctttatctgcctcttcctacacatcgggcgaggcctatattacggatcatttctctactcagaaacctgaaacatcggcattatcctcctgcttgcaactatagcaacagccttcataggctatgtcctcccgtgaggccaaatatcattctgaggggccacagtaattacaaacttactatccgccatcccatacattgggacagacctagttcaatgaatctgaggaggctactcagtagacagtcccaccctcacacgattctttacctttcacttcatcttgcccttcattattgcagccctagcagcactccacctcctattcttgcacgaaacgggatcaaacaaccccctaggaatcacctcccattccgataaaatcaccttccacccttactacacaatcaaagacgccctcggcttacttctcttccttctctccttaatgacattaacactattctcaccagacctcctaggcgacccagacaattataccctagccaaccccttaaacacccctccccacatcaagcccgaatgatatttcctattcgcctacacaattctccgatccgtccctaacaaactaggaggcgtccttgccctattactatccatcctcatcctagcaataatccccatcctccatatatccaaacaacaaagcataatatttcgcccactaagccaatcactttattgactcctagccgcagacctcctcattctaacctgaatcggaggacaaccagtaagctacccttttaccatcattggacaagtagcatccgtactatacttcacaacaatcctaatcctaataccaactatctccctaattgaaaacaaaatactcaaatgggcctgtccttgtagtataaactaatacaccagtcttgtaaaccggagatgaaaacctttttccaaggacaaatcagagaaaaagtctttaactccaccattagcacccaaagctaagattctaatttaaactattctctgttctttcatggggaagcagatttgggtaccacccaagtattgactcacccatcaacaaccgctatgtatttcgtacattactgccagccaccatgaatattgtacggtaccataaatacttgaccacctgtagtacataaaaacccaatccacatcaaaaccccctccccatgcttacaagcaagtacagcaatcaaccctcaactatcacacatcaactgcaactccaaagccacccctcacccactaggataccaacaaacctacccacccttaacagtacatagtacataaagccatttaccgtacatagcacattacagtcaaatcccttctcgtccccatggatgacccccctcagataggggtcccttgaccaccatcctccgtgaaatcaatatcccgcacaagagtgctactctcctcgctccgggcccataacacttgggggtagctaaagtgaactgtatccgacatctggttcctacttcagggccataaagcctaaatagcccacacgttccccttaaataagacatcacgatg

SEQ ID NO: 104 - DNA, 16561 bp, Homo sapiens mitochondrial
  3108: "n" refers to a nucleotide at position 3107 of the Cambridge Reference Sequence (CRS, Anderson et al. 1981 Nature 290:457-465), later determined to be absent from the human mtDNA sequence according to the revised CRS (rCRS, Andrews et al. 1999 Nature Genetics 23:147); "n" therefore represents a single nucleotide deletion at a position corresponding to nucleotide 3107 of SEQ ID NO:1 as provided herein.
gatcacaggtctatcaccctattaaccactcacgggagctctccatgcatttggtattttcgtctggggggtgtgcacgcgatagcattgcgagacgctggagccggagcaccctatgtcgcagtatctgtctttgattcctgcctcatcctattatttatcgcacctacgttcaatattacaggcgaacatacctactaaagtgtgttaattaattaatgcttgtaggacataataataacaattgaatgtctgcacagccgctttccacacagacatcataacaaaaaatttccaccaaaccccccctcccccgccttctggccacagcacttaaacacatctctgccaaaccccaaaaacaaagaaccctaacaccagcctaaccagatttcaaattttatcttttggcggtatgcacttttaacagtcaccccccaactaacacattattttcccctcccactcccatactactaatctcatcaatacaacccccgcccatcctacccagcacacacacaccgctgctaaccccataccccgaaccaaccaaaccccaaagacaccccccacagtttatgtagcttacctcctcaaagcaatacactgaaaatgtttagacgggctcacatcaccccataaacaaataggtttggtcctagcctttctattagctcttagtaagattacacatgcaagcatccccattccagtgagttcaccctctaaatcaccacgatcaaaagggacaagcatcaagcacgcagcaatgcagctcaaaacgcttagcctagccacacccccacgggaaacagcagtgattaacctttagcaataaacgaaagtttaactaagctatactaaccccagggttggtcaatttcgtgccagccaccgcggtcacacgattaacccaagtcaatagaagccggcgtaaagagtgttttagatcaccccctccccaataaagctaaaactcacctgagttgtaaaaaactccagttgacacaaaatagactacgaaagtggctttaacatatctgaacacacaatagctaagacccaaactgggattagataccccactatgcttagccctaaacctcaacagttaaatcaacaaaactgctcgccagaacactacgagccacagcttaaaactcaaaggacctggcggtgcttcatatccctctagaggagcctgttctgtaatcgataaaccccgatcaacctcaccacctcttgctcagcctatataccgccatcttcagcaaaccctgatgaaggctacaaagtaagcgcaagtacccacgtaaagacgttaggtcaaggtgtagcccatgaggtggcaagaaatgggctacattttctaccccagaaaactacgatagcccttatgaaacttaagggtcgaaggtggatttagcagtaaactgagagtagagtgcttagttgaacagggccctgaagcgcgtacacaccgcccgtcaccctcctcaagtatacttcaaaggacatttaactaaaacccctacgcatttatatagaggagacaagtcgtaacatggtaagtgtactggaaagtgcacttggacgaaccagagtgtagcttaacacaaagcacccaacttacacttaggagatttcaacttaacttgaccgctctgagctaaacctagccccaaacccactccaccttactaccagacaaccttagccaaaccatttacccaaataaagtataggcgatagaaattgaaacctggcgcaatagatatagtaccgcaagggaaagatgaaaaattataaccaagcataatatagcaaggactaacccctataccttctgcataatgaattaactagaaataactttgcaaggagaaccaaagctaagacccccgaaaccagacgagctacctaagaacagctaaaagagcacacccgtctatgtagcaaaatagtgggaagatttataggtagaggcgacaaacctaccgagcctggtgatagctggttgtccaagatagaatcttagttcaactttaaatttgcccacagaaccctctaaatccccttgtaaatttaactgttagtccaaagaggaacagctctttggacactaggaaaaaaccttgtagagagagtaaaaaatttaacacccatagtaggcctaaaagcagccaccaattaagaaagcgttcaagctcaacacccactacctaaaaaatcccaaacatataactgaactcctcacacccaattggaccaatctatcaccctatagaagaactaatgttagtataagtaacatgaaaacattctcctccgcataagcctgcgtcagattaaaacactgaactgacaattaacagcccaatatctacaatcaaccaacaagtcattattaccctcactgtcaacccaacacaggcatgctcataaggaaaggttaaaaaaagtaaaaggaactcggcaaatcttaccccgcctgtttaccaaaaacatcacctctagcatcaccagtattagaggcaccgcctgcccagtgacacatgtttaacggccgcggtaccctaaccgtgcaaaggtagcataatcacttgttccttaaatagggacctgtatgaatggctccacgagggttcagctgtctcttacttttaaccagtgaaattgacctgcccgtgaagaggcgggcatgacacagcaagacgagaagaccctatggagctttaatttattaatgcaaacagtacctaacaaacccacaggtcctaaactaccaaacctgcattaaaaatttcggttggggcgacctcggagcagaacccaacctccgagcagtacatgctaagacttcaccagtcaaagcgaactactatactcaattgatccaataacttgaccaacggaacaagttaccctagggataacagcgcaatcctattctagagtccatatcaacaatagggtttacgacctcgatgttggatcaggacatcccgatggtgcagccgctattaaaggttcgtttgttcaacgattaaagtcctacgtgatctgagttcagaccggagtaatccaggtcggtttctatctacnttcaaattcctccctgtacgaaaggacaagagaaataaggcctacttcacaaagcgccttcccccgtaaatgatatcatctcaacttagtattatacccacacccacccaagaacagggtttgttaagatggcagagcccggtaatcgcataaaacttaaaactttacagtcagaggttcaattcctcttcttaacaacatacccatggccaacctcctactcctcattgtacccattctaatcgcaatggcattcctaatgcttaccgaacgaaaaattctaggctatatacaactacgcaaaggccccaacgttgtaggcccctacgggctactacaacccttcgctgacgccataaaactcttcaccaaagagcccctaaaacccgccacatctaccatcaccctctacatcaccgccccgaccttagctctcaccatcgctcttctactatgaacccccctccccatacccaaccccctggtcaacctcaacctaggcctcctatttattctagccacctctagcctagccgtttactcaatcctctgatcagggtgagcatcaaactcaaactacgccctgatcggcgcactgcgagcagtagcccaaacaatctcatatgaagtcaccctagccatcattctactatcaacattactaataagtggctcctttaacctctccacccttatcacaacacaagaacacctctgattactcctgccatcatgacccttggccataatatgatttatctccacactagcagagaccaaccgaacccccttcgaccttgccgaaggggagtccgaactagtctcaggcttcaacatcgaatacgccgcaggccccttcgccctattcttcatagccgaatacacaaacattattataataaacaccctcaccactacaatcttcctaggaacaacatatgacgcactctcccctgaactctacacaacatattttgtcaccaagaccctacttctaacctccctgttcttatgaattcgaacagcatacccccgattccgctacgaccaactcatacacctcctatgaaaaaacttcctaccactcaccctagcattacttatatgacatgtctccatacccattacaatctccagcattccccctcaaacctaagaaatatgtctgataaaagagttactttgatagagtaaataataggagcttaaacccccttatttctaggactatgagaatcgaacccatccctgagaatccaaaattctccgtgccacctatcacaccccatcctaaagtaaggtcagctaaataagctatcgggcccataccccgaaaatgttggttatacccttcccgtactaattaatcccctggcccaacccgtcatctactctaccatctttgcaggcacactcatcacagcgctaagctcgcactgattttttacctgagtaggcctagaaataaacatgctagcttttattccagttctaaccaaaaaaataaaccctcgttccacagaagctgccatcaagtatttcctcacgcaagcaaccgcatccataatccttctaatagctatcctcttcaacaatatactctccggacaatgaaccataaccaatactaccaatcaatactcatcattaataatcataatggctatagcaataaaactaggaatagccccctttcacttctgagtcccagaggttacccaaggcacccctctgacatccggcctgcttcttctcacatgacaaaaactagcccccatctcaatcatataccaaatctctccctcactagacgtaagccttctcctcactctctcaatcttatccatcatagcaggcagttgaggtggattaaaccaaacccagctacgcaaaatcttagcatactcctcaattacccacataggatgaataatagcagttctaccgtacaaccctaacataaccattcttaatttaactatttatattatcctaactactaccgcattcctactactcaacttaaactccagcaccacgaccctactactatctcgcacctgaaacaagctaacatgactaacacccttaattccatccaccctcctctccctaggaggcctgcccccgctaaccggctttttgcccaaatgggccattatcgaagaactcacaaaaaacaatagcctcatcatccccaccatcatagccaccatcaccctccttaacctctacttctacctacgcctaatctactccacctcaatcacactactccccatatctaacaacgtaaaaataaaatgacagtttgaacacacaaaacccaccccattcctccccacactcatcgcccttaccacgctactcctacctatctccccttttatactaataatcttatagaaatttaggttaaatacagaccaagagccttcaaagccctcagtaagttgcaatacttaatttctgtaacagctaaggactgcaaaaccccactctgcatcaactgaacgcaaatcagccactttaattaagctaagcccttactagaccaatgggacttaaacccacaaacacttagttaacagctaagcaccctaatcaactggcttcaatctacttctcccgccgccgggaaaaaaggcgggagaagccccggcaggtttgaagctgcttcttcgaatttgcaattcaatatgaaaatcacctcggagctggtaaaaagaggcctagcccctgtctttagatttacagtccaatgcttcactcagccattttacctcacccccactgatgttcgccgaccgttgactattctctacaaaccacaaagacattggaacactatacctattattcggcgcatgagctggagtcctaggcacagctctaagcctccttattcgagccgagctgggccagccaggcaaccttctaggtaacgaccacatctacaacgttatcgtcacagcccatgcatttgtaataatcttcttcatagtaatacccatcataatcggaggctttggcaactgactagttcccctaataatcggtgcccccgatatggcgtttccccgcataaacaacataagcttctgactcttacctccctctctcctactcctgctcgcatctgctatagtggaggccggagcaggaacaggttgaacagtctaccctcccttagcagggaactactcccaccctggagcctccgtagacctaaccatcttctccttacacctagcaggtgtctcctctatcttaggggccatcaatttcatcacaacaattatcaatataaaaccccctgccataacccaataccaaacgcccctcttcgtctgatccgtcctaatcacagcagtcctacttatcctatctctcccagtcctagctgctggcatcactatactactaacagaccgcaacctcaacaccaccttcttcgaccccgccggaggaggagaccccattctataccaacacctattctgatttttcggtcaccctgaagtttatattcttatcctaccaggcttcggaataatctcccatattgtaacttactactccggaaaaaaagaaccatttggatacataggtatggtctgagctatgatatcaattggcttcctagggtttatcgtgtgagcacaccatatatttacagtaggaatagacgtagacacacgagcatatttcacctccgctaccataatcatcgctatccccaccggcgtcaaagtatttagctgactcgccacactccacggaagcaatatgaaatgatctgctgcagtgctctgagccctaggattcatctttcttttcaccgtaggtggcctgactggcattgtattagcaaactcatcactagacatcgtactacacgacacgtactacgttgtagctcacttccactatgtcctatcaataggagctgtatttgccatcataggaggcttcattcactgatttcccctattctcaggctacaccctagaccaaacctacgccaaaatccatttcactatcatattcatcggcgtaaatctaactttcttcccacaacactttctcggcctatccggaatgccccgacgttactcggactaccccgatgcatacaccacatgaaacatcctatcatctgtaggctcattcatttctctaacagcagtaatattaataattttcatgatttgagaagccttcgcttcgaagcgaaaagtcctaatagtagaagaaccctccataaacctggagtgactatatggatgccccccaccctaccacacattcgaagaacccgtatacataaaatctagacaaaaaaggaaggaatcgaaccccccaaagctggtttcaagccaaccccatggcctccatgactttttcaaaaaggtattagaaaaaccatttcataactttgtcaaagttaaattataggctaaatcctatatatcttaatggcacatgcagcgcaagtaggtctacaagacgctacttcccctatcatagaagagcttatcacctttcatgatcacgccctcataatcattttccttatctgcttcctagtcctgtatgcccttttcctaacactcacaacaaaactaactaatactaacatctcagacgctcaggaaatagaaaccgtctgaactatcctgcccgccatcatcctagtcctcatcgccctcccatccctacgcatcctttacataacagacgaggtcaacgatccctcccttaccatcaaatcaattggccaccaatggtactgaacctacgagtacaccgactacggcggactaatcttcaactcctacatacttcccccattattcctagaaccaggcgacctgcgactccttgacgttgacaatcgagtagtactcccgattgaagcccccattcgtataataattacatcacaagacgtcttgcactcatgagctgtccccacattaggcttaaaaacagatgcaattcccggacgtctaaaccaaaccactttcaccgctacacgaccgggggtatactacggtcaatgctctgaaatctgtggagcaaaccacagtttcatgcccatcgtcctagaattaattcccctaaaaatctttgaaatagggcccgtatttaccctatagtaccccctctagagcccactgtaaagctaacttagcattaaccttttaagttaaagattaagagaaccaacacctctttacagtgaaatgccccaactaaatactaccgtatggcccaccataattacccccatactccttacactattcctcatcacccaactaaaaatattaaacacaaactaccacctacctccctcaccaaagcccataaaaataaaaaattataacaaaccctgagaaccaaaatgaacgaaaatctgttcgcttcattcattgcccccacaatcctaggcctacccgccgcagtactgatcattctatttccccctctattgatccccacctccaaatatctcatcaacaaccgactaatcaccacccaacaatgactaatcaaactaacctcaaaacaaataataaccatacacaacactaaaggacgaacctgatctcttatactagtatccttaatcatttttattgccacaactaacctcctcggactcctgcctcactcatttacaccaaccacccaactatctataaacctagccatggccatccccttatgagcgggcgcagtgattataggctttcgctctaagattaaaaatgccctagcccacttcttaccacaaggcacacctacaccccttatccccatactagttattatcgaaaccatcagcctactcattcaaccaatagccctggccgtacgcctaaccgctaacattactgcaggccacctactcatgcacctaattggaagcgccaccctagcaatatcaaccattaaccttccctctacacttatcatcttcacaattctaattctactgactatcctagaaatcgctgtcgccttaatccaagcctacgttttcacacttctagtaagcctctacctgcacgacaacacataatgacccaccaatcacatgcctatcatatagtaaaacccagcccatgacccctaacaggggccctctcagccctcctaatgacctccggcctagccatgtgatttcacttccactccataacgctcctcatactaggcctactaaccaacacactaaccatataccaatgatggcgcgatgtaacacgagaaagcacataccaaggccaccacacaccacctgtccaaaaaggccttcgatacgggataatcctatttattacctcagaagtttttttcttcgcaggatttttctgagccttttaccactccagcctagcccctaccccccaattaggagggcactggcccccaacaggcatcaccccgctaaatcccctagaagtcccactcctaaacacatccgtattactcgcatcaggagtatcaatcacctgagctcaccatagtctaatagaaaacaaccgaaaccaaataattcaagcactgcttattacaattttactgggtctctattttaccctcctacaagcctcagagtacttcgagtctcccttcaccatttccgacggcatctacggctcaacattttttgtagccacaggcttccacggacttcacgtcattattggctcaactttcctcactatctgcttcatccgccaactaatatttcactttacatccaaacatcactttggcttcgaagccgccgcctgatactggcattttgtagatgtggtttgactatttctgtatgtctccatctattgatgagggtcttactcttttagtataaatagtaccgttaacttccaattaactagttttgacaacattcaaaaaagagtaataaacttcgccttaattttaataatcaacaccctcctagccttactactaataattattacattttgactaccacaactcaacggctacatagaaaaatccaccccttacgagtgcggcttcgaccctatatcccccgcccgcgtccctttctccataaaattcttcttagtagctattaccttcttattatttgatctagaaattgccctccttttacccctaccatgagccctacaaacaactaacctgccactaatagttatgtcatccctcttattaatcatcatcctagccctaagtctggcctatgagtgactacaaaaaggattagactgaaccgaattggtatatagtttaaacaaaacgaatgatttcgactcattaaattatgataatcatatctaccaaatgcccctcatttacataaatattatactagcatttaccatctcacttctaggaatactagtatatcgctcacacctcatatcctccctactatgcctagaaggaataatactatcgctgttcattatagctactctcataaccctcaacacccactccctcttagccaatattgtgcctattgccatactagtctttgccgcctgcgaagcagcggtgggcctagccctactagtctcaatctccaacacatatggcctagactacgtacataacctaaacctactccaatgctaaaactaatcgtcccaacaattatattactaccactgacatgactttccaaaaaacacataatttgaatcaacacaaccacccacagcctaattattagcatcatccctctactattttttaaccaaatcaacaacaacctatttagctgttccccaaccttttcctccgaccccctaacaacccccctcctaatactaactacctgactcctacccctcacaatcatggcaagccaacgccacttatccagtgaaccactatcacgaaaaaaactctacctctctatactaatctccctacaaatctccttaattataacattcacagccacagaactaatcatattttatatcttcttcgaaaccacacttatccccaccttggctatcatcacccgatgaggcaaccagccagaacgcctgaacgcaggcacatacttcctattctacaccctagtaggctcccttcccctactcatcgcactgatttacactcacaacaccctaggctcactaaacattctactactcactctcactgcccaagaactatcaaactcctgagccaacaacttaatatgactagcttacacaatagcttttatagtaaagatacctctttacggactccacttatgactccctaaagcccatgtcgaagcccccatcgctgggtcaatagtacttgccgcagtactcttaaaactaggcggctatggtataatacgcctcacactcattctcaaccccctgacaaaacacatagcctaccccttccttgtactatccctatgaggcataattataacaagctccatctgcctacgacaaacagacctaaaatcgctcattgcatactcttcaatcagccacatagccctcgtagtaacagccattctcatccaaaccccctgaagcttcaccggcgcagtcattctcataatcgcccacggacttacatcctcattactattctgcctagcaaactcaaactacgaacgcactcacagtcgcatcataatcctctctcaaggacttcaaactctgctcccactaatagctttttgatgacttctagcaagcctcgctaacctcgccttaccccccactattaacctactgggagaactctctgtgctagtaaccacgttctcctgatcaaatatcactctcctacttacaggactcaacatactagtcacagccctatactccctctacatatttaccacaacacaatggggctcactcacccaccacattaacaacataaaaccctcattcacacgagaaaacaccctcatgttcatacacctatcccccattctcctcctatccctcaaccccgacatcattaccgggttttcctcttgtaaatatagtttaaccaaaacatcagattgtgaatctgacaacagaggcttacgaccccttatttaccgagaaagctcacaagaactgctaactcatgcccccatgtctaacaacatggctttctcaacttttaaaggataacagctatccattggtcttaggccccaaaaattttggtgcaactccaaataaaagtaataaccatgcacactactataaccaccctaaccctgacttccctaattccccccatccttaccaccctcgttaaccctaacaaaaaaaactcatacccccattatgtaaaatccattgtcgcatccacctttattatcagtctcttccccacaacaatattcatgtgcctagaccaagaagttattatctcgaactgacactgagccacaacccaaacaacccagctctccctaagcttcaaactagactacttctccataatattcatccctgtagcattgttcgttacatggtccatcatagaattctcactgtgatatataaactcagacccaaacattaatcagttcttcaaatatctactcatcttcctaattaccatactaatcttagttaccgctaacaacctattccaactgttcatcggctgagagggcgtaggaattatatccttcttgctcatcagttgatgatacgcccgagcagatgccaacacagcagccattcaagcaatcctatacaaccgtatcggcgatatcggtttcatcctcgccttagcatgatttatcctacactccaactcatgagacccacaacaaatagcccttctaaacgctaatccaagcctcaccccactactaggcctcctcctagcagcagcaggcaaatcagcccaattaggtctccacccctgactcccctcagccatagaaggccccaccccagtctcagccctactccactcaagcactatagttgtagcaggaatcttcttactcatccgcttccaccccctagcagaaaatagcccactaatccaaactctaacactatgcttaggcgctatcaccactctgttcgcagcagtctgcgcccttacacaaaatgacatcaaaaaaatcgtagccttctccacttcaagtcaactaggactcataatagttacaatcggcatcaaccaaccacacctagcattcctgcacatctgtacccacgccttcttcaaagccatactatttatgtgctccggatccatcatccacaaccttaacaatgaacaagatattcgaaaaataggaggactactcaaaaccatacctctcacttcaacctccctcaccattggcagcctagcattagcaggaatacctttcctcacaggtttctactccaaagaccacatcatcgaaaccgcaaacatatcatacacaaacgcctgagccctatctattactctcatcgctacctccctgacaagcgcctatagcactcgaataattcttctcaccctaacaggtcaacctcgcttccccacccttactaacattaacgaaaataaccccaccctactaaaccccattaaacgcctggcagccggaagcctattcgcaggatttctcattactaacaacatttcccccgcatcccccttccaaacaacaatccccctctacctaaaactcacagccctcgctgtcactttcctaggacttctaacagccctagacctcaactacctaaccaacaaacttaaaataaaatccccactatgcacattttatttctccaacatactcggattctaccctagcatcacacaccgcacaatcccctatctaggccttcttacgagccaaaacctgcccctactcctcctagacctaacctgactagaaaagctattacctaaaacaatttcacagcaccaaatctccacctccatcatcacctcaacccaaaaaggcataattaaactttacttcctctctttcttcttcccactcatcctaaccctactcctaatcacataacctattcccccgagcaatctcaattacaatatatacaccaacaaacaatgttcaaccagtaactactactaatcaacgcccatagtcatacaaagcccccgcaccaataggatcctcccgaatcaaccctgacccctctccttcataaattattcagcttcctacactattaaagtttaccacaaccaccaccccatcatactctttcacccacagcaccaatcctacctccatcgctaaccccactaaaacactcaccaagacctcaacccctgacccccatgcctcaggatactcctcaatagccatcgctgtagtatatccaaagacaaccatcattccccctaaataaattaaaaaaactattaaacccatataacctcccccaaaattcagaataataacacacccgaccacaccgctaacaatcaatactaaacccccataaataggagaaggcttagaagaaaaccccacaaaccccattactaaacccacactcaacagaaacaaagcatacatcattattctcgcacggactacaaccacgaccaatgatatgaaaaaccatcgttgtatttcaactacaagaacaccaatgaccccaatacgcaaaattaaccccctaataaaattaattaaccactcattcatcgacctccccaccccatccaacatctccgcatgatgaaacttcggctcactccttggcgcctgcctgatcctccaaatcaccacaggactattcctagccatacactactcaccagacgcctcaaccgccttttcatcaatcgcccacatcactcgagacgtaaattatggctgaatcatccgctaccttcacgccaatggcgcctcaatattctttatctgcctattcctacacatcggacgaggcctatattacggatcatttctctactcagaaacctgaaacatcggcattatcctcctgcttgcaactatagcaacagccttcataggctatgtcctcccgtgaggccaaatatcattctgaggggccacagtaattacaaacttactatccgccatcccatacattgggacagacctagttcaatgaatctgaggaggctactcagtagacagtcccaccctcacacgattctttacctttcacttcatcttgcccttcattattgcagccctagcagcactccacctcctattcttgcacgaaacgggatcaaacaaccccctaggaatcacctcccattccgataaaatcaccttccacccttactacacaatcaaagacgccctcggcttacttctcttcattctctccttaatgacattaacactattctcaccagacctcctaggcgacccagacaattataccctagccaaccccttaaacacccctccccacatcaagcccgaatgatatttcctattcgcctacacaattctccgatccgtccctaacaagctaggaggcgtccttgccctattactatccatcctcatcctagcaataatccccatcctccatatatccaaacaacaaagcataatatttcgcccactaagccaatcactttattgactcctagccgcagacctcctcattctaacctgaatcggaggacaaccagtaagctacccttttaccatcattggacaagtagcatccgtactatacttcacaacaatcctaatcctaataccaactatctccctaattgaaaacaaaatactcaaatgggcctgtccttgtagtataaactaatacaccagtcttgtaaaccgaagatgaaaacctttttccaaggacaaatcagagaaaaagtctttaactccaccattagcacccaaagctaagattctaatttaaactattctctgttctttcatggggaagcagatttgggtaccacccaagtattgactcacccatcaacaaccgctatgtatttcgtacattactgccagccaccatgaatattgcacggtaccataaatacttgaccacctgtagtacataaaaacccaatccacatcaaccccccccccccatgcttacaagcaagtacagcaatcaaccctcaactatcacacatcaactgcaactccaaagccacccctcacccactaggataccaacaaacctacccatcttcaacagtacatagtacataaagccatttaccgtacatagcacattacagtcaaatcccttctcgtccccatggatgacccccctcagataggggtcccttgaccaccatcctccgtgaaatcaatatcccgcacaagagtgctactctcctcgctccgggcccataacacttgggggtagctaaagtgaactgtatccgacatctggttcctacttcagggccataaagcctaaatagcccacacgttccccttaaataagacatcacgatg

SEQ ID NO: 105 - DNA, 16568 bp, Homo sapiens mitochondrial
  3107: "n" refers to a nucleotide at position 3107 of the Cambridge Reference Sequence (CRS, Anderson et al. 1981 Nature 290:457-465), later determined to be absent from the human mtDNA sequence according to the revised CRS (rCRS, Andrews et al. 1999 Nature Genetics 23:147); "n" therefore represents a single nucleotide deletion at a position corresponding to nucleotide 3107 of SEQ ID NO:1 as provided herein.
gatcacaggtctatcaccctattaaccactcacgggagctctccatgcatttggtattttcgtctggggggtgtgcacgcgatagcattgcgagacgctggagccggagcaccctatgtcgcagtatctgtctttgattcctgcctcatcctattatttatcgcacctacgttcaatattacaggcgaacatacttactaaagtgtgttaattaattaatgcttgtaggacataataataacaattgaatgtctgcacagccgctttccacacagacatcataacaaaaaatttccaccaaaccccccctcccccccgcttctggccacagcacttaaacacatctctgccaaaccccaaaaacaaagaaccctaacaccagcctaaccagatttcaaattttatcttttggcggtatgcacttttaacagtcaccccccaactaacacattattttcccctcccactcccatactactaatctcatcaatacaacccccgcccatcctacccagcacacacaccgctgctaaccccataccccgaaccaaccaaaccccaaagacaccccccacagtttatgtagcttacctcctcaaagcaatacactgaaaatgtttagacgggctcacatcaccccataaacaaataggtttggtcctagcctttctattagctcttagtaagattacacatgcaagcatccccgttccagtgagttcaccctctaaatcaccacgatcaaaagggacaagcatcaagcacgcagcaatgcagctcaaaacgcttagcctagccacacccccacgggaaacagcagtgattaacctttagcaataaacgaaagtttaactaagctatactaaccccagggttggtcaatttcgtgccagccaccgcggtcacacgattaacccaagtcaatagaagccggcgtaaagagtgttttagatcaccccctccccaataaagctaaaactcacctgagttgtaaaaaactccagttgacacaaaatagactacgaaagtggctttaacatatctgaacacacaatagctaagacccaaactgggattagataccccactatgcttagccctaaacctcaacagttaaatcaacaaaactgctcgccagaacactacgagccacagcttaaaactcaaaggacctggcggtgcttcatatccctctagaggagcctgttctgtaatcgataaaccccgatcaacctcaccacctcttgctcagcctatataccgccatcttcagcaaaccctgatgaaggctacaaagtaagcgcaagtacccacgtaaagacgttaggtcaaggtgtagcccatgaggtggcaagaaatgggctacattttctaccccagaaaactacgatagcccttatgaaacttaagggtcgaaggtggatttagcagtaaactgagagtagagtgcttagttgaacagggccctgaagcgcgtacacaccgcccgtcaccctcctcaagtatacttcaaaggacatttaactaaaacccctacgcatttatatagaggagacaagtcgtaacatggtaagtgtactggaaagtgcacttggacgaaccagagtgtagcttaacacaaagcacccaacttacacttaggagatttcaacttaacttgaccgctctgagctaaacctagccccaaacccactccaccttactaccagacaaccttagccaaaccatttacccaaataaagtataggcgatagaaattgaaacctggcgcaatagatatagtaccgcaagggaaagatgaaaaattataaccaagcataatatagcaaggactaacccctataccttctgcataatgaattaactagaaataactttgcaaggagagccaaagctaagacccccgaaaccagacgagctacctaagaacagctaaaagagcacacccgtctatgtagcaaaatagtgggaagatttataggtagaggcgacaaacctaccgagcctggtgatagctggttgtccaagatagaatcttagttcaactttaaatttgcccacagaaccctctaaatccccttgtaaatttaactgttagtccaaagaggaacagctctttggacactaggaaaaaaccttgtagagagagtaaaaaatttaacacccatagtaggcctaaaagcagccaccaattaagaaagcgttcaagctcaacacccactacctaaaaaatcccaaacatataactgaactcctcacacccaattggaccaatctatcaccctatagaagaactaatgttagtataagtaacatgaaaacattctcctccgcataagcctgcgtcagattaaaacactgaactgacaattaacagcccaatatctacaatcaaccaacaagtcattattaccctcactgtcaacccaacacaggcatgctcataaggaaaggttaaaaaaagtaaaaggaactcggcaaatcttaccccgcctgtttaccaaaaacatcacctctagcatcaccagtattagaggcaccgcctgcccagtgacacatgtttaacggccgcggtaccctaaccgtgcaaaggtagcataatcacttgttccttaaatagggacctgtatgaatggctccacgagggttcagctgtctcttacttttaaccagtgaaattgacctgcccgtgaagaggcgggcatgacacagcaagacgagaagaccctatggagctttaatttattaatgcaaacagtacctaacaaacccacaggtcctaaactaccaaacctgcattaaaaatttcggttggggcgacctcggagcagaacccaacctccgagcagtacatgctaagacttcaccagtcaaagcgaactactatactcaattgatccaataacttgaccaacggaacaagttaccctagggataacagcgcaatcctattctagagtccatatcaacaatagggtttacgacctcgatgttggatcaggacatcccgatggtgcagccgctattaaaggttcgtttgttcaacgattaaagtcctacgtgatctgagttcagaccggagtaatccaggtcggtttctatctacnttcaaattcctccctgtacgaaaggacaagagaaataaggcctacttcacaaagcgccttcccccgtaaatgatatcatctcaacttagtattatacccacacccacccaagaacagggtttgttaagatggcagagcccggtaatcgcataaaacttaaaactttacagtcagaggttcaattcctcttcttaacaacatacccatggccaacctcctactcctcattgtacccattctaatcgcaatggcattcctaatgcttaccgaacgaaaaattctaggctatatacaactacgcaaaggccccaacgttgtaggcccctacgggctactacaacctttcgctgacgccataaaactcttcaccaaagagcccctaaaacccgccacatctaccatcaccctctacatcaccgccccgaccttagctctcaccatcgctcttctactatgaacccccctccccatacccaaccccctggtcaacctcaacctaggcctcctatttattctagccacctctagcctagccgtttactcaatcctctgatcagggtgagcatcaaactcaaactacgccctgatcggcgcactgcgagcagtagcccaaacaatctcatatgaagtcaccctagccatcattctactatcaacattactaataagtggctcctttaacctctccacccttatcacaacacaagaacacctctgattactcctgccatcatgacccttggccataatatgatttatctccacactagcagagaccaaccgaacccccttcgaccttgccgaaggggagtccgaactagtctcaggcttcaacatcgaatacgccgcaggccccttcgccctattcttcatagccgaatacacaaacattattataataaacaccctcaccactacaatcttcctaggaacaacatatgacgcactctcccctgaactctacacaacatattttgtcaccaagaccctacttctaacctccctgttcttatgaattcgaacagcatacccccgattccgctacgaccaactcatacacctcctatgaaaaaacttcctaccactcaccctagcattacttatatgatatgtctccatacccattacaatctccagcattccccctcaaacctaagaaatatgtctgataaaagagttactttgatagagtaaataataggagcttaaacccccttatttctaggactatgagaatcgaacccatccctgagaatccaaaattctccgtgccacctatcacaccccatcctaaagtaaggtcagctaaataagctatcgggcccataccccgaaaatgttggttatacccttcccgtactaattaatcccctggcccaacccgtcatctactctaccatctttgcaggcacactcatcacagcgctaagctcgcactgattttttacctgagtaggcctagaaataaacatgctagcttttattccagttctaaccaaaaaaataaaccctcgttccacagaagctgccatcaagtatttcctcacgcaagcaaccgcatccataatccttctaatagctatcctcttcaacaatatactctccggacaatgaaccataaccaatactaccaatcaatactcatcattaataatcataatggctatagcaataaaactaggaatagccccctttcacttctgagtcccagaggttacccaaggcacccctctgacatccggcctgcttcttctcacatgacaaaaactagcccccatctcaatcatataccaaatctctccctcactaaacgtaagccttctcctcactctctcaatcttatccatcatagcaggcagttgaggtggattaaaccaaacccagctacgcaaaatcttagcatactcctcaattacccacataggatgaataatagcagttctaccgtacaaccctaacataaccattcttaatttaactatttatattatcctaactactaccgcattcctactactcaacttaaactccagcaccacgaccctactactatctcgcacctgaaacaagctaacatgactaacacccttaattccatccaccctcctctccctaggaggcctgcccccgctaaccggctttttgcccaaatgggccattatcgaagaattcacaaaaaacaatagcctcatcatccccaccatcatagccaccatcaccctccttaacctctacttctacctacgcctaatctactccacctcaatcacactactccccatatctaacaacgtaaaaataaaatgacagtttgaacatacaaaacccaccccattcctccccacactcatcgcccttaccacgctactcctacctatctccccttttatactaataatcttatagaaatttaggttaaatacagaccaagagccttcaaagccctcagtaagttgcaatacttaatttctgtaacagctaaggactgcaaaaccccactctgcatcaactgaacgcaaatcagccactttaattaagctaagcccttactagaccaatgggacttaaacccacaaacacttagttaacagctaagcaccctaatcaactggcttcaatctacttctcccgccgccgggaaaaaaggcgggagaagccccggcagatttgaagctgcttcttcgaatttgcaattcaatatgaaaatcacctcggagctggtaaaaagaggcctaacccctgtctttagatttacagtccaatgcttcactcagccattttacctcacccccactgatgttcgccgaccgttgactattctctacaaaccacaaagacattggaacactatacctattattcggcgcatgagctggagtcctaggcacagctctaagcctccttattcgagccgagctgggccagccaggcaaccttctaggtaacgaccacatctacaacgttatcgtcacagcccatgcatttgtaataatcttcttcatagtaatacccatcataatcggaggctttggcaactgactagttcccctaataatcggtgcccccgatatggcgtttccccgcataaacaacataagcttctgactcttacccccctctctcctactcctgctcgcatctgctatagtggaggccggagcaggaacaggttgaacagtctaccctcccttagcagggaactactcccaccctggagcctccgtagacctaaccatcttctccttacacctagcaggtatctcctctatcttaggggccatcaatttcatcacaacaattatcaatataaaaccccctgccataacccaataccaaacgcccctcttcgtctgatccgtcctaatcacagcagtcctacttctcctatctctcccagtcctagctgctggcatcactatactactaacagaccgcaacctcaacaccaccttcttcgaccccgccggaggaggagaccccattctataccaacacctattctgatttttcggtcaccctgaagtttatattcttatcctaccaggcttcggaataatctcccatattgtaacttactactccggaaaaaaagaaccatttggatacataggtatggtctgagctatgatatcaattggcttcctagggtttatcgtgtgagcacaccatatatttacagtaggaatagacgtagacacacgagcatatttcacctccgctaccataatcatcgctatccccaccggcgtcaaagtatttagctgactcgccacactccacggaagcaatatgaaatgatctgctgcagtgctctgagccctaggattcatctttcttttcaccgtaggtggcctgactggcattgtattagcaaactcatcactagacatcgtactacacgacacgtactacgttgtagctcacttccactatgtcctatcaataggagctgtatttgccatcataggaggcttcattcactgatttcccctattctcaggctacaccctagaccaaacctacgccaaaatccatttcactatcatattcatcggcgtaaatctaactttcttcccacaacactttctcggcctatccggaatgccccgacgttactcggactaccccgatgcatacaccacatgaaacatcctatcatctgtaggctcattcatttctctaacagcagtaatattaataattttcatgatttgagaagccttcgcttcgaagcgaaaagtcctaatagtagaagaaccctccataaacctggagtgactatatggatgccccccaccctaccacacattcgaagaacccgtatacataaaatctagacaaaaaaggaaggaatcgaaccccccaaagctggtttcaagccaaccccatggcctccatgactttttcaaaaaggtattagaaaaaccatttcataactttgtcaaagttaaattataggctaaatcctatatatcttaatggcacatgcagcgcaagtaggtctacaagacgctacttcccctatcatagaagagcttatcacctttcatgatcacgccctcataatcattttccttatctgcttcctagtcctgtatgcccttttcctaacactcacaacaaaactaactaatactaacatctcagacgctcaggaaatagaaaccgtctgaactatcctgcccgccatcatcctagtcctcatcgccctcccatccctacgcatcctttacataacagacgaggtcaacgatccctcccttaccatcaaatcaattggccaccaatggtactgaacctacgagtacaccgactacggcggactaatcttcaactcctacatacttcccccattattcctagaaccaggcgacctgcgactccttgacgttgacaatcgagtagtactcccgattgaagcccccattcgtataataattacatcacaagacgtcttgcactcatgagctgtccccacattaggcttaaaaacagatgcaattcccggacgtctaaaccaaaccactttcaccgctacacgaccgggggtatactacggtcaatgctctgaaatctgtggagcaaaccacagtttcatgcccatcgtcctagaattaattcccctaaaaatctttgaaatagggcccgtatttaccctatagcaccccctctaccccctctagagcccactgtaaagctaacttagcattaaccttttaagttaaagattaagagaaccaacacctctttacagtgaaatgccccaactaaatactaccgtatggcccaccataattacccccatactccttacactattcctcatcacccaactaaaaatattaaacacaaactaccacctacctccctcaccaaagcccataaaaataaaaaattataacaaaccctgagaaccaaaatgaacgaaaatctgttcgcttcattcattgcccccacaatcctaggcctacccgccgcagtactgatcattctatttccccctctattgatccccacctccaaatatctcatcaacaaccgactaatcaccacccaacaatgactaatcaaactaacctcaaaacaaatgatagccatacacaacactaaaggacgaacctgatctcttatactagtatccttaatcatttttattgccacaactaacctcctcggactcctgcctcactcatttacaccaaccacccaactatctataaacctagccatggccatccccttatgagcgggcgcagtgattataggctttcgctctaagattaaaaatgccctagcccacttcttaccacaaggcacacctacaccccttatccccatactagttattatcgaaaccatcagcctactcattcaaccaatagccctggccgtacgcctaaccgctaacattactgcaggccacctactcatgcacctaattggaagcgccaccctagcaatatcaaccattaaccttccctctacacttatcatcttcacaattctaattctactgactatcctagaaatcgctgtcgccttaatccaagcctacgttttcacacttctagtaagcctctacctgcacgacaacacataatgacccaccaatcacatgcctatcatatagtaaaacccagcccatgacccctaacaggggccctctcagccctcctaatgacctccggcctagccatgtgatttcacttccactccataacgctcctcatactaggcctactaaccaacacactaaccatataccaatgatggcgcgatgtaacacgagaaagcacataccaaggccaccacacaccacctgtccaaaaaggccttcgatatgggataatcctatttattacctcagaagtttttttcttcgcaggatttttctgagccttttaccactccagcctagcccctaccccccaactaggagggcactggcccccaacaggcatcaccccgctaaatcccctagaagtcccactcctaaacacatccgtattactcgcatcaggagtatcaatcacctgagctcaccatagtctaatagaaaacaaccgaaaccaaataattcaagcactgcttattacaattttactgggtctctattttaccctcctacaagcctcagagtacttcgagtctcccttcaccatttccgacggcatctacggctcaacattttttgtagccacaggcttccacggacttcacgtcattattggctcaactttcctcactatctgcttcatccgccaactaatatttcactttacatccaaacatcactttggcttcgaagccgccgcctgatactggcattttgtagatgtggtttgactatttctgtatgtctccatctattgatgagggtcttactcttttagtataaatagtaccgttaacttccaattaactagttttgacaacattcaaaaaagagtaataaacttcgccttaattttaataatcgacaccctcctagccttactactaataattattacattttgactaccacaactcaacggctacatagaaaaatccaccccttacgagtgcggcttcgaccctatatcccccgcccgcgtccctttctccataaaattcttcttagtagctattaccttcttattatttgatctagaaattgccctccttttacccctaccatgagccctacaaacaactaacctgccactaatagttatgtcatccctcttattaatcatcatcctagccctaagtctggcctatgaatgactacaaaaaggattagactgagccgaattggtatatagtttaaacaaaacgaatgatttcgactcattaaattatgataatcatatttaccaaatgcccctcatttacataaatattatactagcatttaccatctcacttctaggaatactagtatatcgctcacacctcatatcctccctactatgcctagaaggaataatactatcgctgttcattatagctactctcataaccctcaacacccactccctcttagccaatattgtgcctattgccatactagtctttgccgcctgcgaagcagcggtgggcctagccctactagtctcaatctccaacacatatggcctagactacgtacataacctaaacctactccaatgctaaaactaatcgtcccaacaattatattactaccactgacatgactttccaaaaaacacataatttgaatcaacacaaccacccacagcctaattattagcatcatccccctactattttttaaccaaatcaacaacaacctatttagctgttccccaaccttttcctccgaccccctaacaacccccctcctaatactaactacctgactcctacccctcacaatcatggcaagccagcgccacttatccagtgaaccactatcacgaaaaaaactctacctctctatactaatctccctacaaatctccttaattataacattcacagccacagaactaatcatattttatatcttcttcgaaaccacacttatccccaccttggctatcatcacccgatgaggcaaccagccagaacgcctgaacgcaggcacatacttcctattctacaccctagtaggctcccttcccctactcatcgcactaatttacactcacaacaccctaggctcactaaacattctactactcactctcactgcccaagaactatcaaactcctgagccaacaacttaatatggctagcttacacaatagcttttatagtaaagatacctctttacggactccacttatgactccctaaagcccatgtcgaagcccccatcgctgggtcaatagtacttgccgcagtactcttaaaactaggcggctatggtataatacgcctcacactcattctcaaccccctgacaaaacacatagcctaccccttccttgtactatccctatgaggcataattataacaagctccatctgcctacgacaaacagacctaaaatcgctcattgcatactcttcaatcagccacatagccctcgtagtaacagccattctcatccaaaccccctgaagcttcaccggcgcagtcattctcataatcgcccacggacttacatcctcattactattctgcctagcaaactcaaactacgaacgcactcacagtcgcatcataatcctctctcaagggcttcaaactctactcccactaatagctttttgatgacttctagcaagcctcgctaacctcgccttaccccccactattaacctactgggagaactctctgtgctagtaaccacgttctcctgatcaaatatcactctcctacttacaggactcaacatactagtcacagccctatactccctctacatatttaccacaacacaatggggctcactcacccaccacattaacaacataaaaccctcattcacacgagaaaacaccctcatgttcatacacctatcccccattctcctcctatccctcaaccccgacatcattaccgggttttcctcttgtaaatatagtttaaccaaaacatcagattgtgaatctgacaacagaggcttacgaccccttatttaccgagaaagctcacaagaactgctaactcatgcccccatgtctaacaacatggctttctcaacttttaaaggataacagctatccattggtcttaggccccaaaaattttggtgcaactccaaataaaagtaataaccatgcacactactataaccaccctaaccctgacttccctaattccccccatccttaccaccctcgttaaccctaacaaaaaaaactcatacccccattatgtaaaatccattgtcgcatccacctttattatcagtctcttccccacaacaatattcatgtgcctagaccaagaagttattatctcgaactgacactgagccacaacccaaacaacccagctctccctaagcttcaaactagactacttctccataatattcatccctgtagcattgttcgttacatggtccatcatagaattctcactgtgatatataaactcagacccaaacattaatcagttcttcaaatatctactcattttcctaattaccatactaatcttagttaccgctaacaacctattccaactgttcatcggctgagagggcgtaggaattatatccttcttgctcatcagttgatgatacgcccgagcagatgccaacacagcagccattcaagcaatcctatacaaccgtatcggcgatatcggtttcatcctcgccttagcatgatttatcctacactccaactcatgagacccacaacaaatagcccttctaaacgctaatccaagcctcaccccactactaggcctcctcctagcagcagcaggcaaatcagcccaattaggtctccacccctgactcccctcagccatagaaggccccaccccagtctcagccctactccactcaagcactatagttgtagcaggagtcttcttactcatccgcttccaccccctagcagaaaatagcccactaatccaaactctaacactatgcttaggcgctatcaccactctgttcgcagcagtctgcgcccttacacaaaatgacatcaaaaaaatcgtagccttctccacttcaagtcaactaggactcataatagttacaatcggcatcaaccaaccacacctagcattcctgcacatctgtacccacgccttcttcaaagccatactatttatgtgctccgggtccatcatccacaaccttaacaatgaacaagatattcgaaaaataggaggactactcaaaaccatacctctcacttcaacctccctcaccattggcagcctagcattagcaggaatacctttcctcacaggtttctactccaaagaccacatcatcgaaaccgcaaacatatcatacacaaacgcctgagccctatctattactctcatcgctacctccctgacaagcgcctatagcactcgaataattcttctcaccctaacaggtcaacctcgcttccccacccttactaacattaacgaaaataaccccaccctactaaaccccattaaacgcctggcagccggaagcctattcgcaggatttctcattactaacaacatttcccccgcatcccccttccaaacaacaatccccctctacctaaaactcacagccctcgctgtcactttcctaggacttctaacagccctagacctcaactacctaaccaacaaacttaaaataaaatccccactatgcacattttatttctccaacatactaggattctaccctagcatcacacaccgcacaatcccctatctaggccttcttacgagccaaaacctgcccctactcctcctagacctaacctgactagaaaagctattacctaaaacaatttcacagcaccaaatctccacctccatcatcacctcaacccaaaaaggcataattaaactttacttcctctctttcttcttcccactcatcctaaccctactcctaatcacataacctattcccccgagcaatctcaattacaatatatacaccaacaaacaatgttcaaccagtaactactactaatcaacgcccataatcatacaaagcccccgcaccaataggatcctcccgaatcaaccctgacccctctccttcataaattattcagcttcctacactattaaagtttaccacaaccaccaccccatcatactctttcacccacagcaccaatcctacctccatcgctaaccccactaaaacactcaccaagacctcaacccctgacccccatgcctcaggatactcctcaatagccatcgctgtagtatatccaaagacaaccatcattccccctaaataaattaaaaaaactattaaacccatataacctcccccaaaattcagaataataacacacccgaccacaccgctaacaatcaatactaaacccccataaataggagaaggcttagaagaaaaccccacaaaccccattactaaacccacactcaacagaaacaaagcatacatcattattctcgcacggactacaaccacgaccaatgatatgaaaaaccatcgttgtatttcaactacaagaacaccaatgaccccaatacgcaaaattaaccccctaataaaattaattaaccactcattcatcgacctccccaccccatccaacatctccgcatgatgaaacttcggctcactccttggcgcctgcctgatcctccaaatcaccacaggactattcctagccatgcactactcaccagacgcctcaaccgccttttcatcaatcgcccacatcactcgagacgtaaattatggctgaatcatccgctaccttcacgccaatggcgcctcaatattctttatctgcctcttcctacacatcgggcgaggcctatattacggatcatttctctactcagaaacctgaaacatcggcattatcctcctgcttgcaactatagcaacagccttcataggctatgtcctcccgtgaggccaaatatcattctgaggggccacagtaattacaaacttactatccgccatcccatacattgggacagacctagttcaatgaatctgaggaggctactcagtagacagtcccaccctcacacgattctttacctttcacttcatcttacccttcattgttgcagccctagcagcactccacctcctattcttgcacgaaacgggatcaaacaaccccctaggaatcacctcccattccgataaaatcaccttccacccttactacacaatcaaagacgccctcggcttacttctcttccttctctccttaatgacattaacactattctcaccagacctcctaggcgacccagacaattataccctagccaaccccttaaacacccctccccacatcaagcccgaatgatatttcctattcgcctacacaattctccgatccgtccctaacaaactaggaggcgtccttgccctattactatccatcctcatcctagcaataatccccatcctccatatatccaaacaacaaagcataatatttcgcccactaagccaatcactttattgactcctagccgcagacctcctcattctaacctgaatcggaggacaaccagtaagctacccttttaccatcattggacaagtagcatccgtactatacttcgcaacaatcctaatcctaataccaactatctccctaattgaaaacaaaatactcaaatgagcctgtccttgtagtataaactaatacaccagtcttgtaaaccggagatgaaaaccttttccaaggacaaatcagagaaaaagtctttaactccaccattagcacccaaagctaagattctaatttaaactattctctgttctttcatggggaagcagatttgggtaccacccaagtattgactcacccatcaacaaccgctatgtatttcgtacattactgccagccaccatgaatatcgtacggtaccataaatacttgaccacctgtagtacataaaaacccaatccacatcaaaaccccctccccatgcttacaagcaagtacagcaatcaaccttcaactatcacacatcaactgcaactccaaagccacccctcacccactaggatatcaacaaacctacccacccttaacagtacatagtacataaagccatttaccgtacatagcacattacagtcaaatcccttctcgcccccatggatgacccccctcagataggggtcccttgaccaccatcctccgtgaaatcaatatcccgcacaagagtgctactctcctcgctccgggcccataacacttgggggtagctaaagtgaactgtatccgacatctggttcctacttcagggccataaagcctaaatagcccacacgttccccttaaataagacatcacgatg

SEQ ID NO: 106 - DNA, 16572 bp, Homo sapiens mitochondrial
  3110: "n" refers to a nucleotide at position 3107 of the Cambridge Reference Sequence (CRS, Anderson et al. 1981 Nature 290:457-465), later determined to be absent from the human mtDNA sequence according to the revised CRS (rCRS, Andrews et al. 1999 Nature Genetics 23:147); "n" therefore represents a single nucleotide deletion at a position corresponding to nucleotide 3107 of SEQ ID NO:1 as provided herein.
gatcacaggtctatcaccctattaaccactcacgggagctctccatgcatttggtattttcgtctggggggtatgcacgcgatagcattgcgagacgctggagccggagcaccctatgtcgcagtatctgtctttgattcctgcctcatcctattatttatcgcacctacgttcaatattacaggcgaacatacttactaaagtgtgttaattaattaatgcttgtaggacataataataacaattgaatgtctgcacagccgctttccacacagacatcataacaaaaaatttccaccaaaccccccctccccccccgcttctggccacagcacttaaacacatctctgccaaaccccaaaaacaaagaaccctaacaccagcctaaccagatttcaaattttatcttttggcggtatgcacttttaacagtcaccccccaactaacacattattttcccctcccactcccatactactaatctcatcaatacaacccccgcccatcctacccagcacacacacaccgctgctaaccccataccccgaaccaaccaaaccccaaagacaccccccacagtttatgtagcttacctcctcaaagcaatacactgaaaatgtttagacgggctcacatcaccccataaacaaataggtttggtcctagcctttctattagctcttagtaagattacacatgcaagcatccccgttccagtgagttcaccctctaaatcaccacgatcaaaaggaacaagcatcaagcacgcagcaatgcagctcaaaacgcttagcctagccacacccccacgggaaacagcagtgattaacctttagcaataaacgaaagtttaactaagctatactaaccccagggttggtcaatttcgtgccagccaccgcggtcacacgattaacccaagtcaatagaagccggcgtaaagagtgttttagatcaccccctccccaataaagctaaaactcacctgagttgtaaaaaactccagttgacacaaaatagactacgaaagtggctttaacatatctgaacacacaatagctaagacccaaactgggattagataccccactatgcttagccctaaacctcaacagttaaatcaacaaaactgctcgccagaacactacgagccacagcttaaaactcaaaggacctggcggtgcttcatatccctctagaggagcctgttctgtaatcgataaaccccgatcaacctcaccacctcttgctcagcctatataccgccatcttcagcaaaccctgatgaaggctacaaagtaagcgcaagtacccacgtaaagacgttaggtcaaggtgtagcccatgaggtggcaagaaatgggctacattttctaccccagaaaactacgatagcccttatgaaacttaagggtcgaaggtggatttagcagtaaactaagagtagagtgcttagttgaacagggccctgaagcgcgtacacaccgcccgtcaccctcctcaagtatacttcaaaggacatttaactaaaacccctacgcatttatatagaggagacaagtcgtaacatggtaagtgtactggaaagtgcacttggacgaaccagagtgtagcttaacacaaagcacccaacttacacttaggagatttcaacttaacttgaccgctctgagctaaacctagccccaaacccactccaccttactaccagacaaccttagccaaaccatttacccaaataaagtataggcgatagaaattgaaacctggcgcaatagatatagtaccgcaagggaaagatgaaaaattataaccaagcataatatagcaaggactaacccctataccttctgcataatgaattaactagaaataactttgcaaggagagccaaagctaagacccccgaaaccagacgagctacctaagaacagctaaaagagcacacccgtctatgtagcaaaatagtgggaagatttataggtagaggcgacaaacctaccgagcctggtgatagctggttgtccaagatagaatcttagttcaactttaaatttgcccacagaaccctctaaatccccttgtaaatttaactgttagtccaaagaggaacagctctttggacactaggaaaaaaccttgtagagagagtaaaaaatttaacacccatagtaggcctaaaagcagccaccaattaagaaagcgttcaagctcaacacccactacctaaaaaatcccaaacatataactgaactcctcacacccaattggaccaatctatcaccctatagaagaactaatgttagtataagtaacatgaaaacattctcctccgcataagcctgcgtcagattaaaacactgaactgacaattaacagcccaatatctacaatcaaccaacaagtcattattaccctcactgtcaacccaacacaggcatgctcataaggaaaggttaaaaaaagtaaaaggaactcggcaaatcttaccccgcctgtttaccaaaaacatcacctctagcatcaccagtattagaggcaccgcctgcccagtgacacatgtttaacggccgcggtaccctaaccgtgcaaaggtagcataatcacttgttccttaaatagggacctgtatgaatggctccacgagggttcagctgtctcttacttttaaccagtgaaattgacctgcccgtgaagaggcgggcataacacagcaagacgagaagaccctatggagctttaatttattaatgcaaacagtacctaacaaacccacaggtcctaaactaccaaacctgcattaaaaatttcggttggggcgacctcggagcagaacccaacctccgagcagtacatgctaagacttcaccagtcaaagcgaactactatactcaattgatccaataacttgaccaacggaacaagttaccctagggataacagcgcaatcctattctagagtccatatcaacaatagggtttacgacctcgatgttggatcaggacatcccgatggtgcagccgctattaaaggttcgtttgttcaacgattaaagtcctacgtgatctgagttcagaccggagtaatccaggtcggtttctatctacnttcaaattcctccctgtacgaaaggacaagagaaataaggcctacttcacaaagcgccttcccccgtaaatgatatcatctcaacttagtattatacccacacccacccaagaacagggtttgttaagatggcagagcccggtaatcgcataaaacttaaaactttacagtcagaggttcaattcctcttcttaacaacatacccatggccaacctcctactcctcattgtacccattctaatcgcaatggcattcctaatgcttaccgaacgaaaaattataggctatatacaactacgcaaaggccccaacgttgtaggcccctacgggctactacaacccttcgctgacgccataaaactcttcaccaaagagcccctaaaacccgccacatctaccatcaccctctacatcaccgccccgaccttagctctcaccatcgctcttctactatgaacccccctccccatacccaaccccctggtcaacctcaacctaggcctcctatttattctagccacctctagcctagccgtttactcaatcctctgatcagggtgagcatcaaactcaaactacgccctgatcggcgcactgcgagcagtagcccaaacaatctcatatgaagtcaccctagccatcattctactatcaacattactaataagtggctcctttaacctctccacccttatcacaacacaagaacacctctgattactcctgccatcatgacccttggccataatatgatttatctccacactagcagagaccaaccgaacccccttcgaccttgccgaaggggagtccgaactagtctcaggcttcaacatcgaatacgccgcaggccccttcgccctattcttcatagccgaatacacaaacattattataataaacaccctcaccactacaatcttcctaggaacaacatatgacgcactctcccctgaactctacacaacatattttgtcaccaagaccctacttctaacctccctgttcttatgaattcgaacagcatacccccgattccgctacgaccaactcatacacctcctatgaaaaaacttcctaccactcaccctagcattacttatatgatatgtctccatacccattacaatctccagcattccccctcaaacctaagaaatatgtctgataaaagagttactttgatagagtaaataataggagcttaaacccccttatttctaggactatgagaatcgaacccatccctgagaatccaaaattctccgtgccacctatcacaccccatcctaaagtaaggtcagctaaataagctatcgggcccataccccgaaaatgttggttatacccttcccgtactaattaatcccctggcccaacccgtcatctactctaccatctttgcaggcacactcatcacagcgctaagctcgcactgattttttacctgagtaggcctagaaataaacatgctagcttttattccagttctaaccaaaaaaataaaccctcgttccacagaagctgccatcaagtatttcctcacgcaagcaaccgcatccataatccttctaatagctatcctcttcaacaatatactctccggacaatgaaccataaccaatactaccaatcaatactcatcattaataatcataatagctatagcaataaaactaggaatagccccctttcacttctgagtcccagaggttacccaaggcacccctctgacatccggcctgcttcttctcacatgacaaaaactagcccccatctcaatcatataccaaatctctccctcactaaacgtaagccttctcctcactctctcaatcttatccatcatagcaggcagttgaggtggattaaaccaaacccagctacgcaaaatcttagcatactcctcaattacccacataggatgaataatagcagttctaccgtacaaccctaacataaccattcttaatttaactatttatattatcctaactactaccgcattcctactactcaacttaaactccagcaccacgaccctactactatctcgcacctgaaacaagctaacatgactaacacccttaattccatccaccctcctctccctaggaggcctgcccccgctaaccggctttttgcccaaatgggccattatcgaagaattcacaaaaaacaatagcctcatcatccccaccatcatagccaccatcaccctccttaacctctacttctacctacgcctaatctactccacctcaatcacactactccccatatctaacaacgtaaaaataaaatgacagtttgaacatacaaaacccaccccattcctccccacactcatcgcccttaccacgctactcctacctatctccccttttatactaataatcttatagaaatttaggttaaatacagaccaagagccttcaaagccctcagtaagttgcaatacttaatttctgtaacagctaaggactgcaaaaccccactctgcatcaactgaacgcaaatcagccactttaattaagctaagcccttactagaccaatgggacttaaacccacaaacacttagttaacagctaagcaccctaatcaactggcttcaatctacttctcccgccgccgggaaaaaaggcgggagaagccccggcaggtttgaagctgcttcttcgaatttgcaattcaatatgaaaatcacctcggagctggtaaaaagaggcctaacccctgtctttagatttacagtccaatgcttcactcagccattttacctcacccccactgatgttcgccgaccgttgactattctctacaaaccacaaagacattggaacactatacctattattcggcgcatgagctggagtcctaggcacagctctaagcctccttattcgagccgagctgggccagccaggcaaccttctaggtaacgaccacatctacaacgttatcgtcacagcccatgcatttgtaataatcttcttcatagtaatacccatcataatcggaggctttggcaactgactagttcccctaataatcggtgcccccgatatggcgtttccccgcataaacaacataagcttctgactcttacctccctctctcctactcctgctcgcatctgctatagtggaggccggagcaggaacaggttgaacagtctaccctcccttagcagggaactactcccaccctggagcctccgtagacctaaccatcttctccttacacctagcaggtgtctcctctatcttaggggccatcaatttcatcacaacaattatcaatataaaaccccctgccataacccaataccaaacgcccctcttcgtctgatccgtcctaatcacagcagtcctacttctcctatctctcccagtcctagctgctggcatcactatactactaacagaccgcaacctcaacaccaccttcttcgaccccgccggaggaggagaccccattctataccaacacctattctgatttttcggtcaccctgaagtttatattcttatcctaccaggcttcggaataatctcccatattgtaacttactactccggaaaaaaagaaccatttggatacataggtatggtctgagctatgatatcaattggcttcctagggtttatcgtgtgagcacaccatatatttacagtaggaatagacgtagacacacgagcatatttcacctccgctaccataatcatcgctatccccaccggcgtcaaagtatttagctgactcgccacactccacggaagcaatatgaaatgatctgctgcagtgctctgagccctaggattcatctttcttttcaccgtaggtggcctgactggcattgtattagcaaactcatcactagacatcgtactacacgacacgtactacgttgtagcccacttccactatgtcctatcaataggagctgtatttgccatcataggaggcttcattcactgatttcccctattctcaggctacaccctagaccaaacctacgccaaaatccatttcactatcatattcatcggcgtaaatctaactttcttcccacaacactttctcggcctatccggaatgccccgacgttactcggactaccccgatgcatacaccacatgaaacatcctatcatctgtaggctcattcatttctctaacagcagtaatattaataattttcatgatttgagaagccttcgcttcgaagcgaaaagtcctaatagtagaagaaccctccataaacctggagtgactatatggatgccccccaccctaccacacattcgaagaacccgtatacataaaatctagacaaaaaaggaaggaatcgaaccccccaaagctggtttcaagccaaccccatggcctccatgactttttcaaaaaggtattagaaaaaccatttcataactttgtcaaagttaaattataggctaaatcctatatatcttaatggcacatgcagcgcaagtaggtctacaagacgctacttcccctatcatagaagagcttatcacctttcatgatcacgccctcataatcattttccttatctgcttcctagtcctgtatgcccttttcctaacactcacaacaaaactaactaatactaacatctcagacgctcaggaaatagaaaccgtctgaactatcctgcccgccatcatcctagtcctcatcgccctcccatccctacgcatcctttacataacagacgaggtcaacgatccctcccttaccatcaaatcaattggccaccaatggtactgaacctacgagtacaccgactacggcggactaatcttcaactcctacatacttcccccattattcctagaaccaggcgacctgcgactccttgacgttgacaatcgagtagtactcccgattgaagcccccattcgtataataattacatcacaagacgtcttgcactcatgagctgtccccacattaggcttaaaaacagatgcaattcccggacgtctaaaccaaaccactttcaccgctacacgaccgggggtatactacggtcaatgctctgaaatctgtggagcaaaccacagtttcatgcccatcgtcctagaattaattcccctaaaaatctttgaaatagggcccgtatttaccctatagcaccccctctaccccctctagagcccactgtaaagctaacttagcattaaccttttaagttaaagattaagagaaccaacacctctttacagtgaaatgccccaactaaatactaccgtatggcccaccataattacccccatactccttacactattcctcatcacccaactaaaaatattaaacacaaactaccacctacctccctcaccaaagcccataaaaataaaaaattataacaaaccctgagaaccaaaatgaacgaaaatctgttcgcttcattcattgcccccacaatcctaggcctacccgccgcagtactgatcattctatttccccctctattgatccccacctccaaatatctcatcaacaaccgactaatcaccacccaacaatgactaatcaaactaacctcaaaacaaatgataaccatacacaacactaaaggacgaacctgatctcttatactagtatccttaatcatttttattgccacaactaacctcctcggactcctgcctcactcatttacaccaaccacccaactatctataaacctagccatggccatccccttatgagcgggcgcagtgattataggctttcgctctaagattaaaaatgccctagcccacttcttaccacaaggcacacctacaccccttatccccatactagttattatcgaaaccatcagcctactcattcaaccaatagccctggccgtacgcctaaccgctaacattactgcaggccacctactcatgcacctaattggaagcgccaccctagcaatatcaaccattaaccttccctctacacttatcatcttcacaattctaattctactgactatcctagaaatcgctgtcgccttaatccaagcctacgttttcacacttctagtaagcctctacctgcacgacaacacataatgacccaccaatcacatgcctatcatatagtaaaacccagcccatgacccctaacaggggccctctcagccctcctaatgacctccggcctagccatgtgatttcacttccactccataacgctcctcatactaggcctactaaccaacacactaaccatataccaatgatggcgcgatgtaacacgagaaagcacataccaaggccaccacacaccacctgtccaaaaaggccttcgatacgggataatcctatttattacctcagaagtttttttcttcgcaggatttttctgagccttttaccactccagcctagcccctaccccccaattaggagggcactggcccccaacaggcatcaccccgctaaatcccctagaagtcccactcctaaacacatccgtattactcgcatcaggagtatcaatcacctgagctcaccatagtctaatagaaaacaaccgaaaccaaataattcaagcactgcttattacaattttactgggtctctattttaccctcctacaagcctcagagtacttcgagtctcccttcaccatttccgacggcatctacggctcaacattttttgtagccacaggcttccacggacttcacgtcattattggctcaactttcctcactatctgcttcatccgccaactaatatttcactttacatccaaacatcactttggcttcgaagccgccgcctgatactggcattttgtagatgtggtttgactatttctgtatgtctccatctattgatgagggtcttactcttttagtataaatagtaccgttaacttccaattaactagttttgacaacattcaaaaaagagtaataaacttcgccttaattttaataatcaacaccctcctagccttactactaataattattacattttgactaccacaactcaacggctacatagaaaaatccaccccttacgagtgcggcttcgaccctatatcccccgcccgcgtccctttctccataaaattcttcttagtagctattaccttcttattatttgatctagaaattgccctccttttacccctaccatgagccctacaaacaactaacctgccactaatagttatgtcatccctcttattaatcatcatcctagccctaagtctggcctatgagtgactacaaaaaggattagactgaaccgaattggtatatagtttaaacaaaacgaatgatttcgactcattaaattatgataatcatatttaccaaatgcccctcatttacataaatattatactagcatttaccatctcacttctaggaatactagtatatcgctcacacctcatatcctccctactatgcctagaaggaataatactatcgctgttcattatagctactctcataaccctcaacacccactccctcttagccaatattgtgcctattgccatactagtctttgccgcctgcgaagcagcggtgggcctagccctactagtctcaatctccaacacatatggcctagactacgtacataacctaaacctactccaatgctaaaactaatcgtcccaacaattatattactaccactgacatgactttccaaaaaacacataatttgaatcaacacaaccacccacagcctaattattagcatcatccctctactattttttaaccaaatcaacaacaacctatttagctgttccccaaccttttcctccgaccccctaacaacccccctcctaatactaactacctgactcctacccctcacaatcatggcaagccaacgccacttatccagtgaaccactatcacgaaaaaaactctacctctctatactaatctccctacaaatctccttaattataacattcacagccacagaactaatcatattttatatcttcttcgaaaccacacttatccccaccttggctatcatcacccgatgaggcaaccagccagaacgcctgaacgcaggcacatacttcctattctacaccctagtaggctcccttcccctactcatcgcactaatttacactcacaacaccctaggctcactaaacattctactactcactctcactgcccaagaactatcaaactcctgagccaacaacttaatatgactagcttacacaatagcttttatagtaaagatacctctttacggactccacttatgactccctaaagcccatgtcgaagcccccatcgctgggtcaatagtacttgccgcagtactcttaaaactaggcggctatggtataatacgcctcacactcattctcaaccccctgacaaaacacatagcctaccccttccttgtactatccctatgaggcataattataacaagctccatctgcctacgacaaacagacctaaaatcgctcattgcatactcttcaatcagccacatagccctcgtagtaacagccattctcatccaaaccccctgaagcttcaccggcgcagtcattctcataatcgcccacgggcttacatcctcattactattctgcctagcaaactcaaactacgaacgcactcacagtcgcatcataatcctctctcaaggacttcaaactctactcccactaatagctttttgatgacttctagcaagcctcgctaacctcgccttaccccccactattaacctactgggagaactctctgtgctagtaaccacgttctcctgatcaaatatcactctcctacttacaggactcaacatactagtcacagccctatactccctctacatatttaccacaacacaatggggctcactcacccaccacattaacaacataaaaccctcattcacacgagaaaacaccctcatgttcatacacctatcccccattctcctcctatccctcaaccccgacatcattaccgggttttcctcttgtaaatatagtttaaccaaaacatcagattgtgaatctgacaacagaggcttacgaccccttatttaccgagaaagctcacaagaactgctaactcatgcccccatgtctaacaacatggctttctcaacttttaaaggataacagctatccattggtcttaggccccaaaaattttggtgcaactccaaataaaagtaataaccatgcacactactataaccaccctaaccctgacttccctaattccccccatccttaccaccctcgttaaccctaacaaaaaaaactcatacccccattatgtaaaatccattgtcgcatccacctttattatcagtctcttccccacaacaatattcatgtgcctagaccaagaagttattatctcgaactgacactgagccacaacccaaacaacccagctctccctaagcttcaaactagactacttctccataatattcatccctgtagcattgttcgttacatggtccatcatagaattctcactgtgatatataaactcagacccaaacattaatcagttcttcaaatatctactcatcttcctaattaccatactaatcttagttaccgctaacaacctattccaactgttcatcggctgagagggcgtaggaattatatccttcttgctcatcagttgatgatacgcccgagcagatgccaacacagcagccattcaagcaatcctatacaaccgtatcggcgatatcggtttcatcctcgccttagcatgatttatcctacactccaactcatgagacccacaacaaatagcccttctaaacgctaatccaagcctcaccccactactaggcctcctcctagcagcagcaggcaaatcagcccaattaggtctccacccctgactcccctcagccatagaaggccccaccccagtctcagccctactccactcaagcactatagttgtagcaggaatcttcttactcatccgcttccaccccctagcagaaaatagcccactaatccaaactctaacactatgcttaggcgctatcaccactctgttcgcagcagtctgcgcccttacacaaaatgacatcaaaaaaatcgtagccttctccacttcaagtcaactaggactcataatagttacaatcggcatcaaccaaccacacctagcattcctgcacatctgtacccacgccttcttcaaagccatactatttatgtgctccgggtccatcatccacaaccttaacaatgaacaagatattcgaaaaataggaggactactcaaaaccatacctctcacttcaacctccctcaccattggcagcctagcattagcaggaatacctttcctcacaggtttctactccaaagaccacatcatcgaaaccgcaaacatatcatacacaaacgcctgagccctatctattactctcatcgctacctccctgacaagcgcctatagcactcgaataattcttctcaccctaacaggtcaacctcgcttccccacccttactaacattaacgaaaataaccccaccctactaaaccccattaaacgcctggcagccggaagcctattcgcaggatttctcattactaacaacatttcccccgcatcccccttccaaacaacaatccccctctacctaaaactcacagccctcgctgtcactttcctaggacttctaacagccctagacctcaactacctaaccaacaaacttaaaataaaatccccactatgcacattttatttctccaacatactcggattctaccctagcatcacacaccgcacaatcccctatctaggccttcttacgagccaaaacctgcccctactcctcctagacctaacctgactagaaaagctattacctaaaacaatttcacagcaccaaatctccacctccatcatcacctcaacccaaaaaggcataattaaactttacttcctctctttcttcttcccactcatcctaaccctactcctaatcacataacctattcccccgagcaatctcaattacaatatatacaccaacaaacaatgttcaaccagtaactactactaatcaacgcccataatcatacaaagcccccgcaccaataggatcctcccgaatcaaccctgacccctctccttcataaattattcagcttcctacactattaaagtttaccacaaccaccaccccatcatactctttcacccacagcaccaatcctacctccatcgctaaccccactaaaacactcaccaagacctcaacccctgacccccatgcctcaggatactcctcaatagccatcgctgtagtatatccaaagacaaccatcattccccctaaataaattaaaaaaactattaaacccatataacctcccccaaaattcagaataataacacacccgaccacaccgctaacaatcaatactaaacccccataaataggagaaggcttagaagaaaaccccacaaaccccattactaaacccacactcaacagaaacaaagcatacatcattattctcgcacggactacaaccacgaccaatgatatgaaaaaccatcgttgtatttcaactacaagaacaccaatgaccccaatacgcaaaactaaccccctaataaaattaattaaccactcattcatcgacctccccaccccatccaacatctccgcatgatgaaacttcggctcactccttggcgcctgcctgatcctccaaatcaccacaggactattcctagccatgcactactcaccagacgcctcaaccgccttttcatcaatcgcccacatcactcgagacgtaaattatggctgaatcatccgctaccttcacgccaatggcgcctcaatattctttatctgcctcttcctacacatcgggcgaggcctatattacggatcatttctctactcagaaacctgaaacatcggcattatcctcctgcttgcaactatagcaacagccttcataggctatgtcctcccgtgaggccaaatatcattctgaggggccacagtaattacaaacttactatccgccatcccatacattgggacagacctagttcaatgaatctgaggaggctactcagtagacagtcccaccctcacacgattctttacctttcacttcatcttgcccttcattattgcagccctagcagcactccacctcctattcttgcacgaaacgggatcaaacaaccccctaggaatcacctcccattccgataaaatcaccttccacccttactacacaatcaaagacgccctcggcttacttctcttccttctctccttaatgacattaacactattctcaccagacctcctaggcgacccagacaattataccctagccaaccccttaaacacccctccccacatcaagcccgaatgatatttcctattcgcctacacaattctccgatccgtccctaacaaactaggaggcgtccttgccctattactatccatcctcatcctagcaataatccccatcctccatatatccaaacaacaaagcataatatttcgcccactaagccaatcactttattgactcctagccgcagacctcctcattctaacctgaatcggaggacaaccagtaagctacccttttaccatcattggacaagtagcatccgtactatacttcacaacaatcctaatcctaataccaactatctccctaattgaaaacaaaatactcaaatgggcctgtccttgtagtataaactaatacaccagtcttgtaaaccggagatgaaaacctttttccaaggacaaatcagagaaaaagtctttaactccaccattagcacccaaagctaagattctaatttaaactattctctgttctttcatggggaagcagatttgggtaccacccaagtattgactcacccatcaacaaccgctatgtatttcgtacattactgccagccaccatgaatattgtacggtaccataaatacttgaccacctgtagtacataaaaacccaatccacatcaaaaccccctccccatgcttacaagcaagtacagcaatcaaccctcaactatcacgcatcaactgcaactccaaagccacccctcacccactaggataccaacaaacctactcgcccttaacagtacatagtacataaagccatttaccgtacatagcacattacagtcaaatcccttctcgtccccatggatgacccccctcagataggggtcccttgatcaccatcctccgtgaaatcaatatcccgcacaagagtgctactctcctcgctccgggcccataacacttgggggtagctaaagtgaactgtatccgacatctggttcctacttcagggtcataaagcctaaatagcccacacgttccccttaaataagacatcacgatg

SEQ ID NO: 107 - DNA, 16571 bp, Homo sapiens mitochondrial
  3109: "n" refers to a nucleotide at position 3107 of the Cambridge Reference Sequence (CRS, Anderson et al. 1981 Nature 290:457-465), later determined to be absent from the human mtDNA sequence according to the revised CRS (rCRS, Andrews et al. 1999 Nature Genetics 23:147); "n" therefore represents a single nucleotide deletion at a position corresponding to nucleotide 3107 of SEQ ID NO:1 as provided herein.
gatcacaggtctatcaccctattaaccactcacgggagctctccatgcatttggtattttcgtctggggggtatgcacgcgatagcattgcgagacgctggagccggagcaccctatgtcgcagtatctgtctttgattcctgcctcatcctattatttatcgcacctacgttcaatattacaggcgaacatacctactaaagtgtgttaattaattaatgcttgtaggacataataataacaattgaatgtctgcgcagccgctttccacacagacatcataacaaaaaatttccaccaaaccccccctcccccccgcttctggccacagcacttaaacacatctctgccaaaccccaaaaacaaagaaccctaacaccagcctaaccagatttcaaattttatcttttggcggtatgcacttttaacagtcaccccccaactaacacattattttcccctcccactcccatactaccaatctcatcaatacaacccccgcccatcctacccagcacacacacaccgctgctaaccccataccccgaaccaaccaaaccccaaagacaccccccacagtttatgtagcttacctcctcaaagcaatacactgaaaatgtttagacgggctcacatcaccccataaacaaataggtttggtcctagcctttctattagctcttagtaagattacacatgcaagcatccccgttccagtgagttcaccctctaaatcaccacgatcaaaagggacaagcatcaagcacgcagcaatgcagctcaaaacgcttagcctagccacacccccacgggaaacagcagtgattaacctttagcaataaacgaaagtttaactaagctatactaaccccagggttggtcaatttcgtgccagccaccgcggtcacacgattaacccaagtcaatagaagccggcgtaaagagtgttttagatcaccccctccccaataaagctaaaactcacctgagttgtaaaaaactccagttgacacaaaatagactacgaaagtggctttaacatatctgaacacacaatagctaagacccaaactgggattagataccccactatgcttagccctaaacctcaacagttaaatcaacaaaactgctcgccagaacactacgagccacagcttaaaactcaaaggacctggcggtgcttcatatccctctagaggagcctgttctgtaatcgataaaccccgatcaacctcaccacctcttgctcagcctatataccgccatcttcagcaaaccctgatgaaggctacaaagtaagcgcaagtacccacgtaaagacgttaggtcaaggtgtagcccatgaggtggcaagaaatgggctacattttctaccccagaaaactacgatagcccttatgaaacttaagggtcgaaggtggatttagcagtaaactgagagtagagtgcttagttgaacagggccctgaagcgcgtacacaccgcccgtcaccctcctcaagtatacttcaaaggacatttaactaaaacccctacgcatttatatagaggagacaagtcgtaacatggtaagtgtactggaaagtgcacttggacgaaccagagtgtagcttaacacaaagcacccaacttacacttaggagatttcaacttaacttgaccgctctgagctaaacctagccccaaacccactccaccttactaccagacaaccttagccaaaccatttacccaaataaagtataggcgatagaaattgaaacctggcgcaatagatatagtaccgcaagggaaagatgaaaaattataaccaagcataatatagcaaggactaacccctataccttctgcataatgaattaactagaaataactttgcaaggagagccaaagctaagacccccgaaaccagacgagctacctaagaacagctaaaagagcacacccgtctatgtagcaaaatagtgggaagatttataggtagaggcgacaaacctaccgagcctggtgatagctggttgtccaagatagaatcttagttcaactttaaatttgcccacagaaccctctaaatccccttgtaaatttaactgttagtccaaagaggaacagctctttggacactaggaaaaaaccttgtagagagagtaaaaaatttaacacccatagtaggcctaaaagcagccaccaattaagaaagcgttcaagctcaacacccactacctaaaaaatcccaaacatataactgaactcctcacacccaattggaccaatctatcaccctatagaagaactaatgttagtataagtaacatgaaaacattctcctccgcataagcctgcgtcagattaaaacactgaactgacaattaacagcccaatatctacaatcaaccaacaagtcattattaccctcactgtcaacccaacacaggcatgctcataaggaaaggttaaaaaaagtaaaaggaactcggcaaatcttaccccgcctgtttaccaaaaacatcacctctagcatcaccagtattagaggcaccgcctgcccagtgacacatgtttaacggccgcggtaccctaaccgtgcaaaggtagcataatcacttgttccttaaatagggacctgtatgaatggctccacgagggttcagctgtctcttacttttaaccagtgaaattgacctgcccgtgaagaggcgggcataacacagcaagacgagaagaccctatggagctttaatttattaatgcaaacagtacctaacaaacccacaggtcctaaactaccaaacctgcattaaaaatttcggttggggcgacctcggagcagaacccaacctccgagcagtacatgctaagacttcaccagtcaaagcgaactactatactcaattgatccaataacttgaccaacggaacaagttaccctagggataacagcgcaatcctattctagagtccatatcaacaatagggtttacgacctcgatgttggatcaggacatcccaatggtgcagccgctattaaaggttcgtttgttcaacgattaaagtcctacgtgatctgagttcagaccggagtaatccaggtcggtttctatctacnttcaaattcctccctgtacgaaaggacaagagaaataaggcctacttcacaaagcgccttcccccgtaaatgatatcatctcaacttagtattatacccacacccacccaagaacagggtttgttaagatggcagagcccggtaatcgcataaaacttaaaactttacagtcagaggttcaattcctcttcttaacaacatacccatggccaacctcctactcctcattgtacccattctaatcgcaatggcattcctaatgcttaccgaacgaaaaattctaggctatatacaactacgcaaaggccccaacgttgtaggcccctacgggctactacaacccttcgctgacgccataaaactcttcaccaaagagcccctaaaacccgccacatctaccatcaccctctacatcaccgccccgaccttagctctcaccatcgctcttctactatgaacccccctccccatacccaaccccctggtcaacctcaacctaggcctcctatttattctagccacctctagcctagccgtttactcaatcctctgatcagggtgagcatcaaactcaaactacgccctgatcggcgcactgcgagcagtagcccaaacaatctcatatgaagtcaccctagccatcattctactatcaacattactaataagtggctcctttaacctctccacccttatcacaacacaagaacacctctgattactcctgccatcatgacccttggccataatatgatttatctccacactagcagagaccaaccgaacccccttcgaccttgccgaaggggagtccgaactagtctcaggcttcaacatcgaatacgccgcaggccccttcgccctattcttcatagccgaatacacaaacattattataataaacaccctcaccactacaatcttcctaggaacaacatatgacgcactctcccctgaactctacacaacatattttgtcaccaagaccctacttctaacctccctgttcttatgaattcgaacagcatacccccgattccgctacgaccaactcatacacctcctatgaaaaaacttcctaccactcaccctagcattacttatatgatatgtctccatacccattacaatctccagcattccccctcaaacctaagaaatatgtctgataaaagagttactttgatagagtaaataataggagcttaaacccccttatttctaggactatgagaatcgaacccatccctgagaatccaaaattctccgtgccacctatcacaccccatcctaaagtaaggtcagctaaataagctatcgggcccataccccgaaaatgttggttatacccttcccgtactaattaatcccctggcccaacccgtcatctactctaccatctttgcaggcacactcatcacagcgctaagctcgcactgattttttacctgagtaggcctagaaataaacatgctagcttttattccagttctaaccaaaaaaataaaccctcgttccacagaagctgccatcaagtatttcctcacgcaagcaaccgcatccataatccttctaatagctatcctcttcaacaatatactctccggacaatgaaccataaccaatactaccaatcaatactcatcattaataatcataatggctatagcaataaaactaggaatagccccctttcacttctgagtcccagaggttacccaaggcacccctctgacatccggcctgcttcttctcacatgacaaaaactagcccccatctcaatcatataccaaatctctccctcactaaacgtaagccttctcctcactctctcaatcttatccatcatagcaggcagttgaggtggattaaaccaaacccagctacgcaaaatcttagcatactcctcaattacccacataggatgaataatagcagttctaccgtacaaccctaacataaccattcttaatttaactatttatattatcctaactactaccgcattcctactactcaacttaaactccagcaccacgaccctactactatctcgcacctgaaacaagctaacatgactaacacccttaattccatccaccctcctctccctaggaggcctgcccccgctaaccggctttttgcccaaatgggccattatcgaagaattcacaaaaaacaatagcctcatcatccccaccatcatagccaccatcaccctccttaacctctacttctacctacgcctaatctactccacctcaatcacactactccccatatctaacaacgtaaaaataaaatgacagtttgaacatacaaaacccaccccattcctccccacactcatcgcccttaccacgctactcctacctatctccccttttatactaataatcttatagaaatttaggttaaatacagaccaagagccttcaaagccctcagtaagttgcaatacttaatttctgtaacagctaaggactgcaaaaccccactctgcatcaactgaacgcaaatcagccactttaattaagctaagcccttactagaccaatgggacttaaacccacaaacacttagttaacagctaagcaccctaatcaactggcttcaatctacttctcccgccgccgggaaaaaaggcgggagaagccccggcaggtttgaagctgcttcttcgaatttgcaattcaatatgaaaatcacctcggagctggtaaaaagaggcctaacccctgtctttagatttacagtccaatgcttcactcagccattttacctcacccccactgatgttcgccgaccgttgactattctctacaaaccacaaagacattggaacactatacctattattcggcgcatgagctggagtcctaggcacagctctaagcctccttattcgagccgagctgggccagccaggcaaccttctaggtaacgaccacatctacaacgttatcgtcacagcccatgcatttgtaataatcttcttcatagtaatacccatcataatcggaggctttggcaactgactagttcccctaataatcggtgcccccgatatggcgtttccccgcataaacaacataagcttctgactcttacctccctctctcctactcctgctcgcatctgctatagtggaggccggagcaggaacaggttgaacagtctaccctcccttagcagggaactactcccaccctggagcctccgtagacctaaccatcttctccttacacctagcaggtgtctcctctatcttaggggccatcaatttcatcacaacaattatcaatataaaaccccctgccataacccaataccaaacgcccctcttcgtctgatccgtcctaatcacagcagtcctacttctcctatctctcccagtcctagctgctggcatcactatactactaacagaccgcaacctcaacaccaccttcttcgaccccgccggaggaggagaccccattctataccaacacctattctgatttttcggtcaccctgaagtttatattcttatcctaccaggcttcggaataatctcccatattgtaacttactactccggaaaaaaagaaccatttggatacataggtatggtctgagctatgatatcaattggcttcctagggtttatcgtgtgagcacaccatatatttacagtaggaatagacgtagacacacgagcatatttcacctccgctaccataatcatcgctatccccaccggcgtcaaagtatttagctgactcgccacactccacggaagcaatatgaaatgatctgctgcagtgctctgagccctaggattcatctttcttttcaccgtaggtggcctgactggcattgtattagcaaactcatcactagacatcgtactacacgacacgtactacgttgtagcccacttccactatgtcctatcaataggagctgtatttgccatcataggaggcttcattcactgatttcccctattctcaggctacaccctagaccaaacctacgccaaaatccatttcactatcatattcatcggcgtaaatctaactttcttcccacaacactttctcggcctatccggaatgccccgacgttactcggactaccccgatgcatacaccacatgaaacatcctatcatctgtaggctcattcatttctctaacagcagtaatattaataattttcatgatttgagaagccttcgcttcgaagcgaaaagtcctaatagtagaagaaccctccataaacctggagtgactatatggatgccccccaccctaccacacattcgaagaacccgtatacataaaatctagacaaaaaaggaaggaatcgaaccccccaaagctggtttcaagccaaccccatggcctccatgactttttcaaaaaggtattagaaaaaccatttcataactttgtcaaagttaaattataggctaaatcctatatatcttaatggcacatgcagcgcaagtaggtctacaagacgctacttcccctatcatagaagagcttatcacctttcatgatcacgccctcataatcattttccttatctgcttcctagtcctgtatgcccttttcctaacactcacaacaaaactaactaatactaacatctcagacgctcaggaaatagaaaccgtctgaactatcctgcccgccatcatcctagtcctcatcgccctcccatccctacgcatcctttacataacagacgaggtcaacgatccctcccttaccatcaaatcaattggccaccaatggtactgaacctacgagtacaccgactacggcggactaatcttcaactcctacatacttcccccattattcctagaaccaggcgacctgcgactccttgacgttgacaatcgagtagtactcccgattgaagcccccattcgtataataattacatcacaagacgtcttgcactcatgagctgtccccacattaggcttaaaaacagatgcaattcccggacgtctaaaccaaaccactttcaccgctacacgaccgggggtatactacggtcaatgctctgaaatctgtggagcaaaccacagtttcatgcccatcgtcctagaattaattcccctaaaaatctttgaaatagggcccgtatttaccctatagcaccccctctaccccctctagagcccactgtaaagctaacttagcattaaccttttaagttaaagattaagagaaccaacacctctttacagtgaaatgccccaactaaatactaccgtatggcccaccataattacccccatactccttacactattcctcatcacccaactaaaaatattaaacacaaactaccacctacccccctcaccaaagcccataaaaataaaaaattataacaaaccctgagaaccaaaatgaacgaaaatctgttcgcttcattcattgcccccacaatcctaggcctacccgccgcagtactgatcattctatttccccctctattgatccccacctccaaatatctcatcaacaaccgactaatcaccacccaacaatgactaatcaaactaacctcaaaacaaatgataaccatacacaacactaaaggacgaacctgatctcttatactagtatccttaatcatttttattgccacaactaacctcctcggactcctgcctcactcatttacaccaaccacccaactatctataaacctagccatggccatccccttatgagcgggcgcagtgattataggctttcgctctaagattaaaaatgccctagcccacttcttaccacaaggcacacctacaccccttatccccatactagttattatcgaaaccatcagcctactcattcaaccaatagccctggccgtacgcctaaccgctaacattactgcaggccacctactcatgcacctaattggaagcgccaccctagcaatatcaaccattaaccttccctctacacttatcatcttcacaattctaattctactgactatcctagaaatcgctgtcgccttaatccaagcctacgttttcacacttctagtaagcctctacctgcacgacaacacataatgacccaccaatcacatgcctatcatatagtaaaacccagcccatgacccctaacaggggccctctcagccctcctaatgacctccggcctagccatgtgatttcacttccactccataacgctcctcatactaggcctactaaccaacacactaaccatataccaatgatggcgcgatgtaacacgagaaagcacataccaaggccaccacacaccacctgtccaaaaaggccttcgatacgggataatcctatttattacctcagaagtttttttcttcgcaggatttttctgagccttttaccactccagcctagcccctaccccccaattaggagggcactggcccccaacaggcatcaccccgctaaatcccctagaagtcccactcctaaacacatccgtattactcgcatcaggagtatcaatcacctgagctcaccatagtctaatagaaaacaaccgaaaccaaataattcaagcactgcttattacaattttactgggtctctattttaccctcctacaagcctcagagtacttcgagtctcccttcaccatttccgacggcatctacggctcaacattttttgtagccacaggcttccacggacttcacgtcattattggctcaactttcctcactatctgcttcatccgccaactaatatttcactttacatccaaacatcactttggcttcgaagccgccgcctgatactggcattttgtagatgtggtttgactatttctgtatgtctccatctattgatgagggtcttactcttttagtataaatagtaccgttaacttccaattaactagttttgacaacattcaaaaaagagtaataaacttcgccttaattttaataatcaacaccctcctagccttactactaataattattacattttgactaccacaactcaacggctacatagaaaaatccaccccttacgagtgcggcttcgaccctatatcccccgcccgcgtccctttctccataaaattcttcttagtagctattaccttcttattatttgatctagaaattgccctccttttacccctaccatgagccctacaaacaactaacctgccactaatagttatgtcatccctcttattaatcatcatcctagccctaagtctggcctatgagtgactacaaaaaggattagactgaaccgaattggtatatagtttaaacaaaacgaatgatttcgactcattaaattatgataatcatatttaccaaatgcccctcatttacataaatattatactagcatttaccatctcacttctaggaatactagtatatcgctcacacctcatatcctccctactatgcctagaaggaataatactatcgctgttcattatagctactctcataaccctcaacacccactccctcttagccaatattgtgcctattgccatactagtctttgccgcctgcgaagcagcggtgggcctagccctactagtctcaatctccaacacatatggcctagactacgtacataacctaaacctactccaatgctaaaactaatcgtcccaacaattatattactaccactgacatgactttccaaaaaacacataatttgaatcaacacaaccacccacagcctaattattagcatcatccctctactattttttaaccaaatcaacaacaacctatttagctgttccccaaccttttcctccgaccccctaacaacccccctcctaatactaactacctgactcctacccctcacaatcatggcaagccaacgccacttatccagtgaaccactatcacgaaaaaaactctacctctctatactaatctccctacaaatctccttaattataacattcacagccacagaactaatcatattttatatcttcttcgaaaccacacttatccccaccttggctatcatcacccgatgaggcaaccagccagaacgcctgaacgcaggcacatacttcctattctacaccctagtaggctcccttcccctactcatcgcactaatttacactcacaacaccctaggctcactaaacattctactactcactctcactgcccaagaactatcaaactcctgagccaacaacttaatatgactagcttacacaatagcttttatagtaaagatacctctttacggactccacttatgactccctaaagcccatgtcgaagcccccatcgctgggtcaatagtacttgccgcagtactcttaaaactaggcggctatggtataatacgcctcacactcattctcaaccccctgacaaaacacatagcctaccccttccttgtactatccctatgaggcataattataacaagctccatctgcctacgacaaacagacctaaaatcgctcattgcatactcttcaatcagccacatagccctcgtagtaacagccattctcatccaaaccccctgaagcttcaccggcgcagtcattctcataatcgcccacgggcttacatcctcattactattctgcctagcaaactcaaactacgaacgcactcacagtcgcatcataatcctctctcaaggacttcaaactctactcccactaatagctttttgatgacttctagcaagcctcgctaacctcgccttaccccccactattaacctactgggagaactctctgtgctagtaaccacgttctcctgatcaaatatcactctcctacttacaggactcaacatactagtcacagccctatactccctctacatatttaccacaacacaatggggctcactcacccaccacattaacaacataaaaccctcattcacacgagaaaacaccctcatgttcatacacctatcccccattctcctcctatccctcaaccccgacatcattaccgggttttcctcttgtaaatatagtttaaccaaaacatcagattgtgaatctgacaacagaggcttacgaccccttatttaccgagaaagctcacaagaactgctaactcatgcccccatgtctaacaacatggctttctcaacttttaaaggataacagctatccattggtcttaggccccaaaaattttggtgcaactccaaataaaagtaataaccatgcacactactataaccaccctaaccctgacttccctaattccccccatccttaccaccctcgttaaccctaacaaaaaaaactcatacccccattatgtaaaatccattgtcgcatccacctttattatcagtctcttccccacaacaatattcatgtgcctagaccaagaagttattatctcgaactgacactgagccacaacccaaacaacccagctctccctaagcttcaaactagactacttctccataatattcatccctgtagcattgttcgttacatggtccatcatagaattctcactgtgatatataaactcagacccaaacattaatcagttcttcaaatatctactcatcttcctaattaccatactaatcttagttaccgctaacaacctattccaactgttcatcggctgagagggcgtaggaattatatccttcttgctcatcagttgatgatacgcccgagcagatgccaacacagcagccattcaagcaatcctatacaaccgtatcggcgatatcggtttcatcctcgccttagcatgatttatcctacactccaactcatgagacccacaacaaatagcccttctaaacgctaatccaagccttaccccactactaggcctcctcctagcagcagcaggcaaatcagcccaattaggtctccacccctgactcccctcagccatagaaggccccaccccagtctcagccctactccactcaagcactatagttgtagcaggaatcttcttactcatccgcttccaccccctagcagaaaatagcccactaatccaaactctaacactatgcttaggcgctatcaccactctgttcgcagcagtctgcgcccttacacaaaatgacatcaaaaaaatcgtagccttctccacttcaagtcaactaggactcataatagttacaatcggcatcaatcaaccacacctagcattcctgcacatctgtacccacgccttcttcaaagccatactatttatgtgctccgggtccatcatccacaaccttaacaatgaacaagatattcgaaaaataggaggactactcaaaaccatacctctcacttcaacctccctcaccattggcagcctagcattagcaggaatacctttcctcacaggtttctactccaaagaccacatcatcgaaaccgcaaacatatcatacacaaacgcctgagccctatctattactctcatcgctacctccctgacaagcgcctatagcactcgaataattcttctcaccctaacaggtcaacctcgcttccccacccttactaacattaacgaaaataaccccaccctactaaaccccattaaacgcctggcagccggaagcctattcgcaggatttctcattactaacaacatttcccccgcatcccccttccaaacaacaatccccctctacctaaaactcacagccctcgctgtcactttcctaggacttctaacagccctagacctcaactacctaaccaacaaacttaaaataaaatccccactatgcacattttatttctccaacatactcggattctaccctagcatcacacaccgcacaatcccctatctaggccttcttacgagccaaaacctgcccctactcctcctagacctaacctgactagaaaagctattacctaaaacaatttcacagcaccaaatctccacctccatcatcacctcaacccaaaaaggcataattaaactttacttcctctctttcttcttcccactcatcctaaccctactcctaatcacataacctattcccccgagcaatctcaattacaatatatacaccaacaaacaatgttcaaccagtaactactactaatcaacgcccataatcatacaaagcccccgcaccaataggatcctcccgaatcaaccctgacccctctccttcataaattattcagcttcctacactattaaagtttaccacaaccaccaccccatcatactctttcacccacagcaccaatcctacctccatcgctaaccccactaaaacactcaccaagacctcaacccctgacccccatgcctcaggatactcctcaatagccatcgctgtagtatatccaaagacaaccatcattccccctaaataaattaaaaaaactattaaacccatataacctcccccaaaattcagaataataacacacccgaccacaccgctaacaatcaatactaaacccccataaataggagaaggcttagaagaaaaccccacaaaccccattactaaacccacactcaacagaaacaaagcatacatcattattctcgcacggactacaaccacgaccaatgatatgaaaaaccatcgttgtatttcaactacaagaacaccaatgaccccaatacgcaaaactaaccccctaataaaattaattaaccactcattcatcgacctccccaccccatccaacatctccgcatgatgaaacttcggctcactccttggcgcctgcctgatcctccaaatcaccacaggactattcctagccatgcactactcaccagacgcctcaaccgccttttcatcaatcgcccacatcactcgagacgtaaattatggctgaatcatccgctaccttcacgccaatggcgcctcaatattctttatctgcctcttcctacacatcgggcgaggcctatattacggatcatttctctactcagaaacctgaaacatcggcattatcctcctgcttgcaactatagcaacagccttcataggctatgtcctcccgtgaggccaaatatcattctgaggggccacagtaattacaaacttactatccgccatcccatacattgggacagacctagttcaatgaatctgaggaggctactcagtagacagtcccaccctcacacgattctttacctttcacttcatcttgcccttcattattgcagccctagcagcactccacctcctattcttgcacgaaacgggatcaaacaaccccctaggaatcacctcccattccgataaaatcaccttccacccttactacacaatcaaagacgccctcggcttacttctcttccttctctccttaatgacattaacactattctcaccagacctcctaggcgacccagacaattataccctagccaaccccttaaacacccctccccacatcaagcccgaatgatatttcctattcgcctacacaattctccgatccgtccctaacaaactaggaggcgtccttgccctattactatccatcctcatcctagcaataatccccatcctccatatatccaaacaacaaagcataatatttcgcccactaagccaatcactttattgactcctagccgcagacctcctcattctaacctgaatcggaggacaaccagtaagctacccttttaccatcattggacaagtagcatccgtactatacttcacaacaatcctaatcctaataccaactatctccctaattgaaaacaaaatactcaaatgggcctgtccttgtagtataaactaatacaccagtcttgtaaaccggagatgaaaacctttttccaaggacaaatcagagaaaaagtctttaactccaccattagcacccaaagctaagattctaatttaaactattctctgttctttcatggggaagcagatttgggtaccacccaagtattgactcacccatcaacaaccgctatgtatttcgtacattactgccagccaccatgaatattgtacggtaccataaatacttgaccacctgtagtacataaaaacccaatccacatcaaaaccccctccccatgcttacaagcaagtacagcaatcaaccctcaactatcacacatcaactgcaactccaaagccacccctcacccactaggataccaacaaacctacccacccttaacagtacatagtacataaagccatttaccgtacatagcacattacagtcaaatcccttctcgtccccatggatgacccccctcagataggggtcccttgaccaccatcctccgtgaaatcaatatcccgcacaagagtgctactctcctcgctccgggcccataacacttgggggtagctaaagtgaactgtatccgacatctggttcctacttcagggccataaagcctaaatagcccacacgttccccttaaataagacatcacgatg

SEQ ID NO: 108 - DNA, 16571 bp, Homo sapiens mitochondrial
  3109: "n" refers to a nucleotide at position 3107 of the Cambridge Reference Sequence (CRS, Anderson et al. 1981 Nature 290:457-465), later determined to be absent from the human mtDNA sequence according to the revised CRS (rCRS, Andrews et al. 1999 Nature Genetics 23:147); "n" therefore represents a single nucleotide deletion at a position corresponding to nucleotide 3107 of SEQ ID NO:1 as provided herein.
gatcacaggtctatcaccctattaaccactcacgggagctctccatgcatttggtattttcgtctggggggtgtgcacgcgatagcattgcgagacgctggagccggagcaccctatgtcgcagtatctgtctttgattcctgcctcatcccattatttatcgcacctacgttcaatattacaggcgaacatacctactaaagtgtgttaattaattaatgcttgtaggacataataataacaattgaatgtctgcacagccgctttccacacagacatcataacaaaaaatttccaccaaaccccccctcccccccgcttctggccacagcacttaaacacatctctgccaaaccccaaaaacaaagaaccctaacaccagcctaaccagatttcaaattttatcttttggcggtatgcacttttaacagtcaccccccaactaacacattattttcccctcccactcccatactactaatctcatcaatacaacccccgcccatcctacccagcacacacacaccgctgctaaccccataccccgaaccaaccaaaccccaaagacaccccccacagtttatgtagcttacctcctcaaagcaatacactgaaaatgtttagacgggctcacatcaccccataaacaaataggtttggtcctagcctttctattagctcttagtaagattacacatgcaagcatccccattccagtgagttcaccctctaaatcaccacgatcaaaagggacaagcatcaagcacgcagcaatgcagctcaaaacgcttagcctagccacacccccacgggaaacagcagtgattaacctttagcaataaacgaaagtttaactaagctatactaaccccagggttggtcaatttcgtgccagccaccgcggtcacacgattaacccaagtcaatagaagccggcgtaaagagtgttttagatcaccccctccccaataaagctaaaactcacctgagttgtaaaaaactccagttgacacaaaatagactacgaaagtggctttaacatatctgaacacacaatagctaagacccaaactgggattagataccccactatgcttagccctaaacctcaacagttaaatcaacaaaactgctcgccagaacactacgagccacagcttaaaactcaaaggacctggcggtgcttcatatccctctagaggagcctgttctgtaatcgataaaccccgatcaacctcaccacctcttgctcagcctatataccgccatcttcagcaaaccctgatgaaggctacaaagtaagcgcaagtacccacgtaaagacgttaggtcaaggtgtagcccatgaggtggcaagaaatgggctacattttctaccccagaaaactacgatagcccttatgaaacttaagggtcgaaggtggatttagcagtaaactgagagtagagtgcttagttgaacagggccctgaagcgcgtacacaccgcccgtcaccctcctcaagtatacttcaaaggacatttaactaaaacccctacgcatttatatagaggagacaagtcgtaacatggtaagtgtactggaaagtgcacttggacgaaccagagtgtagcttaacacaaagcacccaacttacacttaggagatttcaacttaacttgaccgctctgagctaaacctagccccaaacccactccaccttactaccagacaaccttagccaaaccatttacccaaataaagtataggcgatagaaattgaaacctggcgcaatagatatagtaccgcaagggaaagatgaaaaattataaccaagcataatatagcaaggactaacccctataccttctgcataatgaattaactagaaataactttgcaaggagaaccaaagctaagacccccgaaaccagacgagctacctaagaacagctaaaagagcacacccgtctatgtagcaaaatagtgggaagatttataggtagaggcgacaaacctaccgagcctggtgatagctggttgtccaagatagaatcttagttcaactttaaatttgcccacagaaccctctaaatccccttgtaaatttaactgttagtccaaagaggaacagctctttggacactaggaaaaaaccttgtagagagagtaaaaaatttaacacccatagtaggcctaaaagcagccaccaattaagaaagcgttcaagctcaacacccactacctaaaaaatcccaaacatataactgaactcctcacacccaattggaccaatctatcaccctatagaagaactaatgttagtataagtaacatgaaaacattctcctccgcataagcctgcgtcagattaaaacactgaactgacaattaacagcccaatatctacaatcaaccaacaagtcattattaccctcactgtcaacccaacacaggcatgctcataaggaaaggttaaaaaaagtaaaaggaactcggcaaatcttaccccgcctgtttaccaaaaacatcacctctagcatcaccagtattagaggcaccgcctgcccagtgacacatgtttaacggccgcggtaccctaaccgtgcaaaggtagcataatcacttgttccttaaatagggacctgtatgaatggctccacgagggttcagctgtctcttacttttaaccagtgaaattgacctgcccgtgaagaggcgggcatgacacagcaagacgagaagaccctatggagctttaatttattaatgcaaacagtacctaacaaacccacaggtcctaaactaccaaacctgcattaaaaatttcggttggggcgacctcggagcagaacccaacctccgagcagtacatgctaagacttcaccagtcaaagcgaactactatactcaattgatccaataacttgaccaacggaacaagttaccctagggataacagcgcaatcctattctagagtccatatcaacaatagggtttacgacctcgatgttggatcaggacatcccgatggtgcagccgctattaaaggttcgtttgttcaacgattaaagtcctacgtgatctgagttcagaccggagtaatccaggtcggtttctatctacnttcaaattcctccctgtacgaaaggacaagagaaataaggcctacttcacaaagcgccttcccccgtaaatgatatcatctcaacttagtattatacccacacccacccaagaacagggtttgttaagatggcagagcccggtaatcgcataaaacttaaaactttacagtcagaggttcaattcctcttcttaacaacatacccatggccaacctcctactcctcattgtacccattctaatcgcaatggcattcctaatgcttaccgaacgaaaaattctaggctatatacaactacgcaaaggccccaacgttgtaggcccctacgggctactacaacccttcgctgacgccataaaactcttcaccaaagagcccctaaaacccgccacatctaccatcaccctctacatcaccgccccgaccttagctctcaccatcgctcttctactatgaacccccctccccatacccaaccccctggtcaacctcaacctaggcctcctatttattctagccacctctagcctagccgtttactcaatcctctgatcagggtgagcatcaaactcaaactacgccctgatcggcgcactgcgagcagtagcccaaacaatctcatatgaagtcaccctagccatcattctactatcaacattactaataagtggctcctttaacctctccacccttatcacaacacaagaacacctctgattactcctgccatcatgacccttggccataatatgatttatctccacactagcagagaccaaccgaacccccttcgaccttgccgaaggggagtccgaactagtctcaggcttcaacatcgaatacgccgcaggccccttcgccctattcttcatagccgaatacacaaacattattataataaacaccctcaccactacaatcttcctaggaacaacatatgacgcactctcccctgaactctacacaacatattttgtcaccaagaccctacttctaacctccctgttcttatgaattcgaacagcatacccccgattccgctacgaccaactcatacacctcctatgaaaaaacttcctaccactcaccctagcattacttatatgacatgtctccatacccattacaatctccagcattccccctcaaacctaagaaatatgtctgataaaagagttactttgatagagtaaataataggagcttaaacccccttatttctaggactatgagaatcgaacccatccctgagaatccaaaattctccgtgccacctatcacaccccatcctaaagtaaggtcagctaaataagctatcgggcccataccccgaaaatgttggttatacccttcccgtactaattaatcccctggcccaacccgtcatctactctaccatctttgcaggcacactcatcacagcgctaagctcgcactgattttttacctgagtaggcctagaaataaacatgctagcttttattccagttctaaccaaaaaaataaaccctcgttccacagaagctgccatcaagtatttcctcacgcaagcaaccgcatccataatccttctaatagctatcctcttcaacaatatactctccggacaatgaaccataaccaatactaccaatcaatactcatcattaataatcataatggctatagcaataaaactaggaatagccccctttcacttctgagtcccagaggttacccaaggcacccctctgacatccggcctgcttcttctcacatgacaaaaactagcccccatctcaatcatataccaaatctctccctcactagacgtaagccttctcctcactctctcaatcttatccatcatagcaggcagttgaggtggattaaaccaaacccagctacgcaaaatcttagcatactcctcaattacccacataggatgaataatagcagttctaccgtacaaccctaacataaccattcttaatttaactatttatattatcctaactactaccgcattcctactactcaacttaaactccagcaccacgaccctactactatctcgcacctgaaacaagctaacatgactaacacccttaattccatccaccctcctctccctaggaggcctgcccccgctaaccggctttttgcccaaatgggccattatcgaagaattcacaaaaaacaatagcctcatcatccccaccatcatagccaccatcaccctccttaacctctacttctacctacgcctaatctactccacctcaatcacactactccccatatctaacaacgtaaaaataaaatgacagtttgaacatacaaaacccaccccattcctccccacactcatcgcccttaccacgctactcctacctatctccccttttatactaataatcttatagaaatttaggttaaatacagaccaagagccttcaaagccctcagtaagttgcaatacttaatttctgtaacagctaaggactgcaaaaccccactctgcatcaactgaacgcaaatcagccactttaattaagctaagcccttactagaccaatgggacttaaacccacaaacacttagttaacagctaagcaccctaatcaactggcttcaatctacttctcccgccgccgggaaaaaaggcgggagaagccccggcaggtttgaagctgcttcttcgaatttgcaattcaatatgaaaatcacctcggagctggtaaaaagaggcctaacccctgtctttagatttacagtccaatgcttcactcagccattttacctcacccccactgatgttcgccgaccgttgactattctctacaaaccacaaagacattggaacactatacctattattcggcgcatgagctggagtcctaggcacagctctaagcctccttattcgagccgagctgggccagccaggcaaccttctaggtaacgaccacatctacaacgttatcgtcacagcccatgcatttgtaataatcttcttcatagtaatacccatcataatcggaggctttggcaactgactagttcccctaataatcggtgcccccgatatggcgtttccccgcataaacaacataagcttctgactcttacctccctctctcctactcctgctcgcatctgctatagtggaggccggagcaggaacaggttgaacagtctaccctcccttagcagggaactactcccaccctggagcctccgtagacctaaccatcttctccttacacctagcaggtgtctcctctatcttaggggccatcaatttcatcacaacaattatcaatataaaaccccctgccataacccaataccaaacgcccctcttcgtctgatccgtcctaatcacagcagtcctacttctcctatctctcccagtcctagctgctggcatcactatactactaacagaccgcaacctcaacaccaccttcttcgaccccgccggaggaggagaccccattctataccaacacctattctgatttttcggtcaccctgaagtttatattcttatcctaccaggcttcggaataatctcccatattgtaacttactactccggaaaaaaagaaccatttggatacataggtatggtctgagctatgatatcaattggcttcctagggtttatcgtgtgagcacaccatatatttacagtaggaatagacgtagacacacgagcatatttcacctccgctaccataatcatcgctatccccaccggcgtcaaagtatttagctgactcgccacactccacggaagcaatatgaaatgatctgctgcagtgctctgagccctaggattcatctttcttttcaccgtaggtggcctgactggcattgtattagcaaactcatcactagacatcgtactacacgacacgtactacgttgtagctcacttccactatgtcctatcaataggagctgtatttgccatcataggaggcttcattcactgatttcccctattctcaggctacaccctagaccaaacctacgccaaaatccatttcactatcatattcatcggcgtaaatctaactttcttcccacaacactttctcggcctatccggaatgccccgacgttactcggactaccccgatgcatacaccacatgaaacatcctatcatctgtaggctcattcatttctctaacagcagtaatattaataattttcatgatttgagaagccttcgcttcgaagcgaaaagtcctaatagtagaagaaccctccataaacctggagtgactatatggatgccccccaccctaccacacattcgaagaacccgtatacataaaatctagacaaaaaaggaaggaatcgaaccccccaaagctggtttcaagccaaccccatggcctccatgactttttcaaaaaggtattagaaaaaccatttcataactttgtcaaagttaaattataggctaaatcctatatatcttaatggcacatgcagcgcaagtaggtctacaagacgctacttcccctatcatagaagagcttatcacctttcatgatcacgccctcataatcattttccttatctgcttcctagtcctgtatgcccttttcctaacactcacaacaaaactaactaatactaacatctcagacgctcaggaaatagaaaccgtctgaactatcctgcccgccatcatcctagtcctcatcgccctcccatccctacgcatcctttacataacagacgaggtcaacgatccctcccttaccatcaaatcaattggccaccaatggtactgaacctacgagtacaccgactacggcggactaatcttcaactcctacatacttcccccattattcctagaaccaggcgacctgcgactccttgacgttgacaatcgagtagtactcccgattgaagcccccattcgtataataattacatcacaagacgtcttgcactcatgagctgtccccacattaggcttaaaaacagatgcaattcccggacgtctaaaccaaaccactttcaccgctacacgaccgggggtatactacggtcaatgctctgaaatctgtggagcaaaccacagtttcatgcccatcgtcctagaattaattcccctaaaaatctttgaaatagggcccgtatttaccctatagcaccccctctaccccctctagagcccactgtaaagctaacttagcattaaccttttaagttaaagattaagagaaccaacacctctttacagtgaaatgccccaactaaatactaccgtatggcccaccataattacccccatactccttacactattcctcatcacccaactaaaaatattaaacacaaactaccacctacctccctcaccaaagcccataaaaataaaaaattataacaaaccctgagaaccaaaatgaacgaaaatctgttcgcttcattcattgcccccacaatcctaggcctacccgccgcagtactgatcattctatttccccctctattgatccccacctccaaatatctcatcaacaaccgactaatcaccacccaacaatgactaatcaaactaacctcaaaacaaataataaccatacacaacactaaaggacgaacctgatctcttatactagtatccttaatcatttttattgccacaactaacctcctcggactcctgcctcactcatttacaccaaccacccaactatctataaacctagccatggccatccccttatgagcgggcgcagtgattataggctttcgctctaagattaaaaatgccctagcccacttcttaccacaaggcacacctacaccccttatccccatactagttattatcgaaaccatcagcctactcattcaaccaatagccctggccgtacgcctaaccgctaacattactgcaggccacctactcatgcacctaattggaagcgccaccctagcaatatcaaccattaaccttccctctacacttatcatcttcacaattctaattctactgactatcctagaaatcgctgtcgccttaatccaagcctacgttttcacacttctagtaagcctctacctgcacgacaacacataatgacccaccaatcacatgcctatcatatagtaaaacccagcccatgacccctaacaggggccctctcagccctcctaatgacctccggcctagccatgtgatttcacttccactccataacgctcctcatactaggcctactaaccaacacactaaccatataccaatgatggcgcgatgtaacacgagaaagcacataccaaggccaccacacaccacctgtccaaaaaggccttcgatacgggataatcctatttattacctcagaagtttttttcttcgcaggatttttctgagccttttaccactccagcctagcccctaccccccaattaggagggcactggcccccaacaggcatcaccccgctaaatcccctagaagtcccactcctaaacacatccgtattactcgcatcaggagtatcaatcacctgagctcaccatagtctaatagaaaacaaccgaaaccaaataattcaagcactgcttattacaattttactgggtctctattttaccctcctacaagcctcagagtacttcgagtctcccttcaccatttccgacggcatctacggctcaacattttttgtagccacaggcttccacggacttcacgtcattattggctcaactttcctcactatctgcttcatccgccaactaatatttcactttacatccaaacaccactttggcttcgaagccgccgcctgatactggcattttgtagatgtggtttgactatttctgtatgtctccatctattgatgagggtcttactcttttagtataaatagtaccgttaacttccaattaactagttttgacaacattcaaaaaagagtaataaacttcgccttaattttaataatcaacaccctcctagccttactactaataattattacattttgactaccacaactcaacggctacatagaaaaatccaccccttacgagtgcggcttcgaccctatatcccccgcccgcgtccctttctccataaaattcttcttagtagctattaccttcttattatttgatctagaaattgccctccttttacccctaccatgagccctacaaacaactaacctgccactaatagttatgtcatccctcttattaatcatcatcctagccctaagtctggcctatgagtgactacaaaaaggattagactgaaccgaattggtatatagtttaaacaaaacgaatgatttcgactcattaaattatgataatcatatctaccaaatgcccctcatttacataaatattatactagcatttaccatctcacttctaggaatactagtatatcgctcacacctcatatcctccctactatgcctagaaggaataatactatcgctgttcattatagctactctcataaccctcaacacccactccctcttagccaatattgtgcctattgccatactagtctttgccgcctgcgaagcagcggtgggcctagccctactagtctcaatctccaacacatatggcctagactacgtacataacctaaacctactccaatgctaaaactaatcgtcccaacaattatattactaccactgacatgactttccaaaaaacacataatttgaatcaacacaaccacccacagcctaattattagcatcatccctctactattttttaaccaaatcaacaacaacctatttagctgttccccaaccttttcctccgaccccctaacaacccccctcctaatactaactacctgactcctacccctcacaatcatggcaagccaacgccacttatccagtgaaccactatcacgaaaaaaactctacctctctatactaatctccctacaaatctccttaattataacattcacagccacagaactaatcatattttatatcttcttcgaaaccacacttatccccaccttggctatcatcacccgatgaggcaaccagccagaacgcctgaacgcaggcacatacttcctattctacaccctagtaggctcccttcccctactcatcgcactgatttacactcacaacaccctaggctcactaaacattctactactcactctcactgcccaagaactatcaaactcctgagccaacaacttaatatgactagcttacacaatagcttttatagtaaagatacctctttacggactccacttatgactccctaaagcccatgtcgaagcccccatcgctgggtcaatagtacttgccgcagtactcttaaaactaggcggctatggtataatacgcctcacactcattctcaaccccctgacaaaacacatagcctaccccttccttgtactatccctatgaggcataattataacaagctccatctgcctacgacaaacagacctaaaatcgctcattgcatactcttcaatcagccacatagccctcgtagtaacagccattctcatccaaaccccctgaagcttcaccggcgcagtcattctcataatcgcccacggacttacatcctcattactattctgcctagcaaactcaaactacgaacgcactcacagtcgcatcataatcctctctcaaggacttcaaactctactcccactaatagctttttgatgacttctagcaagcctcgctaacctcgccttaccccccactattaacctactgggagaactctctgtgctagtaaccacgttctcctgatcaaatatcactctcctacttacaggactcaacatactagtcacagccctatactccctctacatatttaccacaacacaatggggctcactcacccaccacattaacaacataaaaccctcattcacacgagaaaacaccctcatgttcatacacctatcccccattctcctcctatccctcaaccccgacatcattaccgggttttcctcttgtaaatatagtttaaccaaaacatcagattgtgaatctgacaacagaggcttacgaccccttatttaccgagaaagctcacaagaactgctaactcatgcccccatgtctaacaacatggctttctcaacttttaaaggataacagctatccattggtcttaggccccaaaaattttggtgcaactccaaataaaagtaataaccatgcacactactataaccaccctaaccctgacttccctaattccccccatccttaccaccctcgttaaccctaacaaaaaaaactcatacccccattatgtaaaatccattgtcgcatccacctttattatcagtctcttccccacaacaatattcatgtgcctagaccaagaagttattatctcgaactgacactgagccacaacccaaacaacccagctctccctaagcttcaaactagactacttctccataatattcatccctgtagcattgttcgttacatggtcaatcatagaattctcactgtgatatataaactcagacccaaacattaatcagttcttcaaatatctactcatcttcctaattaccatactaatcttagttaccgctaacaacctattccaactgttcatcggctgagagggcgtaggaattatatccttcttgctcatcagttgatgatacgcccgagcagatgccaacacagcagccattcaagcaatcctatacaaccgtatcggcgatatcggtttcatcctcgccttagcatgatttatcctacactccaactcatgagacccacaacaaatagcccttctaaacgctaatccaagcctcaccccactactaggcctcctcctagcagcagcaggcaaatcagcccaattaggtctccacccctgactcccctcagccatagaaggccccaccccagtctcagccctactccactcaagcactatagttgtagcaggaatcttcttactcatccgcttccaccccctagcagaaaatagcccactaatccaaactctaacactatgcttaggcgctatcaccactctgttcgcagcagtctgcgcccttacacaaaatgacatcaaaaaaatcgtagccttctccacttcaagtcaactaggactcataatagttacaatcggcatcaaccaaccacacctagcattcctgcacatctgtacccacgccttcttcaaagccatactatttatgtgctccggatccatcatccacaaccttaacaatgaacaagatattcgaaaaataggaggactactcaaaaccatacctctcacttcaacctccctcaccattggcagcctagcattagcaggaatacctttcctcacaggtttctactccaaagaccacatcatcgaaaccgcaaacatatcatacacaaacgcctgagccctatctattactctcatcgctacctccctgacaagcgcctatagcactcgaataattcttctcaccctaacaggtcaacctcgcttccccacccttactaacattaacgaaaataaccccaccctactaaaccccattaaacgcctggcagccggaagcctattcgcaggatttctcattactaacaacatttcccccgcatcccccttccaaacaacaatccccctctacctaaaactcacagccctcgctgtcactttcctaggacttctaacagccctagacctcaactacctaaccaacaaacttaaaataaaatccccactatgcacattttatttctccaacatactcggattctaccctagcatcacacaccgcacaatcccctatctaggccttcttacgagccaaaacctgcccctactcctcctagacctaacctgactagaaaagctattacctaaaacaatttcacagcaccaaatctccacctccatcatcacctcaacccaaaaaggcataattaaactttacttcctctctttcttcttcccactcatcctaaccctactcctaatcacataacctattcccccgagcaatctcaattacaatatatacaccaacaaacaatgttcaaccagtaactactactaatcaacgcccataatcatacaaagcccccgcaccaataggatcctcccgaatcaaccctgacccctctccttcataaattattcagcttcctacactattaaagtttaccacaaccaccaccccatcatactctttcacccacagcaccaatcctacctccatcgctaaccccactaaaacactcaccaagacctcaacccctgacccccatgcctcaggatactcctcaatagccatcgctgtagtatatccaaagacaaccatcattccccctaaataaattaaaaaaactattaaacccatataacctcccccaaaattcagaataataacacacccgaccacaccgctaacaatcaatactaaacccccataaataggagaaggcttagaagaaaaccccacaaaccccattactaaacccacactcaacagaaacaaagcatacatcattattctcgcacggactacaaccacgaccaatgatatgaaaaaccatcgttgtatttcaactacaagaacaccaatgaccccaatacgcaaaattaaccccctaataaaattaattaaccactcattcatcgacctccccaccccatccaacatctccgcatgatgaaacttcggctcactccttggcgcctgcctgatcctccaaatcaccacaggactattcctagccatacactactcaccagacgcctcaaccgccttttcatcaatcgcccacatcactcgagacgtaaattatggctgaatcatccgctaccttcacgccaatggcgcctcaatattctttatctgcctcttcctacacatcgggcgaggcctatattacggatcatttctctactcagaaacctgaaacatcggcattatcctcctgcttgcaactatagcaacagccttcataggctatgtcctcccgtgaggccaaatatcattctgaggggccacagtaattacaaacttactatccgccatcccatacattgggacagacctagttcaatgaatctgaggaggctactcagtagacagtcccaccctcacacgattctttacctttcacttcatcttgcccttcattattgcagccctagcagcactccacctcctattcttgcacgaaacgggatcaaacaaccccctaggaatcacctcccattccgataaaatcaccttccacccttactacacaatcaaagacgccctcggcttacttctcttcattctctccttaatgacattaacactattctcaccagacctcctaggcgacccagacaattataccctagccaaccccttaaacacccctccccacatcaagcccgaatgatatttcctattcgcctacacaattctccgatccgtccctaacaagctaggaggcgtccttgccctattactatccatcctcatcctagcaataatccccatcctccatatatccaaacaacaaagcataatatttcgcccactaagccaatcactttattgactcctagccgcagacctcctcattctaacctgaatcggaggacaaccagtaagctacccttttaccatcattggacaagtagcatccgtactatacttcacaacaatcctaatcctaataccaactatctccctaattgaaaacaaaatactcaaatgggcctgtccttgtagtataaactaatacaccagtcttgtaaaccgaagatgaaaacctttttccaaggacaaatcagagaaaaagtctttaactccaccattagcacccaaagctaagattctaatttaaactattctctgttctttcatggggaagcagatttgggtaccacccaagtattgactcacccatcaacaaccgctatgtatttcgtacattactgccagccaccatgaatattgcacggtaccataaatacttgaccacctgtagtacatagaaacccaatccacatcaaaacctcccccccatgcttacaagcaagtacagcaatcaaccctcaactatcacacatcaactgcaactccaaagccacccctcacccactaggataccaacaaacctacccatccttaacagtacatagtacataaagccatttaccgtacatagcacattacagtcaaatcccttctcgtccccatggatgacccccctcagataggggtcccttgaccaccatcctccgtgaaatcaatatcccgcacaagagtgctactctcctcgctccgggcccataacacttgggggtagctaaagtgaactgtatccgacatctggttcctacttcagggccataaagcctaaatagcccacacgttccccttaaataagacatcacgatg

SEQ ID NO: 109 - DNA, 16569 bp, Homo sapiens mitochondrial
  3108: "n" refers to a nucleotide at position 3107 of the Cambridge Reference Sequence (CRS, Anderson et al. 1981 Nature 290:457-465), later determined to be absent from the human mtDNA sequence according to the revised CRS (rCRS, Andrews et al. 1999 Nature Genetics 23:147); "n" therefore represents a single nucleotide deletion at a position corresponding to nucleotide 3107 of SEQ ID NO:1 as provided herein.
gatcacaggtctatcaccctattaaccactcacgggagctctccatgcatttggtattttcgtctggggggtgtgcacgcgatagcattgcgagacgctggagccggagcaccctatgtcgcagtatctgtctttgattcctgcctcatcctattatttatcgcacctacgttcaatattacaggcgaacatacctactaaagtgtgttaattaattaatgcttgtaggacataataataacaattgaatgtctgcacagccgctttccacacagacatcataacaaaaaatttccaccaaaccccccctcccccgccttctggccacagcacttaaacacatctctgccaaaccccaaaaacaaagaaccctaacaccagcctaaccagatttcaaattttatcttttggcggtatgcacttttaacagtcaccccccaactaacacattattttcccctcccactcccatactactaatctcatcaatacaacccccgcccatcctacccagcacacacacaccgctgctaaccccataccccgaaccaaccaaaccccaaagacaccccccacagtttatgtagcttacctcctcaaagcaatacactgaaaatgtttagacgggctcacatcaccccataaacaaataggtttggtcctagcctttctattagctcttagtaagattacacatgcaagcatccccgttccagtgagttcaccctctaaatcaccacgatcaaaagggacaagcatcaagcacgcagcaatgcagctcaaaacgcttagcctagccacacccccacgggaaacagcagtgattaacctttagcaataaacgaaagtttaactaagctatactaaccccagggttggtcaatttcgtgccagccaccgcggtcacacgattaacccaagtcaatagaagccggcgtaaagagtgttttagatcaccccctccccaataaagctaaaactcacctgagttgtaaaaaactccagttgacacaaaatagactacgaaagtggctttaacatatctgaacacacaatagctaagacccaaactgggattagataccccactatgcttagccctaaacctcaacagttaaatcaacaaaactgctcgccagaacactacgagccacagcttaaaactcaaaggacctggcggtgcttcatatccctctagaggagcctgttctgtaatcgataaaccccgatcaacctcaccacctcttgctcagcctatataccgccatcttcagcaaaccctgatgaaggctacaaagtaagcgcaagtacccacgtaaagacgttaggtcaaggtgtagcccatgaggtggcaagaaatgggctacattttctaccccagaaaactacgatagcccttatgaaacttaagggtcgaaggtggatttagcagtaaactgagagtagagtgcttagttgaacagggccctgaagcgcgtacacaccgcccgtcaccctcctcaagtatacttcaaaggacatttaactaaaacccctacgcatttatatagaggagacaagtcgtaacatggtaagtgtactggaaagtgcacttggacgaaccagagtgtagcttaacacaaagcacccaacttacacttaggagatttcaacttaacttgaccgctctgagctaaacctagccccaaacccactccaccttactaccagacaaccttagccaaaccatttacccaaataaagtataggcgatagaaattgaaacctggcgcaatagatatagtaccgcaagggaaagatgaaaaattataaccaagcataatatagcaaggactaacccctataccttctgcataatgaattaactagaaataactttgcaaggagagccaaagctaagacccccgaaaccagacgagctacctaagaacagctaaaagagcacacccgtctatgtagcaaaatagtgggaagatttataggtagaggcgacaaacctaccgagcctggtgatagctggttgtccaagatagaatcttagttcaactttaaatttgcccacagaaccctctaaatccccttgtaaatttaactgttagtccaaagaggaacagctctttggacactaggaaaaaaccttgtagagagagtaaaaaatttaacacccatagtaggcctaaaagcagccaccaattaagaaagcgttcaagctcaacacccactacctaaaaaatcccaaacatataactgaactcctcacacccaattggaccaatctatcaccctatagaagaactaatgttagtataagtaacatgaaaacattctcctctgcataagcctgcgtcagattaaaacactgaactgacaattaacagcccaatatctacaatcaaccaacaagtcattattaccctcactgtcaacccaacacaggcatgctcataaggaaaggttaaaaaaagtaaaaggaactcggcaaatcttaccccgcctgtttaccaaaaacatcacctctagcatcaccagtattagaggcaccgcctgcccagtgacacatgtttaacggccgcggtaccctaaccgtgcaaaggtagcataatcacttgttccttaaatagggacctgtatgaatggctccacgagggttcagctgtctcttacttttaaccagtgaaattgacctgcccgtgaagaggcgggcatgacacagcaagacgagaagaccctatggagctttaatttattaatgcaaacagtacctaacaaacccacaggtcctaaactaccaaacctgcattaaaaatttcggttggggcgacctcggagcagaacccaacctccgagcagtacatgctaagacttcaccagtcaaagcgaactactatactcaattgatccaataacttgaccaacggaacaagttaccctagggataacagcgcaatcctattctagagtccatatcaacaatagggtttacgacctcgatgttggatcaggacatcccgatggtgcagccgctattaaaggttcgtttgttcaacgattaaagtcctacgtgatctgagttcagaccggagtaatccaggtcggtttctatctacnttcaaattcctccctgtacgaaaggacaagagaaataaggcctacttcacaaagcgccttcccccgtaaatgatatcatctcaacttagtattatacccacacccacccaagaacagggtttgttaagatggcagagcccggtaatcgcataaaacttaaaactttacagtcagaggttcaattcctcttcttaacaacatacccatggccaacctcctactcctcattgtacccattctaatcgcaatggcattcctaatgcttaccgaacgaaaaattctaggctatatacaactacgcaaaggccccaacgttgtaggcccctacgggctactacaacctttcgctgacgccataaaactcttcaccaaagagcccctaaaacccgccacatctaccatcaccctctacatcaccgccccgaccttagctctcaccatcgctcttctactatgaacccccctccccatacccaaccccctggtcaacctcaacctaggcctcctatttattctagccacctctagcctagccgtttactcaatcctctgatcagggtgagcatcaaactcaaactacgccctgatcggcgcactgcgagcagtagcccaaacaatctcatatgaagtcaccctagccatcattctactatcaacattactaataagtggctcctttaacctctccacccttatcacaacacaagaacacctctgattactcctgccatcatgacccttggccataatatgatttatctccacactagcagagaccaaccgaacccccttcgaccttgccgaaggggagtccgaactagtctcaggcttcaacatcgaatacgccgcaggccccttcgccctattcttcatagccgaatacacaaacattattataataaacaccctcaccactacaatcttcctaggaacaacatatgacgcactctcccctgaactctacacaacatattttgtcaccaagaccctacttctaacctccctgttcttatgaattcgaacagcatacccccgattccgctacgaccaactcatacacctcctatgaaaaaacttcctaccactcaccctagcattacttatatgatatgtctccatacccattacaatctccagcattccccctcaaacctaagaaatatgtctgataaaagagttactttgatagagtaaataataggagcttaaacccccttatttctaggactatgagaatcgaacccatccctgagaatccaaaattctccgtgccacctatcacaccccatcctaaagtaaggtcagctaaataagctatcgggcccataccccgaaaatgttggttatacccttcccgtactaattaatcccctggcccaacccgtcatctactctaccatctttgcaggcacactcatcacagcgctaagctcgcactgattttttacctgagtaggcctagaaataaacatgctagcttttattccagttctaaccaaaaaaataaaccctcgttccacagaagctgccatcaagtatttcctcacgcaagcaaccgcatccataatccttctaatagctatcctcttcaacaatatactctccggacaatgaaccataaccaatactaccaatcaatactcatcattaataatcataatggctatagcaataaaactaggaatagccccctttcacttctgagtcccagaggttacccaaggcacccctctgacatccggcctgcttcttctcacatgacaaaaactagcccccatctcaatcatataccaaatctctccctcactaaacgtaagccttctcctcactctctcaatcttatccatcatagcaggcagttgaggtggattaaaccaaacccagctacgcaaaatcttagcatactcctcaattacccacataggatgaataatagcagttctaccgtacaaccctaacataaccattcttaatttaactatttatattatcctaactactaccgcattcctactactcaacttaaactccagcaccacgaccctactactatctcgcacctgaaacaagctaacatgactaacacccttaattccatccaccctcctctccctaggaggcctgcccccgctaaccggctttttgcccaaatgggccattatcgaagaattcacaaaaaacaatagcctcatcatccccaccatcatagccaccatcaccctccttaacctctacttctacctacgcctaatctactccacctcaatcacactactccccatatctaacaacgtaaaaataaaatgacagtttgaacatacaaaacccaccccattcctccccacactcatcgcccttaccacgctactcctacctatctccccttttatactaataatcttatagaaatttaggttaaatacagaccaagagccttcaaagccctcagtaagttgcaatacttaatttctgtaacagctaaggactgcaaaaccccactctgcatcaactgaacgcaaatcagccactttaattaagctaagcccttactagaccaatgggacttaaacccacaaacacttagttaacagctaagcaccctaatcaactggcttcaatctacttctcccgccgccgggaaaaaaggcgggagaagccccggcagatttgaagctgcttcttcgaatttgcaattcaatatgaaaatcacctcggagctggtaaaaagaggcctaacccctgtctttagatttacagtccaatgcttcactcagccattttacctcacccccactgatgttcgccgaccgttgactattctctacaaaccacaaagacattggaacactatacctattattcggcgcatgagctggagtcctaggcacagctctaagcctccttattcgagccgagctgggccagccaggcaaccttctaggtaacgaccacatctacaacgttatcgtcacagcccatgcatttgtaataatcttcttcatagtaatacccatcataatcggaggctttggcaactgactagttcccctaataatcggtgcccccgatatggcgtttccccgcataaacaacataagcttctgactcttacccccctctctcctactcctgctcgcatctgctatagtggaggccggagcaggaacaggttgaacagtctaccctcccttagcagggaactactcccaccctggagcctccgtagacctaaccatcttctccttacacctagcaggtgtctcctctatcttaggggccatcaatttcatcacaacaattatcaatataaaaccccctgccataacccaataccaaacgcccctcttcgtctgatccgtcctaatcacagcagtcctacttctcctatctctcccagtcctagctgctggcatcactatactactaacagaccgcaacctcaacaccaccttcttcgaccccgccggaggaggagaccccattctataccaacacctattctgatttttcggtcaccctgaagtttatattcttatcctaccaggcttcggaataatctcccatattgtaacttactactccggaaaaaaagaaccatttggatacataggtatggtctgagctatgatatcaattggcttcctagggtttatcgtgtgagcacaccatatatttacagtaggaatagacgtagacacacgagcatatttcacctccgctaccataatcatcgctatccccaccggcgtcaaagtatttagctgactcgccacactccacggaagcaatatgaaatgatctgctgcagtgctctgagccctaggattcatctttcttttcaccgtaggtggcctgactggcattgtattagcaaactcatcactagacatcgtactacacgacacgtactacgttgtagctcacttccactatgtcctatcaataggagctgtatttgccatcataggaggcttcattcactgatttcccctattctcaggctacaccctagaccaaacctacgccaaaatccatttcactatcatattcatcggcgtaaatctaactttcttcccacaacactttctcggcctatccggaatgccccgacgttactcggactaccccgatgcatacaccacatgaaacatcctatcatctgtaggctcattcatttctctaacagcagtaatattaataattttcatgatttgagaagccttcgcttcgaagcgaaaagtcctaatagtagaagaaccctccataaacctggagtgactatatggatgccccccaccctaccacacattcgaagaacccgtatacataaaatctagacaaaaaaggaaggaatcgaaccccccaaagctggtttcaagccaaccccatggcctccatgactttttcaaaaaggtattagaaaaaccatttcataactttgtcaaagttaaattataggctaaatcctatatatcttaatggcacatgcagcgcaagtaggtctacaagacgctacttcccctatcatagaagagcttatcacctttcatgatcacgccctcataatcattttccttatctgcttcctagtcctgtatgcccttttcctaacactcacaacaaaactaactaatactaacatctcagacgctcaggaaatagaaaccgtctgaactatcctgcccgccatcatcctagtcctcatcgccctcccatccctacgcatcctttacataacagacgaggtcaacgatccctcccttaccatcaaatcaattggccaccaatggtactgaacctacgagtacaccgactacggcggactaatcttcaactcctacatacttcccccattattcctagaaccaggcgacctgcgactccttgacgttgacaatcgagtagtactcccgattgaagcccccattcgtataataattacatcacaagacgtcttgcactcatgagctgtccccacattaggcttaaaaacagatgcaattcccggacgtctaaaccaaaccactttcaccgctacacgaccgggggtatactacggtcaatgctctgaaatctgtggagcaaaccacagtttcatgcccatcgtcctagaattaattcccctaaaaatctttgaaatagggcccgtatttaccctatagcaccccctctaccccctctagagcccactgtaaagctaacttagcattaaccttttaagttaaagattaagagaaccaacacctctttacagtgaaatgccccaactaaatactaccgtatggcccaccataattacccccatactccttacactattcctcatcacccaactaaaaatattaaacacaaactaccacctacctccctcaccaaagcccataaaaataaaaaattataacaaaccctgagaaccaaaatgaacgaaaatctgttcgcttcattcattgcccccacaatcctaggcctacccgccgcagtactgatcattctatttccccctctattgatccccacctccaaatatctcatcaacaaccgactaatcaccacccaacaatgactaatcaaactaacctcaaaacaaatgatagccatacacaacactaaaggacgaacctgatctcttatactagtatccttaatcatttttattgccacaactaacctcctcggactcctgcctcactcatttacaccaaccacccaactatctataaacctagccatggccatccccttatgagcgggcgcagtgattataggctttcgctctaagattaaaaatgccctagcccacttcttaccacaaggcacacctacaccccttatccccatactagttattatcgaaaccatcagcctactcattcaaccaatagccctggccgtacgcctaaccgctaacattactgcaggccacctactcatgcacctaattggaagcgccaccctagcaatatcaaccattaaccttccctctacacttatcatcttcacaattctaattctactgactatcctagaaatcgctgtcgccttaatccaagcctacgttttcacacttctagtaagcctctacctgcacgacaacacataatgacccaccaatcacatgcctatcatatagtaaaacccagcccatgacccctaacaggggccctctcagccctcctaatgacctccggcctagccatgtgatttcacttccactccataacgctcctcatactaggcctactaaccaacacactaaccatataccaatgatggcgcgatgtaacacgagaaagcacataccaaggccaccacacaccacctgtccaaaaaggccttcgatatgggataatcctatttattacctcagaagtttttttcttcgcaggatttttctgagccttttaccactccagcctagcccctactccccaactaggagggcactggcccccaacaggcatcaccccgctaaatcccctagaagtcccactcctaaacacatccgtattactcgcatcaggagtatcaatcacctgagctcaccatagtctaatagaaaacaaccgaaaccaaataattcaagcactgcttattacaattttactgggtctctattttaccctcctacaagcctcagagtacttcgagtctcccttcaccatttccgacggcatctacggctcaacattttttgtagccacaggcttccacggacttcacgtcattattggctcaactttcctcactatctgcttcatccgccaactaatatttcactttacatccaaacatcactttggcttcgaagccgccgcctgatactggcattttgtagatgtggtttgactatttctgtatgtctccatctattgatgagggtcttactcttttagtataaatagtaccgttaacttccaattaactagttttgacaacattcaaaaaagagtaataaacttcgccttaattttaataatcgacaccctcctagccttactactaataattattacattttgactaccacaactcaacggctacatagaaaaatccaccccttacgagtgcggcttcgaccctatatcccccgcccgcgtccctttctccataaaattcttcttagtagctattaccttcttattatttgatctagaaattgccctccttttacccctaccatgagccctacaaacaactaacctgccactaatagttatgtcatccctcttattaatcatcatcctagccctaagtctggcctatgaatgactacaaaaaggattagactgagccgaattggtatatagtttaaacaaaacgaatgatttcgactcattaaattatgataatcatatttaccaaatgcccctcatttacataaatattatactagcatttaccatctcacttctaggaatactagtatatcgctcacacctcatatcctccctactatgcctagaaggaataatactatcgctgttcattatagctactctcataaccctcaacacccactccctcttagccaatattgtgcctattgccatactagtctttgccgcctgcgaagcagcggtgggcctagccctactagtctcaatctccaacacatatggcctagactacgtacataacctaaacctactccaatgctaaaactaatcgtcccaacaattatattactaccactgacatgactttccaaaaaacacataatttgaatcaacacaaccacccacagcctaattattagcatcatccccctactattttttaaccaaatcaacaacaacctatttagctgttccccaaccttttcctccgaccccctaacaacccccctcctaatactaactacctgactcctacccctcacaatcatggcaagccagcgccacttatccagtgaaccactatcacgaaaaaaactctacctctctatactaatctccctacaaatctccttaattataacattcacagccacagaactaatcatattttatatcttcttcgaaaccacacttatccccaccttggctatcatcacccgatgaggcaaccagccagaacgcctgaacgcaggcacatacttcctattctacaccctagtaggctcccttcccctactcatcgcactaatttacactcacaacaccctaggctcactaaacattctactactcactctcactgcccaagaactatcaaactcctgagccaacaacttaatatgactagcttacacaatagcttttatagtaaagatacctctttacggactccacttgtgactccctaaagcccatgtcgaagcccccatcgctgggtcaatagtacttgccgcagtactcttaaaactaggcggctatggtataatacgcctcacactcattctcaaccccctgacaaaacacatagcctaccccttccttgtactatccctatgaggcataattataacaagctccatctgcctacgacaaacagacctaaaatcgctcattgcatactcttcaatcagccacatagccctcgtagtaacagccattctcatccaaaccccctgaagcttcaccggcgcagtcattctcataatcgcccacggacttacatcctcattactattctgcctagcaaactcaaactacgaacgcactcacagtcgcatcataatcctctctcaaggacttcaaactctactcccactaatagctttttgatgacttctagcaagcctcgctaacctcgccttaccccccactattaacctactgggagaactctctgtgctagtaaccacgttctcctgatcaaatatcactctcctacttacaggactcaacatactagtcacagccctatactccctctacatatttaccacaacacaatggggctcactcacccaccacattaacaacataaaaccctcattcacacgagaaaacaccctcatgttcatacacctatcccccattctcctcctatccctcaaccccgacatcattaccgggttttcctcttgtaaatatagtttaaccaaaacatcagattgtgaatctgacaacagaggcttacgaccccttatttaccgagaaagctcacaagaactgctaactcatgcccccatgtctaacaacatggctttctcaacttttaaaggataacagctatccattggtcttaggccccaaaaattttggtgcaactccaaataaaagtaataaccatgcacactactataaccaccctaaccctgacttccctaattccccccatccttaccaccctcgttaaccctaacaaaaaaaactcatacccccattatgtaaaatccattgtcgcatccacctttattatcagtctcttccccacaacaatattcatgtgcctagaccaagaagttattatctcgaactgacactgagccacaacccaaacaacccagctctccctaagcttcaaactagactacttctccataatattcatccctgtagcattgttcgttacatggtccatcatagaattctcactgtgatatataaactcagacccaaacattaatcagttcttcaaatatctactcattttcctaattaccatactaatcttagttaccgctaacaacctattccaactgttcatcggctgagagggcgtaggaattatatccttcttgctcatcagttgatgatacgcccgagcagatgccaacacagcagccattcaagcaatcctatacaaccgtatcggcgatatcggtttcatcctcgccttagcatgatttatcctacactccaactcatgagacccacaacaaatagcccttctaaacgctaatccaagcctcaccccactactaggcctcctcctagcagcagcaggcaaatcagcccaattaggtctccacccctgactcccctcagccatagaaggccccaccccagtctcagccctactccactcaagcactatagttgtagcaggagtcttcttactcatccgcttccaccccctagcagaaaatagcccactaatccaaactctaacactatgcttaggcgctatcaccactctgttcgcagcagtctgcgcccttacacaaaatgacatcaaaaaaatcgtagccttctccacttcaagtcaactaggactcataatagttacaatcggcatcaaccaaccacacctagcattcctgcacatctgtacccacgccttcttcaaagccatactatttatgtgctccgggtccatcatccacaaccttaacaatgaacaagatattcgaaaaataggaggactactcaaaaccatacctctcacttcaacctccctcaccattggcagcctagcattagcaggaatacctttcctcacaggtttctactccaaagaccacatcatcgaaaccgcaaacatatcatacacaaacgcctgagccctatctattactctcatcgctacctccctgacaagcgcctatagcactcgaataattcttctcaccctaacaggtcaacctcgcttccccacccttactaacattaacgaaaataaccccaccctactaaaccccattaaacgcctggcagccggaagcctattcgcaggatttctcattactaacaacatttcccccgcatcccccttccaaacaacaatccccctctacctaaaactcacagccctcgctgtcactttcctaggacttctaacagccctagacctcaactacctaaccaacaaacttaaaataaaatccccactatgcacattttatttctccaacatactaggattctaccctagcatcacacaccgcacaatcccctatctaggccttcttacgagccaaaacctgcccctactcctcctagacctaacctgactagaaaagctattacctaaaacaatttcacagcaccaaatctccacctccatcatcacctcaacccaaaaaggcataattaaactttacttcctctctttcttcttcccactcatcctaaccctactcctaatcacataacctattcccccgagcaatctcaattacaatatatacaccaacaaacaatgttcaaccagtaactactactaatcaacgcccataatcatacaaagcccccgcaccaataggatcctcccgaatcaaccctgacccctctccttcataaattattcagcttcctacactattaaagtttaccacaaccaccaccccatcatactctttcacccacagcaccaatcctacctccatcgctaaccccactaaaacactcaccaagacctcaacccctgacccccatgcctcaggatactcctcaatagccatcgctgtagtatatccaaagacaaccatcattccccctaaataaattaaaaaaactattaaacccatataacctcccccaaaattcagaataataacacacccgaccacaccgctaacaatcaatactaaacccccataaataggagaaggcttagaagaaaaccccacaaaccccattactaaacccacactcaacagaaacaaagcatacatcattattctcgcacggactacaaccacgaccaatgatatgaaaaaccatcgttgtatttcaactacaagaacaccaatgaccccaatacgcaaaattaaccccctaataaaattaattaaccactcattcatcgacctccccaccccatccaacatctccgcatgatgaaacttcggctcactccttggcgcctgcctgatcctccaaatcaccacaggactattcctagccatgcactactcaccagacgcctcaaccgccttttcatcaatcgcccacatcactcgagacgtaaattatggctgaatcatccgctaccttcacgccaatggcgcctcaatattctttatctgcctcttcctacacatcgggcgaggcctatattacggatcatttctctactcagaaacctgaaacatcggcattatcctcctgcttgcaactatagcaacagccttcataggctatgtcctcccgtgaggccaaatatcattctgaggggccacagtaattacaaacttactatccgccatcccatacattgggacagacctagttcaatgaatctgaggaggctactcagtagacagtcccaccctcacacgattctttacctttcacttcatcttacccttcattgttgcagccctagcagcactccacctcctattcttgcacgaaacgggatcaaacaaccccctaggaatcacctcccattccgataaaatcaccttccacccttactacacaatcaaagacgccctcggcttacttctcttccttctctccttaatgacattaacactattctcaccagacctcctaggcgacccagacaattataccctagccaaccccttaaacacccctccccacatcaagcccgaatgatatttcctattcgcctacacaattctccgatccgtccctaacaaactaggaggcgtccttgccctattactatccatcctcatcctagcaataatccccatcctccatatatccaaacaacaaagcataatatttcgcccactaagccaatcactttattgactcctagccgcagacctcctcattctaacctgaatcggaggacaaccagtaagctacccttttaccatcattggacaagtagcatccgtactatacttcgcaacaatcctaatcctaataccaactatctccctaattgaaaacaaaatactcaaatgggcctgtccttgtagtataaactaatacaccagtcttgtaaaccggagatgaaaaccttttccaaggacaaatcagagaaaaagtctttaactccaccattagcacccaaagctaagattctaatttaaactattctctgttctttcatggggaagcagatttgggtaccacccaagtattgactcacccatcaacaaccgctatgtatctcgtacattactgccagccaccatgaatattgtacggtaccataaatacttaaccacctgtagtacataaaaacccaatccacatcaaaaccccctccccatgcttacaagcaagtacagcaatcaaccttcaactatcacacatcaactgcaactccaaagccacccctcacccactaggatatcaacaaacctacccacccttaacagtacatagtacataaagccatttaccgtacatagcacattacagtcaaatcccttctcgcccccatggatgacccccctcagataggggtcccttgaccaccatcctccgtgaaatcaatatcccgcacaagagtgctactctcctcgctccgggcccataacacttgggggtagctaaagtgaactgtatccgacatctggttcctacttcagggccataaagcctaaatagcccacacgttccccttaaataagacatcacgatg

SEQ ID NO: 110 - DNA, 16570 bp, Homo sapiens mitochondrial
  3108: "n" refers to a nucleotide at position 3107 of the Cambridge Reference Sequence (CRS, Anderson et al. 1981 Nature 290:457-465), later determined to be absent from the human mtDNA sequence according to the revised CRS (rCRS, Andrews et al. 1999 Nature Genetics 23:147); "n" therefore represents a single nucleotide deletion at a position corresponding to nucleotide 3107 of SEQ ID NO:1 as provided herein.
gatcacaggtctatcaccctattaaccactcacgggagctctccatgcatttggtattttcgtctggggggtgtgcacgcgatagcattgcgagacgctggagccggagcaccctatgtcgcagtatctgtctttgattcctgccccatcccattatttatcgcacctacgttcaatattacaggcgaacatacctactaaagtgtgttaattaattaatgcttgtaggacataataataacaattgaatgtctgcacagccgctttccacacagacatcataacaaaaaatttccaccaaaccccccctcccccgccttctggccacagcacttaaacacatctctgccaaaccccaaaaacaaagaaccctaacaccagcctaaccagatttcaaattttatcttttggcggtatgcacttttaacagtcaccccccaactaacacattattttcccctcccactcccatactactaatctcatcaatacaacccccacccatcctacccagcacacacacaccgctgctaaccccataccccgaaccaaccaaaccccaaagacaccccccacagtttatgtagcttacctcctcaaagcaatacactgaaaatgtttagacgggctcacatcaccccataaacaaataggtttggtcctagcctttctattagctcttagtaagattacacatgcaagcatccccgttccagtgagttcaccctctaaatcaccacgatcaaaagggacaagcatcaagcacgcagcaatgcagctcaaaacgcttagcctagccacacccccacgggaaacagcagtgattaacctttagcaataaacgaaagtttaactaagctatactaaccccagggttggtcaatttcgtgccagccaccgcggtcacacgattaacccaagtcaatagaagccggcgtaaagagtgttttagatcaccccctccccaataaagctaaaactcacctgagttgtaaaaaactccagttgacacaaaatagactacgaaagtggctttaacatatctgaacacacaatagctaagacccaaactgggattagataccccactatgcttagccctaaacctcaacagttaaatcaacaaaactgctcgccagaacactacgagccacagcttaaaactcaaaggacctggcggtgcttcatatccctctagaggagcctgttctgtaatcgataaaccccgatcaacctcaccacctcttgctcagcctatataccgccatcttcagcaaaccctgatgaaggctacaaagtaagcgcaagtacccacgtaaagacgttaggtcaaggtgtagcccatgaggtggcaagaaatgggctacattttctaccccagaaaactacgatagcccttatgaaacttaagggtcgaaggtggatttagcagtaaactgagagtagagtgcttagttgaacagggccctgaagcgcgtacacaccgcccgtcaccctcctcaagtatacttcaaaggacatttaactaaaacccctacgcatttatatagaggagacaagtcgtaacatggtaagtgtactggaaagtgcacttggacgaaccagagtgtagcttaacacaaagcacccaacttacacttaggagatttcaacttaacttgaccgctctgagctaaacctagccccaaacccactccaccttactaccagacaaccttagccaaaccatttacccaaataaagtataggcgatagaaattgaaacctggcgcaatagatatagtaccgcaagggaaagatgaaaaattatagccaagcataatatagcaaggactaacccctataccttctgcataatgaattaactagaaataactttgcaaggagagccaaagctaagacccccgaaaccagacgagctacctaagaacagctaaaagagcacacccgtctatgtagcaaaatagtgggaagatttataggtagaggcgacaaacctaccgagcctggtgatagctggttgtccaagatagaatcttagttcaactttaaatttgcccacagaaccctctaaatccccttgtaaatttaactgttagtccaaagaggaacagctctttggacactaggaaaaaaccttgtagagagagtaaaaaatttaacacccatagtaggcctaaaagcagccaccaattaagaaagcgttcaagctcaacacccactacctaaaaaatcccaaacatataactgaactcctcacacccaattggaccaatctatcaccctatagaagaactaatgttagtataagtaacatgaaaacattctcctccgcataagcctgcgtcagattaaaacactgaactgacaattaacagcccaatatctacaatcaaccaacaagtcattattaccctcactgtcaacccaacacaggcatgctcataaggaaaggttaaaaaaagtaaaaggaactcggcaaatcttaccccgcctgtttaccaaaaacatcacctctagcatcaccagtattagaggcaccgcctgcccagtgacacatgtttaacggccgcggtaccctaaccgtgcaaaggtagcataatcacttgttccttaaatagggacctgtatgaatggctccacgagggttcagctgtctcttacttttaaccagtgaaattgacctgcccgtgaagaggcgggcatgacacagcaagacgagaagaccctatggagctttaatttattaatgcaaacagtacctaacaaacccacaggtcctaaactaccaaacctgcattaaaaatttcggttggggcgacctcggagcagaacccaacctccgagcagtacatgctaagacttcaccagtcaaagcgaactactatactcaattgatccaataacttgaccaacggaacaagttaccctagggataacagcgcaatcctattctagagtccatatcaacaatagggtttacgacctcgatgttggatcaggacatcccgatggtgcagccgctattaaaggttcgtttgttcaacgattaaagtcctacgtgatctgagttcagaccggagtaatccaggtcggtttctatctacnttcaaattcctccctgtacgaaaggacaagagaaataaggcctacttcacaaagcgccttcccccgtaaatgatatcatctcaacttagtattatacccacacccacccaagaacagggtttgttaagatggcagagcccggtaatcgcataaaacttaaaactttacagtcagaggttcaattcctcttcttaacaacatacccatggccaacctcctactcctcattgtacccattctaatcgcaatggcattcctaatgcttaccgaacgaaaaattctaggctatatacaactacgcaaaggccccaacgttgtaggcccctacgggctactacaacccttcgctgacgccataaaactcttcaccaaagagcccctaaaacccgccacatctaccatcaccctctacatcaccgccccgaccttagctctcaccatcgctcttctactatgaacccccctccccatacccaaccccctggtcaacctcaacctaggcctcctatttattctagccacctctagcctagccgtttactcaatcctctgatcagggtgagcatcaaactcaaactacgccctgatcggcgcactgcgagcagtagcccaaacaatctcatatgaagtcaccctagccatcattctactatcaacattactaataagtggctcctttaacctctccacccttatcacaacacaagaacacctctgattactcctgccatcatgacccttggccataatatgatttatctccacactagcagagaccaaccgaacccccttcgaccttgccgaaggggagtccgaactagtctcaggcttcaacatcgaatacgccgcaggccccttcgccctattcttcatagccgaatacacaaacattattataataaacaccctcaccactacaatcttcctaggaacaacatatgacgcactctcccctgaactctacacaacatattttgtcaccaagaccctacttctaacctccctgttcttatgaattcgaacagcatacccccgattccgctacgaccaactcatacacctcctatgaaaaaacttcctaccactcaccctagcattacttatatgatatgtctccatacccattacaatctccagcattccccctcaaacctaagaaatatgtctgataaaagagttactttgatagagtaaataataggagcttaaacccccttatttctaggactatgagaatcgaacccatccctgagaatccaaaattctccgtgccacctatcacaccccatcctaaagtaaggtcagctaaataagctatcgggcccataccccgaaaatgttggttatacccttcccgtactaattaatcccctggcccaacccgtcatctactctaccatctttgcaggcacactcatcacagcgctaagctcgcactgattttttacctgagtaggcctagaaataaacatgctagcttttattccagttctaaccaaaaaaataaaccctcgttccacagaagctgccatcaagtacttcctcacgcaagcaaccgcatccataatccttctaatagctatcctcttcaacaatatactctccggacaatgaaccataaccaatactaccaatcaatactcatcattaataatcataatggctatagcaataaaactaggaatagccccctttcacttctgagtcccagaggttacccaaggcacccctctgacatccggcctgcttcttctcacatgacaaaaactagcccccatctcaatcatataccaaatctctccctcactaaacgtaagccttctcctcactctctcaatcttatccatcatagcaggcagttgaggtggattaaaccaaacccagctacgcaaaatcttagcatactcctcaattacccacataggatgaataatagcagttctaccgtacaaccctaacataaccattcttaatttaactatttatattatcctaactactaccgcattcctactactcaacttaaactccagcaccacgaccctactactatctcgcacctgaaacaagctaacatgactaacacccttaattccatccaccctcctctccctaggaggcctgcccccgctaaccggctttttgcccaaatgggccattatcgaagaattcacaaaaaacaatagcctcatcatccccaccatcatagccaccatcaccctccttaacctctacttctacctacgcctaatctactccacctcaatcacactactccccatatctaacaacgtaaaaataaaatgacagtttgaacatacaaaacccaccccattcctccccacactcatcgcccttaccacgctactcctacctatctccccttttatactaataatcttatagaaatttaggttaaatacagaccaagagccttcaaagccctcagtaagttgcaatacttaatttctgtaacagctaaggactgcaaaaccccactctgcatcaactgaacgcaaatcagccactttaattaagctaagcccttactagaccaatgggacttaaacccacaaacacttagttaacagctaagcaccctaatcaactggcttcaatctacttctcccgccgccgggaaaaaaggcgggagaagccccggcaggtttgaagctgcttcttcgaatttgcaattcaatatgaaaatcacctcggagctggtaaaaagaggcctaacccctgtctttagatttacagtccaatgcttcactcagccattttacctcacccccactgatgttcgccgaccgttgactattctctacaaaccacaaagacattggaacactatacctattattcggcgcatgagctggagtcctaggcacagccctaagcctccttattcgagccgagctgggccagccaggcaaccttctgggtaacgaccacatctacaacgttatcgtcacagcccatgcatttgtaataatcttcttcatagtaatacccatcataatcggaggctttggcaactgactagttcccctaataatcggtgcccccgatatggcgtttccccgcataaacaacataagcttctgactcttacctccctctctcctactcctgctcgcatctgctatagtggaggccggagcaggaacaggttgaacagtctaccctcccttagcagggaactactcccaccctggagcctccgtagacctaaccatcttctccttacacctagcaggtgtctcctctatcttaggggccatcaatttcatcacaacaattatcaatataaaaccccctgccataacccaataccaaacgcccctcttcgtctgatccgtcctaatcacagcagtcctacttctcctatctctcccagtcctagctgctggcatcactatactactaacagaccgcaacctcaacaccaccttcttcgaccccgccggaggaggagaccccattctataccaacacctattctgatttttcggtcaccctgaagtttatattcttatcctaccaggcttcggaataatctcccatattgtaacttactactccggaaaaaaagaaccatttggatacataggtatggtctgagctatgatatcaattggcttcctagggtttatcgtgtgagcacaccatatatttacagtaggaatagacgtagacacacgagcatatttcacctccgctaccataatcatcgctatccccaccggcgtcaaagtatttagctgactcgccacactccacggaagcaatatgaaatgatctgctgcagtgctctgagccctaggattcatctttcttttcaccgtaggtggcctgactggcattgtattagcaaactcatcactagacatcgtactacacgacacgtactacgttgtagctcacttccactatgtcctatcaataggagctgtatttgccatcataggaggcttcattcactgatttcccctattctcaggctacaccctagaccaaacctacgccaaaatccatttcactatcatattcatcggcgtaaatctaactttcttcccacaacactttctcggcctatccggaatgccccgacgttactcggactaccccgatgcatacaccacatgaaacatcctatcatctgtaggctcattcatttctctaacagcagtaatattaataattttcatgatttgagaagccttcgcttcgaagcgaaaagtcctaatagtagaagaaccctccataaacctggagtgactatatggatgccccccaccctaccacacattcgaagaacccgtatacataaaatctagacaaaaaaggaaggaatcgaaccccccaaagctggtttcaagccaaccccatggcctccatgactttttcaaaaaggtattagaaaaaccatttcataactttgtcaaagttaaattataggctaaatcctatatatcttaatggcacatgcagcgcaagtaggtctacaagacgctacttcccctatcatagaagagcttatcacctttcatgatcacgccctcataatcattttccttatctgcttcctagtcctgtacgcccttttcctaacactcacaacaaaactaactaatactaacatctcagacgctcaggaaatagaaaccgtctgaactatcctgcccgccatcatcctagtcctcatcgccctcccatccctacgcatcctttacataacagacgaggtcaacgatccctcccttaccatcaaatcaattggccaccaatggtactgaacctacgagtacaccgactacggcggactaatcttcaactcctacatacttcccccattattcctagaaccaggcgacctgcgactccttgacgttgacaatcgagtagtactcccgattgaagcccccattcgtataataattacatcacaagacgtcttgcactcatgagctgtccccacattaggcttaaaaacagatgcaattcccggacgtctaaaccaaaccactttcaccgctacacgaccgggggtatactacggtcaatgctctgaaatctgtggagcaaaccacagtttcatgcccatcgtcctagaattaattcccctaaaaatctttgaaatagggcccgtatttaccctatagcaccccctctaccccctctagagcccactgtaaagctaacttagcattaaccttttaagttaaagattaagagaaccaacacctctttacagtgaaatgccccaactaaatactaccgtatggcccaccataattacccccatactccttacactattcctcatcacccaactaaaaatattaaacacaaactaccacctacctccctcaccaaagcccataaaaataaaaaattataacaaaccctgagaaccaaaatgaacgaaaatctgttcgcttcattcattgcccccacaatcctaggcctacccgccgcagtactgatcattctatttccccctctattgatccccacctccaaatatctcatcaacaaccgactaatcaccacccaacaatgactaatcaaactaacctcaaaacaaatgataaccatacacaacactaaaggacgaacctgatctcttatactagtatccttaatcatttttattgccacaactaacctcctcggactcctgcctcactcatttacaccaaccacccaactatctataaacctagccatggccatccccttatgagcgggcgcagtgattataggctttcgctctaagattaaaaatgccctagcccacttcttaccacaaggcacacctacaccccttatccccatactagttattatcgaaaccatcagcctactcattcaaccaatagccctggccgtacgcctaaccgctaacattactgcaggccacctactcatgcacctaattggaagcgccaccctagcaatatcaaccattaaccttccctctacacttatcatcttcacaattctaattctactgactatcctagaaatcgctgtcgccttaatccaagcctacgttttcacacttctagtaagcctctacctgcacgacaacacataatgacccaccaatcacatgcctatcatatagtaaaacccagcccatgacccctaacaggggccctctcagccctcctaatgacctccggcctagccatgtgatttcacttccactccataacgctcctcatactaggcctactaaccaacacactaaccatataccaatgatggcgcgatgtaacacgagaaagcacataccaaggccaccacacaccacctgtccaaaaaggccttcgatacgggataatcctatttattacctcagaagtttttttcttcgcaggatttttctgagccttttaccactccagcctagcccctaccccccaattaggagggcactggcccccaacaggcatcaccccgctaaatcccctagaagtcccactcctaaacacatccgtattactcgcatcaggagtatcaatcacctgagctcaccatagtctaatagaaaacaaccgaaaccaaataattcaagcactgcttattacaattttactgggtctctattttaccctcctacaagcctcagagtacttcgagtctcccttcaccatttccgacggcatctacggctcaacattttttgtagccacaggcttccacggacttcacgtcattattggctcaactttcctcactatctgcttcatccgccaactaatatttcactttacatccaaacatcactttggcttcgaagccgccgcctgatactggcattttgtagatgtggtttgactatttctgtatgtctccatctattgatgagggtcttactcttttagtataaatagtaccgttaacttccaattaactagttttgacaacattcaaaaaagagtaataaacttcgccttaattttaataatcaacaccctcctagccttactactaataattattacattttgactaccacaactcaacggctacatagaaaaatccaccccttacgagtgcggcttcgaccctatatcccccgcccgcgtccctttctccataaaattcttcttagtagctattaccttcttattatttgatctagaaattgccctccttttacccctaccatgagccctacaaacaactaacctgccactaatagttatgtcatccctcttattaatcatcatcctagccctaagtctggcctatgagtgactacaaaaaggattagactgaaccgaattggtatatagtttaaacaaaacgaatgatttcgactcattaaattatgataatcatatttaccaaatgcccctcatttacataaatattatactagcatttaccatctcacttctaggaatactagtatatcgctcacacctcatatcctccctactatgcctagaaggaataatactatcgctgttcattatagctactctcataaccctcaacacccactccctcttagccaatattgtgcctattgccatactagtctttgccgcctgcgaagcagcggtgggcctagccctactagtctcaatctccaacacatatggcctagactacgtacataacctaaacctactccaatgctaaaactaatcgtcccaacaattatattactaccactgacatgactttccaaaaaacacataatttgaatcaacacaaccacccacagcctaattattagcatcatccctctactattttttaaccaaatcaacaacaacctatttagctgttccccaaccttttcctccgaccccctaacaacccccctcctaatactaactacctgactcctacccctcacaatcatggcaagccaacgccacttatccagtgaaccactatcacgaaaaaaactctacctctctatactaatctccctacaaatctccttaattataacattcacagccacagaactaatcatattttatatcttcttcgaaaccacacttatccccaccttggctatcatcacccgatgaggcaaccagccagaacgcctgaacgcaggcacatacttcctattctacaccctagtaggctcccttcccctactcatcgcactaatttacactcacaacaccctaggctcactaaacattctactactcactctcactgcccaagaactatcaaactcctgagctaacaacctaatatgactagcttacacaatagcttttatagtaaagatacctctttacggactccacttatgactccctaaagcccatgtcgaagcccccatcgctgggtcaatagtacttgccgcagtactcttgaaactaggcggctatggtataatacgcctcacactcattctcaaccccctgacaaaacacatagcctaccccttccttgtactatccctatgaggcataattataacaagctccatctgcctacgacaaacagacctaaaatcgctcattgcatactcttcaatcagccacatagccctcgtagtaacagccattctcatccaaaccccctgaagcttcaccggcgcagtcattctcataatcgcccacggacttacatcctcattactattctgcctagcaaactcaaactacgaacgcactcacagtcgcatcataatcctctctcaaggacttcaaactctactcccactaatagctttttgatgacttctagcaagcctcgctaacctcgccttaccccccactattaacctactgggagaactctctgtgctagtaaccacgttctcctgatcaaatattactctcctacttacaggactcaacatactagtcacagccctatactccctctacatatttaccacaacacaatggggctcactcacccaccacattaacaacataaaaccctcattcacacgagaaaacaccctcatgttcatacacctatcccccattctcctcctatccctcaaccccgacatcattaccgggttttcctcttgtaaatatagtttaaccaaaacatcagattgtgaatctgacaacagaggcttacgaccccttatttaccgagaaagctcacaagaactgctaactcatgcccccatgtctaacaacatggctttctcaacttttaaaggataacagctatccattggtcttaggccccaagaattttggtgcaactccaaataaaagtaataaccatgcacactactataaccaccctaaccctaacttccctaattccccccatccttaccaccctcgttaaccctaacaaaaaaaactcatacccccattatgtaaaatccattgtcgcatccacctttattatcagtctcttccccacaacaatattcatgtgcctagaccaagaagttattatctcgaactgacactgagccacaacccaaacaacccagctctccctaagcttcaaactagactacttctccataatattcatccctgtagcattgttcgttacatggtccatcatagaattctcactgtgatatataaactcagacccaaacattaatcagttcttcaaatatctactcatcttcctaattaccatactaatcttagttaccgctaacaacctattccaactgttcatcggctgagagggcgtaggaattatatccttcttgctcatcagttgatgatacgcccgagcagatgccaacacagcagccattcaagcaatcctatacaaccgtatcggcgatatcggtttcatcctcgccttagcatgatttatcctacactccaactcatgagacccacaacaaatagcccttctaaacgctaatccaagcctcaccccactactaggcctcctcctagcagcagcaggcaaatcagcccaattaggtctccacccctgactcccctcagccatagaaggccccaccccagtctcagccctactccactcaagcactatagttgtagcaggaatcttcttactcatccgcttccaccccctagcagaaaatagcccactaatccaaactctaacactatgcttaggcgctatcaccactctgttcgcagcagtctgcgcccttacacaaaatgacatcaaaaaaatcgtagccttctccacttcaagtcaactaggactcataatagttacaatcggcatcaaccaaccacacctagcattcctgcacatctgtacccacgccttcttcaaagccatactatttatgtgctccgggtccatcatccacaaccttaacaatgaacaagatattcgaaaaataggaggactactcaaaaccatacctctcacttcaacctccctcaccattggcagcctagcattagcaggaatacctttcctcacaggtttctactccaaagaccacatcatcgaagccgcaaacatatcatacacaaacgcctgagccctatttattactctcatcgctacctccctgacaagcgcctatagcactcgaataattcttctcaccctaacaggtcaacctcgcttccccacccttactaacattaacgaaaataaccccaccctactaaaccccattaaacgcctggcagccggaagcctattcgcaggatttctcattactaacaacatttcccccgcatcccccttccaaacaacaatccccctctacctaaaactcacagccctcgctgtcactttcctaggacttctaacagccctagacctcaactacctaaccaacaaacttaaaataaaatccccactatgcacattttatttctccaacatactcggattctaccctagcatcacacaccgcacaatcccctatctaggccttcttacgagccaaaacctgcccctactcctcctagacctaacctgactagaaaagctattacctaaaacaatttcacagcaccaaatctccacctccatcatcacctcaacccaaaaaggcataattaaactttacttcctctctttcttcttcccactcatcctaaccctactcctaatcacataacctattcccccgagcaatctcaattacaatatatacaccaacaaacaatgttcaaccagtaactactactaatcaacgcccataatcatacaaagcccccgcaccaataggatcctcccgaatcaaccctgacccctctccttcataaattattcagcttcctacactattaaagtttaccacaaccaccaccccatcatactctttcacccacagcaccaatcctacctccatcgctaaccccactaaaacactcaccaagacctcaacccctgacccccatgcctcaggatactcctcaatagccatcgctgtagtatatccaaagacaaccatcattccccctaaataaattaaaaaaactattaaacccatataacctcccccaaaattcagaataataacacacccgaccacaccgctaacaatcaatactaaacccccataaataggagaaggcttagaagaaaatcccacaaaccccattactaaacccacactcaacagaaacaaagcatacatcattattctcgcacggactacaaccacgaccaatgatatgaaaaaccatcgttgtatttcaactacaagaacaccaatgaccccaatacgcaaaattaaccccctaataaaattaattaaccactcattcatcgacctccccaccccatccaacatctccgcatgatgaaacttcggctcactccttggcgcctgcctgatcctccaaatcaccacaggactattcctagccatgcactactcaccagacgcctcaaccgccttttcatcaatcgcccacatcactcgagacgtaaattatggctgaatcatccgctaccttcacgccaatggcgcctcaatattctttatctgcctcttcctacacatcgggcgaggcctatattacggatcatttctctactcagaaacctgaaacatcggcattatcctcctgcttgcaactatagcaacagccttcataggctatgtcctcccgtgaggccaaatatcattctgaggggccacagtaattacaaacttactatccgccatcccatacattgggacagacctagttcaatgaatctgaggaggctactcagtagacagtcccaccctcacacgattctttacctttcacttcatcttgcccttcattattgcagccctagcagcactccacctcctattcttgcacgaaacgggatcaaacaaccccctaggaatcacctcccattccgataaaatcaccttccacccttactacacaatcaaagacgccctcggcttacttctcttccttctctccttaatgacattaacactattctcaccagacctcctaggcgacccagacaattataccctagccaaccccttaaacacccctccccacatcaagcccgaatgatatttcctattcgcctacacaattctccgatccgtccctaacaaactaggaggcgtccttgccctattactatccatcctcatcctagcaataatccccatcctccatatatccaaacaacaaagcataacatttcgcccactaagccaatcactttattgactcctagccgcagacctcctcattctaacctgaatcggaggacaaccagtaagctacccttttaccatcattggacaagtagcatccgtactatacttcacaacaatcctaatcctaataccaactatctccctaattgaaaacaaaatactcaaatgggcctgtccttgtagtataaactaatacaccagtcttgtaaaccggagatgaaaacctttttccaaggacaaatcagagaaaaagtctttaactccaccattagcacccaaagctaagattctaatttaaactattctctgttctttcatggggaagcagatttgggtaccacccaagtattgactcacccatcaacaaccgctatgtatttcgtacattactgccagccaccatgaatattgtacggtaccataaatacttgaccacctgtagtacataaaaacccaatccacatcaaaaccccctccccatgcttacaagcaagtacagcaatcaaccctcaactatcacacatcaactgcaactccaaagccacccctcacccactaggataccaacaaacctacccacccttaacagtacatagtacataaagccatttaccgtacatagcacattacagtcaaatcccctctcgtccccatggatgacccccctcagataggggtcccttgaccaccatcctccgtgaaatcaatatcccgcacaagagtgctactctcctcgctccgggcccataacacttgggggtagctaaagtgaactgtatccgacatctggttcctacttcagggccataaagcctaaatagcccacacgttccccttaaataagacatcacgatg

SEQ ID NO: 111 - DNA, 16569 bp, Homo sapiens mitochondrial
  3107: "n" refers to a nucleotide at position 3107 of the Cambridge Reference Sequence (CRS, Anderson et al. 1981 Nature 290:457-465), later determined to be absent from the human mtDNA sequence according to the revised CRS (rCRS, Andrews et al. 1999 Nature Genetics 23:147); "n" therefore represents a single nucleotide deletion at a position corresponding to nucleotide 3107 of SEQ ID NO:1 as provided herein.
gatcacaggtctatcaccctattaaccactcacgggagctctccatgcatttggtattttcgtctggggggtgtgcacgcgatagcattgcgagacgctggagccggagcaccctatgtcgcagtatctgtctttgattcctgccccatcccattatttatcgcacctacgttcaatattacaggcgaacatacttactaaagtgtgttaattaattaatgcttgtaggacataataataacaattgaatgtctgcacagccactttccacacagacatcataacaaaaaatttccaccaaaccccccctcccccgcttctggccacagcacttaaacacatctctgccaaaccccaaaaacaaagaaccctaacaccagcctaaccagatttcaaattttatcttttggcggtatgcacttttaacagtcaccccccaactaacacattattttcccctcccactcccatactactaatctcatcaatacaacccccgcccatcctacccagcacacacacaccgctgctaaccccataccccgaaccaaccaaaccccaaagacaccccccacagtttatgtagcttacctcctcaaagcaatacactgaaaatgtttagacgggctcacatcaccccataaacaaataggtttggtcctagcctttctattagctcttagtaagattacacatgcaagcatccccgttccagtgagttcaccctctaaatcaccacgatcaaaagggacaagcatcaagcacgcagcaatgcagctcaaaacgcttagcctagccacacccccacgggaaacagcagtgattaacctttagcaataaacgaaagtttaactaagctatactaaccccagggttggtcaatttcgtgccagccaccgcggtcacacgattaacccaagtcaatagaagccggcgtaaagagtgttttagatcaccccctccccaataaagctaaaactcacctgagttgtaaaaaactccagttgacacaaaatagactacgaaagtggctttaacatatctgaacacacaatagctaagacccaaactgggattagataccccactatgcttagccctaaacctcaacagttaaatcaacaaaactgctcgccagaacactacgagccacagcttaaaactcaaaggacctggcggtgcttcatatccctctagaggagcctgttctgtaatcgataaaccccgatcaacctcaccacctcttgctcagcctatataccgccatcttcagcaaaccctgatgaaggctacaaagtaagcgcaagtacccacgtaaagacgttaggtcaaggtgtagcccatgaggtggcaagaaatgggctacattttctaccccagaaaactacgatagcccttatgaaacttaagggtcgaaggtggatttagcagtaaactgagagtagagtgcttagttgaacagggccctgaagcgcgtacacaccgcccgtcaccctcctcaagtatacttcaaaggacatttaactaaaacccctacgcatttatatagaggagacaagtcgtaacatggtaagtgtactggaaagtgcacttggacgaaccagagtgtagcttaacacaaagcacccaacttacacttaggagatttcaacttaacttgaccgctctgagctaaacctagccccaaacccactccaccttactaccagacaaccttagccaaaccatttacccaaataaagtataggcgatagaaattgaaacctggcgcaatagatatagtaccgcaagggaaagatgaaaaattatagccaagcataatatagcaaggactaacccctataccttctgcataatgaattaactagaaataactttgcaaggagagccaaagctaagacccccgaaaccagacgagctacctaagaacagctaaaagagcacacccgtctatgtagcaaaatagtgggaagatttataggtagaggcgacaaacctaccgagcctggtgatagctggttgtccaagatagaatcttagttcaactttaaatttgcccacagaaccctctaaatccccttgtaaatttaactgttagtccaaagaggaacagctctttggacactaggaaaaaaccttgtagagagagtaaaaaatttaacacccatagtaggcctaaaagcagccaccaattaagaaagcgttcaagctcaacacccactacctaaaaaatcccaaacatataactgaactcctcacacccaattggaccaatctatcaccctatagaagaactaatgttagtataagtaacatgaaaacattctcctccgcataagcctgcgtcagattaaaacactgaactgacaattaacagcccaatatctacaatcaaccaacaagtcattattaccctcactgtcaacccaacacaggcatgctcataaggaaaggttaaaaaaagtaaaaggaactcggcaaatcttaccccgcctgtttaccaaaaacatcacctctagcatcaccagtattagaggcaccgcctgcccagtgacacatgtttaacggccgcggtaccctaaccgtgcaaaggtagcataatcacttgttccttaaatagggacctgtatgaatggctccacgagggttcagctgtctcttacttttaaccagtgaaattgacctgcccgtgaagaggcgggcatgacacagcaagacgagaagaccctatggagctttaatttattaatgcaaacagtacctaacaaacccacaggtcctaaactaccaaacctgcattaaaaatttcggttggggcgacctcggagcagaacccaacctccgagcagtacatgctaagacttcaccagtcaaagcgaactactatactcaattgatccaataacttgaccaacggaacaagttaccctagggataacagcgcaatcctattctagagtccatatcaacaatagggtttacgacctcgatgttggatcaggacatcccgatggtgcagccgctattaaaggttcgtttgttcaacgattaaagtcctacgtgatctgagttcagaccggagtaatccaggtcggtttctatctacnttcaaattcctccctgtacgaaaggacaagagaaataaggcctacttcacaaagcgccttcccccgtaaatgatatcatctcaacttagtattatacccacacccacccaagaacagggtttgttaagatggcagagcccggtaatcgcataaaacttaaaactttacagtcagaggttcaattcctcttcttaacaacatacccatggccaacctcctactcctcattgtacccattctaatcgcaatggcattcctaatgcttaccgaacgaaaaattctaggctatatacaactacgcaaaggccccaacgttgtaggcccctacgggctactacaacccttcgctgacgccataaaactcttcaccaaggagcccctaaaacccgccacatctaccatcaccctctacatcaccgccccgaccttagctctcaccatcgctcttctactatgaacccccctccccatacccaaccccctggtcaacctcaacctaggcctcctatttattctagccacctctagcctagccgtttactcaatcctctgatcagggtgagcatcaaactcaaactacgccctgatcggcgcactgcgagcagtagcccaaacaatctcatatgaagtcaccctagccatcattctactatcaacattactaataagtggctcctttaacctctccacccttatcacaacacaagaacacctctgattactcctgccatcatgacccttggccataatatgatttatctccacactagcagagaccaaccgaacccccttcgaccttgccgaaggggagtccgaactagtctcaggcttcaacatcgaatacgccgcaggccccttcgccctattcttcatagccgaatacacaaacattattataataaacaccctcaccactacaatcttcctaggaacaacatatgacgcactctcccctgaactctacacaacatattttgtcaccaagaccctacttctaacctccctgttcttatgaattcgaacagcatacccccgattccgctacgaccaactcatacacctcctatgaaaaaacttcctaccactcaccctagcattacttatatgatatgtctccatacccattacaatctccagcattccccctcaaacctaagaaatatgtctgataaaagagttactttgatagagtaaataataggagcttaaacccccttatttctaggactatgagaatcgaacccatccctgagaatccaaaattctccgtgccacctatcacaccccatcctaaagtaaggtcagctaaataagctatcgggcccataccccgaaaatgttggttatacccttcccgtactaattaatcccctggcccaacccgtcatctactctaccatctttgcaggcacactcatcacagcgctaagctcgcactgattttttacctgagcaggcctagaaataaacatgctagcttttattccagttctaaccaaaaaaataaaccctcgttccacagaagctgccatcaagtatttcctcacgcaagcaaccgcatccataatccttctaatagctatcctcttcaacaatatactctccggacaatgaaccataaccaatactaccaatcaatactcatcattaataatcataatggctatagcaataaaactaggaatagccccctttcacttctgagtcccagaggttacccaaggcacccctctgacatccggcctgcttcttctcacatgacaaaaactagcccccatctcaatcatataccaaatctctccctcactaaacgtaagccttctcctcactctctcaatcttatccatcatagcaggcagttgaggtggattaaaccaaacccagctacgcaaaatcttagcatactcctcaattacccacataggatgaataatagcagttctaccgtacaaccctaacataaccattcttaatttaactatttatattatcctaactactaccgcattcctactactcaacttaaactccagcaccacgaccctactactatctcgcacctgaaacaagctaacatgactaacacccttaattccatccaccctcctctccctaggaggcctgcccccgctaaccggctttttgcccaaatgggccattatcgaagaattcacaaaaaacaatagcctcatcatccccaccatcatagccaccatcaccctccttaacctctacttctacctacgcctaatctactccacctcaatcacactactccccatatctaacaacgtaaaaataaaatgacagtttgaacatacaaaacccaccccattcctccccacactcatcgcccttaccacgctactcctacctatctccccttttatactaataatcttatagaaatttaggttaaatacagaccaagagccttcaaagccctcagtaagttgcaatacttaatttctgtaacagctaaggactgcaaaaccccactctgcatcaactgaacgcaaatcagccactttaattaagctaagcccttactagaccaatgggacttaaacccacaaacacttagttaacagctaagcaccctaatcaactggcttcaatctacttctcccgccgccgggaaaaaaggcgggagaagccccggcaggtttgaagctgcttcttcgaatttgcaattcaatatgaaaatcacctcggagctggtaaaaagaggcctaacccctgtctttagatttacagtccaatgcttcactcagccattttacctcacccccactgatgttcgccgaccgttgactattctctacaaaccacaaagacattggaacactatacctattattcggcgcatgagctggagtcctaggcacagctctaagcctccttattcgagccgagctgggccagccaggcaaccttctaggtaacgaccacatctacaacgttatcgtcacagcccatgcatttgtaataatcttcttcatagtaatacccatcataatcggaggctttggcaactgactagttcccctaataatcggtgcccccgatatggcgtttccccgcataaacaacataagcttctgactcttacctccctctctcctactcctgctcgcatctgctatagtggaggccggagcaggaacaggttgaacagtctaccctcccttagcagggaactactcccaccctggagcctccgtagacctaaccatcttctccttacacctagcaggtgtctcctctatcttaggggccatcaatttcatcacaacaattatcaatataaaaccccctgccataacccaataccaaacgcccctcttcgtctgatccgtcctaatcacagcagtcctacttctcctatctctcccagtcctagctgctggcatcactatactactaacagaccgcaacctcaacaccaccttcttcgaccccgccggaggaggagaccccattctataccaacacctattctgatttttcggtcaccctgaagtttatattcttatcctaccaggcttcggaataatctcccatattgtaacttactactccggaaaaaaagaaccatttggatacataggtatggtctgagctatgatatcaattggcttcctagggtttatcgtgtgagcacaccatatatttacagtaggaatagacgtagacacacgagcatatttcacctccgctaccataatcatcgctatccccaccggcgtcaaagtatttagctgactcgccacactccacggaagcaatatgaaatgatctgctgcagtgctctgagccctaggattcatctttcttttcaccgtaggtggcctgactggcattgtattagcaaactcatcactagacatcgtactacacgacacgtactacgttgtagctcacttccactatgtcctatcaataggagctgtatttgccatcataggaggcttcattcactgatttcccctattctcaggctacaccctagaccaaacctacgccaaaatccatttcactatcatattcatcggcgtaaatctaactttcttcccacaacactttctcggcctatccggaatgccccgacgttactcggactaccccgatgcatacaccacatgaaacatcctatcatctgtaggctcattcatttctctaacagcagtaatattaataattttcatgatttgagaagccttcgcttcgaagcgaaaagtcctaatagtagaagaaccctccataaacctggagtgactatatggatgccccccaccctaccacacattcgaagaacccgtatacataaaatctagacaaaaaaggaaggaatcgaaccccccaaagctggtttcaagccaaccccatggcctccatgactttttcaaaaaggtattagaaaaaccatttcataactttgtcaaagttaaattataggctaaatcctatatatcttaatggcacatgcagcgcaagtaggtctacaagacgctacttcccctatcatagaagagcttatcacctttcatgatcacgccctcataatcattttccttatctgcttcctagtcctgtatgcccttttcctaacactcacaacaaaactaactaatactaacatctcagacgctcaggaaatagaaaccgtctgaactatcctgcccgccatcatcctagtcctcatcgccctcccatccctacgcatcctttacataacagacgaggtcaacgatccctcccttaccatcaaatcaattggccaccaatggtactgaacctacgagtacaccgactacggcggactaatcttcaactcctacatacttcccccattattcctagaaccaggcgacctgcgactccttgacgttgacaatcgagtagtactcccgattgaagcccccattcgtataataattacatcacaagacgtcttgcactcatgagctgtccccacattaggcttaaaaacagatgcaattcccggacgtctaaaccaaaccactttcaccgctacacgaccgggggtatactacggtcaatgctctgaaatctgtggagcaaaccacagtttcatgcccatcgtcctagaattaattcccctaaaaatctttgaaatagggcccgtatttaccctatagcaccccctctaccccctctagagcccactgtaaagctaacttagcattaaccttttaagttaaagattaagagaaccaacacctctttacagtgaaatgccccaactaaatactaccgtatggcccaccataattacccccatactccttacactattcctcatcacccaactaaaaatattaaacacaaactaccacctacctccctcaccaaagcccataaaaataaaaaattataacaaaccctgagaaccaaaatgaacgaaaatctgttcgcttcattcattgcccccacaatcctaggcctacccgccgcagtactgatcattctatttccccctctattgatccccacctccaaatatctcatcaacaaccgactaatcaccacccaacaatgactaatcaaactaacctcaaaacaaatgataaccatacacaacactaaaggacgaacctgatctcttatactagtatccttaatcatttttattgccacaactaacctcctcggactcctgcctcactcatttacaccaaccacccaactatctataaacctagccatggccatccccttatgagcgggcgcagtgattataggctttcgctctaagattaaaaatgccctagcccacttcttaccacaaggcacacctacaccccttatccccatactagttattatcgaaaccatcagcctactcattcaaccaatagccctggccgtacgcctaaccgctaacattactgcaggccacctactcatgcacctaattggaagcaccaccctagcaatatcaaccattaaccttccctctacacttatcatcttcacaattctaattctactgactatcctagaaatcgctgtcgccttaatccaagcctacgttttcacacttctagtaagcctctacctgcacgacaacacataatgacccaccaatcacatgcctatcatatagtaaaacccagcccatgacccctaacaggggccctctcagccctcctaatgacctccggcctagccatgtgatttcacttccactccataacgctcctcatactaggcctactaaccaacacactaaccatataccaatgatggcgcgatgtaacacgagaaagcacataccaaggccaccacacaccacctgtccaaaaaggccttcgatacgggataatcctatttattacctcagaagtttttttcttcgcaggatttttctgagccttttaccactccagcctagcccctaccccccaattaggagggcactggcccccaacaggcatcaccccgctaaatcccctagaagtcccactcctaaacacatccgtattactcgcatcaggagtatcaatcacctgagctcaccatagtctaatagaaaacaaccgaaaccaaataattcaagcactgctcattacaattttactgggcctctattttaccctcctacaagcctcagagtacttcgagtctcccttcaccatttccgacggcatctacggctcaacattttttgtagccacaggcttccacggacttcacgtcattattggctcaactttcctcactatctgcttcatccgccaactaatatttcactttacatccaaacatcactttggcttcgaagccgccgcctgatactggcattttgtagatgtggtttgactatttctgtatgtctccatctattgatgagggtcttactcttttagtataaatagtaccgttaacttccaattaactagttttgacaacattcaaaaaagagtaataaacttcgccttaattttaataatcaacaccctcctagccttactactaataattattacattttgactaccacaactcaacggctacatagaaaaatccaccccttacgagtgcggcttcgaccctatatcccccgcccgcgtccctttctccataaaattcttcttagtagctattaccttcttattatttgatctagaaattgccctccttttacccctaccatgagccctacaaacaactaacctgccactaatagttatgtcatccctcttattaatcatcatcctagccctaagtctggcctatgagtgactacaaaaaggattagactgaaccgaattggtatatagtttaaacaaaacgaatgatttcgactcattaaattatgataatcatatttaccaaatgcccctcatttacataaatattatactagcatttaccatctcacttctaggaatactagtatatcgctcacacctcatgtcctccctactatgcctagaaggaataatactatcgctgttcattatagctactctcataaccctcaacacccactccctcttagccaatattgtgcctattgccatactagtctttgccgcctgcgaagcagcggtgggcctagccctactagtctcaatctccaacacatatggcctagactacgtacataacctaaacctactccaatgctaaaactaatcgtcccaacaattatattactaccactgacatgactttccaaaaaacacataatttgaatcaacacaaccacccacagcctaattattagcatcatccctctactattttttaaccaaatcaacaacaacctatttagctgttccccaaccttttcctccgaccccctaacaacccccctcctaatactaactacctgactcctacccctcacaatcatggcaagccaacgccacttatccagtgaaccactatcacgaaaaaaactctacctctctatactaatctccctacaaatctccttaattataacattcacagccacagaactaatcatattttatatcttcttcgaaaccacacttatccccaccttggctatcatcacccgatgaggcaaccagccagaacgcctgaacgcaggcacatacttcctattctacaccctagtaggctcccttcccctactcatcgcactaatttacactcacaacaccctaggctcactaaacattctactactcaccctcactgcccaagaactatcaaactcctgagccaacaacttaatatgactagcttacacaatagcttttatagtaaagatacctctttacggactccacttatgactccctaaagcccatgtcgaagcccccatcgctgggtcaatagtacttgccgcagtactcttgaaactaggcggctatggtataatacgcctcacactcattctcaaccccctgacaaaacacatagcctaccccttccttgtattatccctatgaggcataattataacaagctccatctgcctacgacaaacagacctaaaatcgctcattgcatactcttcaatcagccacatagccctcgtagtaacagccattctcatccaaaccccctgaagcttcaccggcgcagtcattctcataatcgcccacggacttacatcctcattactattctgcctagcaaactcaaactacgaacgcactcacagtcgcatcataatcctctctcaaggacttcaaactctactcccactaatagctttttgatgacttctagcaagcctcgctaacctcgccttaccccccactattaacctactgggagaactctctgtgctagtaaccacgttctcctgatcaaatatcactctcctacttacaggactcaacatactagtcacagccctatactccctctacatatttaccacaacacaatggggctcactcacccaccacattaacaacataaaaccctcattcacacgagaaaacaccctcatgttcatacacctatcccccattctcctcctatccctcaaccccgacatcattaccgggttttcctcttgtaaatatagtttaaccaaaacatcagattgtgaatctgacaacagaggcttacgaccccttatttaccgagaaagctcacaagaactgctaactcatgcccccatgtctaacaacatggctttctcaacttttaaaggataacagctatccattggtcttaggccccaagaattttggtgcaactccaaataaaagtaataaccatgcacactactataaccaccctaaccctaacttccctaattccccccatccttaccaccctcgttaaccctaacaaaaaaaactcatacccccattatgtaaaatccattgtcgcatccacctttattatcagtctcttccccacaacaatattcatgtgcctagaccaagaagttattatctcgaactgacactgagccacaacccaaacaacccagctctccctaagcttcaaactagactacttctccataatattcatccctgtagcattgttcgttacatggtccatcatagaattctcactgtgatatataaactcagacccaaacattaatcagttcttcaaatatctactcatcttcctaattaccatactaatcttagttaccgctaacaacctattccaactgttcatcggctgagagggcgtaggaattatatccttcttgctcatcagttgatgatacgcccgagcagatgccaacacagcagccattcaagcaatcctatacaaccgtatcggcgatatcggtttcatcctcgccttagcatgatttatcctacactccaactcatgagacccacaacaaatagcccttctaaacgctaatccaagcctcaccccactactaggcctcctcctagcagcagcaggcaaatcagcccaattaggtctccacccctgactcccctcagccatagaaggccccaccccagtctcagccctactccactcaagcactatagttgtagcaggaatcttcttactcatccgcttccaccccctagcagaaaatagcccactaatccaaactctaacactatgcttaggcgctatcaccactctgttcgcagcagtctgcgcccttacacaaaatgacatcaaaaaaatcgtagccttctccacttcaagtcaactaggactcataatagttacaatcggcatcaaccaaccacacctagcattcctgcacatctgtacccacgccttcttcaaagccatactatttatgtgctccgggtccatcatccacaaccttaacaatgaacaagatattcgaaaaataggaggactactcaaaaccatacctctcacttcaacctccctcaccattggcagcctagcattagcaggaatacctttcctcacaggtttctactccaaagaccacatcatcgaaaccgcaaacatatcatacacaaacgcctgagccctatctattactctcatcgctacctccctgacaagcgcctatagcactcgaataattcttctcaccctaacaggtcaacctcgcttccccacccttactaacattaacgaaaataaccccaccctactaaaccccattaaacgcctggcagccggaagcctattcgcaggatttctcattactaacaacatttcccccgcatcccccttccaaacaacaatccccctctacctaaaactcacagccctcgctgtcactttcctaggacttctaacagccctagacctcaactacctaaccaacaaacttaaaataaaatccccactatgcacattttatttctccaacatactcggattctaccctagcatcacacaccgcacaatcccctatctaggccttcttacgagccaaaacctgcccctactcctcctagacctaacctgactagaaaagctattacctaaaacaatttcacagcaccaaatctccacctccatcatcacctcaacccaaaaaggcataattaaactttacttcctctctttcttcttcccactcatcctaaccctactcctaatcacataacctattcccccgagcaatttcaattacaatatatacaccaacaaacaatgttcaaccagtaactactactaatcaacgcccataatcatacaaagcccccgcaccaataggatcctcccgaatcaaccctgacccctctccttcataaattattcagcttcctacactattaaagtttaccacaaccaccaccccatcatactctttcacccacagcaccaatcctacctccatcgctaaccccactaaaacactcaccaagacctcaacccctgacccccatgcctcaggatactcctcaatagccatcgctgtagtatatccaaagacaaccatcattccccctaaataaattaaaaaaactattaaacccatataacctcccccaaaattcagaataataacacacccgaccacaccgctaacaatcaatactaaacccccataaataggagaaggcttagaagaaaaccccacaaaccccattactaaacccacactcaacagaaacaaagcatacatcattattctcgcacggactacaaccacgaccaatgatatgaaaaaccatcgttgtatttcaactacaagaacaccaatgaccccaatacgcaaaattaaccccctaataaaattaattaaccactcactcatcgacctccccaccccatccaacatctccgcatgatgaaacttcggctcactccttggcgcctgcctgatcctccaaatcaccacaggactattcctagccatgcactactcaccagacgcctcaaccgccttttcatcaatcgcccacatcactcgagacgtaaattatggctgaatcatccgctaccttcacgccaatggcgcctcaatattctttatctgcctcttcctacacatcgggcgaggcctatattacggatcatttctctactcagaaacctgaaacatcggcattatcctcctgcttgcaactatagcaacagccttcataggctatgtcctcccgtgaggccaaatatcattctgaggggccacagtaattacaaacttactatccgccatcccatacattgggacagacctagttcaatgaatctgaggaggctactcagtagacagtcccaccctcacacgattctttacctttcacttcatcttgcccttcattattgcagccctagcagcactccacctcctattcttgcacgaaacgggatcaaacaaccccctaggaatcacctcccattccgataaaatcaccttccacccttactacacaatcaaagacgccctcggcttacttctcttccttctctccttaatgacattaacactattctcaccagacctcctaggcgacccagacaattataccctagccaaccccttaaacacccctccccacatcaagcccgaatgatatttcctattcgcctacacaattctccgatccgtccctaacaaactaggaggcgtccttgccctattactatccatcctcatcctagcaataatccccatcctccatatatccaaacaacaaagcataatatttcgcccactaagccaatcactttattgactcctagccgcagacctcctcattctaacctgaatcggaggacaaccagtaagctacccttttaccatcattggacaagtagcatccgtactatacttcacaacaatcctaatcctaataccaactatctccctaattgaaaacaaaatactcaaatgggcctgtccttgtagtataaactaatacaccagtcttgtaaaccggagatgaaaacctttttccaaggacaaatcagagaaaaagtctttaactccaccattagcacccaaagctaagattctaatttaaactattctctgttctttcatggggaagcagatttgggtaccacccaagtattgactcacccatcaacaaccgctatgtatttcgtacattactgccagccaccatgaatattgtacagtaccataaatacttgaccacctgtagtacataaaaacccaatccacatcaaaaccccctccccatgcttacaagcaagtacagcaatcaacccccaactatcacacatcaactgcaactccaaagccacccctcacccactaggataccaacaaacctacccacccttaacagtacatagcacataaagccatttaccgtacatagcacattacagtcaaatcccttctcgtccccatggatgacccccctcagataggggtcccttgaccaccatcctccgtgaaatcaatatcccgcacaagagtgctactctcctcgctccgggcccataacacttgggggtagctaaagtgaactgtatccgacatctggttcctacttcagggccataaagcctaaatagcccacacgttccccttaaataagacatcacgatg

SEQ ID NO: 112 - DNA, 16571 bp, Homo sapiens mitochondrial
  3109: "n" refers to a nucleotide at position 3107 of the Cambridge Reference Sequence (CRS, Anderson et al. 1981 Nature 290:457-465), later determined to be absent from the human mtDNA sequence according to the revised CRS (rCRS, Andrews et al. 1999 Nature Genetics 23:147); "n" therefore represents a single nucleotide deletion at a position corresponding to nucleotide 3107 of SEQ ID NO:1 as provided herein.
gatcacaggtctatcaccctattaaccactcacgggagctctccatgcatttggtattttcgtctggggggtgtgcacgcgatagcattgcgagacgctggagccggagcaccctatgtcgcagtatctgtctttgattcctgcctcatcctattatttatcgcacctacgttcaatattacaggcgaacatacttactaaagtgtgttaattaattaatgcttgtaggacataataataacaattgaatgtctgcacagccgctttccacacagacatcataacaaaaaatttccaccaaaccccccctcccccgccttctggccacagcacttaaacacatctctgccaaaccccaaaaacaaagaaccctaacaccagcctaaccagatttcaaattttatcttttggcggtatgcacttttaacagtcaccccccaactaacacattattttcccctcccactcccatactactaatctcatcaatacaacccccgcccatcctacccagcacacacacaccgctgctaaccccataccccgaaccaaccaaaccccaaagacaccccccacagtttatgtagcttacctcctcaaagcaatacactgaaaatgtttagacgggctcacatcaccccataaacaaataggtttggtcctagcctttctattagctcttagtaagattacacatgcaagcatccccgttccagtgagttcaccctctaaatcaccacgatcaaaagggacaagcatcaagcacgcagcaatgcagctcaaaacgcttagcctagccacacccccacgggaaacagcagtgattaacctttagcaataaacgaaagtttaactaagctatactaaccccagggttggtcaatttcgtgccagccaccgcggtcacacgattaacccaagtcaatagaagccggcgtaaagagtgttttagatcacccccctccccaataaagctaaaactcacctgagttgtaaaaaactccagttgacacaaaatagactacgaaagtggctttaacatatctgaacacacaatagctaagacccaaactgggattagataccccactatgcttagccctaaacctcaacagttaaatcaacaaaactgctcgccagaacactacgagccacagcttaaaactcaaaggacctggcggtgcttcatatccctctagaggagcctgttctgtaatcgataaaccccgatcaacctcaccacctcttgctcagcctatataccgccatcttcagcaaaccctgatgaaggctacaaagtaagcgcaagtacccacgtaaagacgttaggtcaaggtgtagcccatgaggtggcaagaaatgggctacattttctaccccagaaaactacgatagcccttatgaaacttaagggtcgaaggtggatttagcagtaaactgagagtagagtgcttagttgaacagggccctgaagcgcgtacacaccgcccgtcaccctcctcaagtatacttcaaaggacatttaactaaaacccctacgcatttatatagaggagacaagtcgtaacatggtaagtgtactggaaagtgcacttggacgaaccagagtgtagcttaacacaaagcacccaacttacacttaggagatttcaacttaacttgaccgctctgagctaaacctagccccaaacccactccaccttactaccagacaaccttagccaaaccatttacccaaataaagtataggcgatagaaattgaaacctggcgcaatagatatagtaccgcaagggaaagatgaaaaattataaccaagcataatatagcaaggactaacccctataccttctgcataatgaattaactagaaataactttgcaaggagagccaaagctaagacccccgaaaccagacgagctacctaagaacagctaaaagagcacacccgtctatgtagcaaaatagtgggaagatttataggtagaggcgacaaacctaccgagcctggtgatagctggttgtccaagatagaatcttagttcaactttaaatttgcccacagaaccctctaaatccccttgtaaatttaactgttagtccaaagaggaacagctctttggacactaggaaaaaaccttgtagagagagtaaaaaatttaacacccatagtaggcctaaaagcagccaccaattaagaaagcgttcaagctcaacacccactacctaaaaaatcccaaacatataactgaactcctcacacccaattggaccaatctatcaccctatagaagaactaatgttagtataagtaacatgaaaacattctcctccgcataagcctgcgtcagattaaaacactgaactgacaattaacagcccaatatctacaatcaaccaacaagtcattattaccctcactgtcaacccaacacaggcatgctcataaggaaaggttaaaaaaagtaaaaggaactcggcaaatcttaccccgcctgtttaccaaaaacatcacctctagcatcaccagtattagaggcaccgcctgcccagtgacacatgtttaacggccgcggtaccctaaccgtgcaaaggtagcataatcacttgttccttaaatagggacctgtatgaatggctccacgagggttcagctgtctcttacttttaaccagtgaaattgacctgcccgtgaagaggcgggcatgacacagcaagacgagaagaccctatggagctttaatttattaatgcaaacagtacctaacaaacccacaggtcctaaactaccaaacctgcattaaaaatttcggttggggcgacctcggagcagaacccaacctccgagcagtacatgctaagacttcaccagtcaaagcgaactactatactcaattgatccaataacttgaccaacggaacaagttaccctagggataacagcgcaatcctattctagagtccatatcaacaatagggtttacgacctcgatgttggatcaggacatcccgatggtgcagccgctattaaaggttcgtttgttcaacgattaaagtcctacgtgatctgagttcagaccggagtaatccaggtcggtttctatctacnttcaaattcctccctgtacgaaaggacaagagaaataaggcctacttcacaaagcgccttcccccgtaaatgatatcatctcaacttagcattatacccacacccacccaagaacagggtttgttaagatggcagagcccggtaatcgcataaaacttaaaactttacagtcagaggttcaattcctcttcttaacaacatacccatggccaacctcctactcctcattgtacccattctaatcgcaatggcattcctaatgcttaccgaacgaaaaattctaggctatatacaactacgcaaaggccccaacgttgtaggcccctacgggctactacaacccttcgctgacgccataaaactcttcaccaaagagcccctaaaacccgccacatctaccatcaccctctacatcaccgccccgaccttagctctcaccatcgctcttctactatgaacccccctccccatacccaaccccctggtcaacctcaacctaggcctcctatttattctagccacctctagcctagccgtttactcaatcctctgatcagggtgagcatcaaactcaaactacgccctgatcggcgcactgcgagcagtagcccaaacaatctcatatgaagtcaccctagccatcattctactatcaacattactaataagtggctcctttaacctctccacccttatcacaacacaagaacacctctgattactcctgccatcatgacccttggccataatatgatttatctccacactagcagagaccaaccgaacccccttcgaccttgccgaaggggaatccgaactagtctcaggcttcaacatcgaatacgccgcaggccccttcgccctattcttcatagccgaatacacaaacattattataataaacaccctcaccactacaatcttcctaggaacaacatatgacgcactctcccctgaactctacacaacatattttgtcaccaagaccctacttctaacctccctgttcttatgaattcgaacagcatacccccgattccgctacgaccaactcatacacctcctatgaaaaaacttcctaccactcaccctagcattacttatatgatatgtctccatacccattacaatctccagcattccccctcaaacctaagaaatatgtctgataaaagagttactttgatagagtaaataataggagcttaaacccccttatttctaggactatgagaatcgaacccatccctgagaatccaaaattctccgtgccacctatcacaccccatcctaaagtaaggtcagctaaataagctatcgggcccataccccgaaaatgttggttatacccttcccgtactaattaatcccctggcccaacccgtcatctactctaccatctttgcaggcacactcatcacagcgctaagctcgcactgattttttacctgagtaggcctagaaataaacatgctagcttttattccagttctaaccaaaaaaataaaccctcgttccacagaagctgccatcaagtatttcctcacgcaagcaaccgcatccataatccttctaatagctatcctcttcaacaatatactctccggacaatgaaccataaccaatactaccaatcaatactcatcattaataatcataatggctatagcaataaaactaggaatagccccctttcacttctgagtcccagaggttacccaaggcacccctctgacatccggcctgcttcttctcacatgacaaaaactagcccccatctcaatcatataccaaatctctccctcactaaacgtaagccttctcctcactctctcaatcttatccatcatagcaggcagttgaggtggattaaaccaaacccagctacgcaaaatcttagcatactcctcaattacccacataggatgaataatagcagttctaccgtacaaccctaacataaccattcttaatttaactatttatattatcctaactactaccgcattcctactactcaacttaaactccagcaccacgaccctactactatctcgcacctgaaacaagctaacatgactaacacccttaattccatccaccctcctctccctaggaggcctgcccccgctaaccggctttttgcccaaatgggccattatcgaagaattcacaaaaaacaatagcctcatcatccccaccatcatagccaccatcaccctccttaacctctacttctacctacgcctaatctactccacctcaatcacactactccccatatctaacaacgtaaaaataaaatgacagtttgaacatacaaaacccaccccattcctccccacactcatcgcccttaccacgctactcctacctatctccccttttatactaataatcttatagaaatttaggttaaatacagaccaagagccttcaaagccctcagtaagttgcaatacttaatttctgtaacagctaaggactgcaaaaccccactctgcatcaactgaacgcaaatcagccactttaattaagctaagcccttactagaccaatgggacttaaacccacaaacacttagttaacagctaagcaccctaatcaactggcttcaatctacttctcccgccgccgggaaaaaaggcgggagaagccccggcaggtttgaagctgcttcttcgaatttgcaattcaatatgaaaatcacctcggagctggtaaaaagaggcctaacccctgtctttagatttacagtccaatgcttcactcagccattttacctcacccccactgatgttcgccgaccgttgactattctctacaaaccacaaagacattggaacactatacctattattcggcgcatgagctggagtcctaggcacagctctaagcctccttattcgagccgagctgggccagccaggcaaccttctaggtaacgaccacatctacaacgttatcgtcacagcccatgcatttgtaataatcttcttcatagtaatacccatcataatcggaggctttggcaactgactagttcccctaataatcggtgcccccgatatggcgtttccccgcataaacaacataagcttctgactcttacctccctctctcctactcctgctcgcatctgctatagtggaggccggagcaggaacaggttgaacagtctaccctcccttagcagggaactactcccaccctggagcctccgtagacctaaccatcttctccttacacctagcaggtgtctcctctatcttaggggccatcaatttcatcacaacaattatcaatataaaaccccctgccataacccaataccaaacgcccctcttcgtctgatccgtcctaatcacagcagtcctacttctcctatctctcccagtcctagctgctggcatcactatactactaacagaccgcaacctcaacaccaccttcttcgaccccgccggaggaggagaccccattctataccaacacctattctgatttttcggtcaccctgaagtttatattcttatcctaccaggcttcggaataatctcccatattgtaacttactactccggaaaaaaagaaccatttggatacataggtatggtctgagctatgatatcaattggcttcctagggtttatcgtgtgagcacaccatatatttacagtaggaatagacgtagacacacgagcatatttcacctccgctaccataatcatcgctatccccaccggcgtcaaagtatttagctgactcgccacactccacggaagcaatatgaaatgatctgctgcagtgctctgagccctaggattcatctttcttttcaccgtaggtggcctgactggcattgtattagcaaactcatcactagacatcgtactacacgacacgtactacgttgtagctcacttccactatgtcctatcaataggagctgtatttgccatcataggaggcttcattcactgatttcccctattctcaggctacaccctagaccaaacctacgccaaaatccatttcactatcatattcatcggcgtaaatctaactttcttcccacaacactttctcggcctatccggaatgccccgacgttactcggactaccccgatgcatacaccacatgaaacatcctatcatctgtaggctcattcatttctctaacagcagtaatattaataattttcatgatttgagaagccttcgcttcgaagcgaaaagtcctaatagtagaagaaccctccataaacctggagtgactatatggatgccccccaccctaccacacattcgaagaacccgtatacataaaatctagacaaaaaaggaaggaatcgaaccccccaaagctggtttcaagccaaccccatggcctccatgactttttcaaaaaggtattagaaaaaccatttcataactttgtcaaagttaaattataggctaaatcctatatatcttaatggcacatgcagcgcaagtaggtctacaagacgctacttcccctatcatagaagagcttatcacctttcatgatcacgccctcataatcattttccttatctgcttcctagtcctgtatgcccttttcctaacactcacaacaaaactaactaatactaacatctcagacgctcaggaaatagaaaccgtctgaactatcctgcccgccatcatcctagtcctcatcgccctcccatccctacgcatcctttacataacagacgaggtcaacgatccctcccttaccatcaaatcaattggccaccaatggtactgaacctacgagtacaccgactacggcggactaatcttcaactcctacatacttcccccattattcctagaaccaggcgacctgcgactccttgacgttgacaatcgagtagtactcccgattgaagcccccattcgtataataattacatcacaagacgtcttgcactcatgagctgtccccacattaggcttaaaaacagatgcaattcccggacgtctaaaccaaaccactttcaccgctacacgaccgggggtatactacggtcaatgctctgaaatctgtggagcaaaccacagtttcatgcccatcgtcctagaattaattcccctaaaaatctttgaaatagggcccgtatttaccctatagcaccccctctaccccctctagagcccactgtaaagctaacttagcattaaccttttaagttaaagattaagagaaccaacacctctttacagtgaaatgccccaactaaatactaccgtatggcccaccataattacccccatactccttacactattcctcatcacccaactaaaaatattaaacacaaactaccacctacctccctcaccaaagcccataaaaataaaaaattataacaaaccctgagaaccaaaatgaacgaaaatctgttcgcttcattcattgcccccacaatcctaggcctacccgccgcagtactgatcattctatttccccctctattgatccccacctccaaatatctcatcaacaaccgactaatcaccacccaacaatgactaatcaaactaacctcaaaacaaatgataaccatacacaacactaaaggacgaacctgatctcttatactagtatccttaatcatttttattgccacaactaacctcctcggactcctgcctcactcatttacaccaaccacccaactatctataaacctagccatggccatccccttatgagcgggcgcagtgattataggctttcgctctaagattaaaaatgccctagcccacttcttaccacaaggcacacctacaccccttatccccatactagttattatcgaaaccatcagcctactcattcaaccaatagccctggccgtacgcctaaccgctaacattactgcaggccacctactcatgcacctaattggaagcgccaccctagcaatatcaaccattaaccttccctctacacttatcatcttcacaattctaattctactgactatcctagaaatcgctgtcgccttaatccaagcctacgttttcacacttctagtaagcctctacctgcacgacaacacataatgacccaccaatcacatgcctatcatatagtaaaacccagcccatgacccctaacaggggccctctcagccctcctaatgacctccggcctagccatgtgatttcacttccactccataacgctcctcatactaggcctactaaccaacacactaaccatataccaatgatggcgcgatgtaacacgagaaagcacataccaaggccaccacacaccacctgtccaaaaaggccttcgatacgggataatcctatttattacctcagaaatttttttcttcgcaggatttttctgagccttttaccactccagcctagcccctaccccccaattaggaggacactggcccccaacaggcatcaccccgctaaatcccctagaagtcccactcctaaacacatccgtattactcgcatcaggagtatcaatcacctgagctcaccatagtctaatagaaaacaaccgaaaccaaataattcaagcactgcttattacaattttactgggtctctattttaccctcctacaagcctcagagtacttcgagtctcccttcaccatttccgacggcatctacggctcaacattttttgtagccacaggcttccacggacttcacgtcattattggctcaactttcctcactatctgcttcatccgccaactaatatttcactttacatccaaacatcactttggcttcgaagccgccgcctgatactggcattttgtagatgtggtttgactatttctgtatgtctccatctattgatgagggtcttactcttttagtataaatagtaccgttaacttccaattaactagttttgacaacattcaaaaaagagtaataaacttcgccttaattttaataatcaacaccctcctagccttactactaataattattacattttgactaccacaactcaacggctacatagaaaaatccaccccttacgagtgcggcttcgaccctatatcccccgcccgcgtccctttctccataaaattcttcttagtagctattaccttcttattatttgatctagaaattgccctccttttacccctaccatgagccctacaaacaactaacctgccactaatagttatgtcatccctcttattaatcatcatcctagccctaagtctggcctatgagtgactacaaaaaggattagactgaaccgaattggtatatagtttaaacaaaacgaatgatttcgactcattaaattatgataatcatatttaccaaatgcccctcatttacataaatattatactagcatttaccatctcacttctaggaatactagtatatcgctcacacctcatatcctccctactatgcctagaaggaataatactatcgctgttcattatagctactctcataaccctcaacacccactccctcttagccaatattgtgcctattgccatactagtctttgccgcctgcgaagcagcggtgggcctagccctactagtctcaatctccaacacatatggcctagactacgtacataacctaaacctactccaatgctaaaactaatcgtcccaacaattatattactaccactgacatgactttccaaaaaacacataatttgaatcaacacaaccacccacagcctaattattagcatcatccctctactattttttaaccaaatcaacaacaacctatttagctgttccccaaccttttcctccgaccccctaacaacccccctcctaatactaactacctgactcctacccctcacaatcatggcaagccaacgccacttatccagtgaaccactatcacgaaaaaaactctacctctctatactaatctccctacaaatctccttaattataacattcacagccacagaactaatcatattttatatcttcttcgaaaccacacttatccccaccttggctatcatcacccgatgaggcaaccagccagaacgcctgaacgcaggcacatacttcctattctacaccctagtaggctcccttcccctactcatcgcactaatttacactcacaacaccctaggctcactaaacattctactactcactctcactgcccaagaactatcaaactcctgagccaacaacttaatatgactagcttacacaatagcttttatagtaaagatacctctttacggactccacttatgactccctaaagcccatgtcgaagcccccatcgctgggtcaatagtacttgccgcagtactcttgaaactaggcggctatggtataatacgcctcacactcattctcaaccccctgacaaaacacatagcctaccccttccttgtactatccctatgaggcataattataacaagctccatctgcctacgacaaacagacctaaaatcgctcattgcatactcttcaatcagccacatagccctcgtagtaacagccattctcatccaaaccccctgaagcttcaccggcgcagtcattctcataatcgcccacggacttacatcctcattactattctgcctagcaaactcaaactacgaacgcactcacagtcgcatcataatcctctctcaaggacttcaaactctactcccactaatagctttttgatgacttctagcaagcctcgctaacctcgccttaccccccactattaacctactgggagaactctctgtgctagtaaccacgttctcctgatcaaatatcactctcctacttacaggactcaacatactagtcacagccctatactccctctacatatttaccacaacacaatggggctcactcacccaccacattaacaacataaaaccctcattcacacgagaaaacaccctcatgttcatacacctatcccccattctcctcctatccctcaaccccgacatcattaccgggttttcctcttgtaaatatagtttaaccaaaacatcagattgtgaatctgacaacagaggcttacgaccccttatttaccgagaaagctcacaagaactgctaactcatgcccccatgtctaacaacatggctttctcaacttttaaaggataacagctatccattggtcttaggccccaagaattttggtgcaactccaaataaaagtaataaccatgcacactactataaccaccctaaccctaacttccctaattccccccatccttaccaccctcgttaaccctaacaaaaaaaactcatacccccattacgtaaaatccattgtcgcatccacctttattatcagtctcttccccacaacaatattcatgtgcctagaccaagaagttattatctcgaactgacactgagccacaacccaaacaacccagctctccctaagcttcaaactagactacttctccataatattcatccctgtagcattgttcgttacatggtccatcatagaattctcactgtgatatataaactcagacccaaacattaatcagttcttcaaatatctactcatcttcctaattaccatactaatcttagttaccgctaacaacctattccaactgttcatcggctgagagggcgtaggaattatatccttcttgctcatcagttgatgatacgcccgagcagatgccaacacagcagccattcaagcaatcctatacaaccgtatcggcgatatcggtttcatcctcgccttagcatgatttatcctacactccaactcatgagacccacaacaaatagcccttctaaacgctaatccaagcctcaccccactactaggcctcctcctagcagcagcaggcaaatcagcccaattaggtctccacccctgactcccctcagccatagaaggccccaccccagtctcagccctactccactcaagcactatagttgtagcaggaatcttcttactcatccgcttccaccccctagcagaaaatagcccactaatccaaactctaacactatgcttaggcgctatcaccactctgttcgcagcagtctgcgcccttacacaaaatgacatcaaaaaaatcgtagccttctccacttcaagtcaactaggactcataatagttacaatcggcatcaaccaaccacacctagcattcctgcacatctgtacccacgccttcttcaaagccatactatttatgtgctccgggtccatcatccacaaccttaacaatgaacaagatattcgaaaaataggaggactactcaaaaccatacctctcacttcaacctccctcaccattggcagcctagcattagcaggaatacctttcctcacaggtttctactccaaagaccacatcatcgaaaccgcaaacatatcatacacaaacgcctgagccctatctattactctcatcgctacctccctgacaagcgcctatagcactcgaataatccttctcaccctaacaggtcaacctcgcttccccacccttactaacattaacgaaaataaccccaccctactaaaccccattaaacgcctggcagccggaagcctattcgcaggatttctcattactaacaacatttcccccgcatcccccttccaaacaacaatccccctctacctaaaactcacagccctcgctgtcactttcctaggacttctaacagccctagacctcaactacctaaccaacaaacttaaaataaaatccccactatgcacattttatttctccaacatactcggattctaccctagcatcacacaccgcacaatcccctatctaggccttcttacgagccaaaacctgcccctactcctcctagacctaacctgactagaaaagctattacctaaaacaatttcacagcaccaaatctccacctccatcatcacctcaacccaaaaaggcataattaaactttacttcctctctttcttcttcccactcatcctaaccctactcctaatcacataacctattcccccgagcaatctcaattacaatatatacaccaacaaacaatgttcaaccagtaactactactaatcaacgcccataatcatacaaagcccccgcaccaataggatcctcccgaatcaaccctgacccctctccttcataaattattcagcttcctacactattaaagtttaccacaaccaccaccccatcatactctttcacccacagcaccaatcctacctccatcgctaaccccactaaaacactcaccaagacctcaacccctgacccccatgcctcaggatactcctcaatagccatcgctgtagtatatccaaagacaaccatcattccccctaaataaattaaaaaaactattaaacccatataacctcccccaaaattcagaataataacacacccgaccacaccgctaacaatcaatactaaacccccataaataggagaaggcttagaagaaaaccccacaaaccccattactaaacccacactcaacagaaacaaagcatacatcattattctcgcacggactacaaccacgaccaatgatatgaaaaaccatcgttgtatttcaactacaagaacaccaatgaccccaatacgcaaaattaaccccctaataaaattaattaaccgctcattcatcgacctccccaccccatccaacatctccgcatgatgaaacttcggctcactccttggcgcctgcctgatcctccaaatcaccacaggactattcctagccatgcactactcaccagacgcctcaaccgccttttcatcaatcgcccacatcactcgagacgtaaattatggctgaatcatccgctaccttcacgccaatggcgcctcaatattctttatctgcctcttcctacacatcgggcgaggcctatattacggatcatttctctactcagaaacctgaaacatcggcattatcctcctgcttgcaactatagcaacagccttcataggctatgtcctcccgtgaggccaaatatcattctgaggggccacagtaattacaaacttactatccgccatcccatacattgggacagacctagttcaatgaatctgaggaggctactcagtagacagtcccaccctcacacgattctttacctttcacttcatcttgcccttcattattgcagccctagcagcactccacctcctattcttgcacgaaacgggatcaaacaaccccctaggaatcacctcccattccgataaaatcaccttccacccttactacacaatcaaagacgccctcggcttacttctcttccttctctccttaatgacattaacactattctcaccagacctcctaggcgacccagacaattataccctagccaaccccttaaacacccctccccacatcaagcccgaatgatatttcctattcgcctacacaattctccgatccgtccctaacaaactaggaggcgtccttgccctattactatccatcctcatcctagcaataatccccatcctccatatatccaaacaacaaagcataatatttcgcccactaagccaatcactttattgactcctagccgcagacctcctcattctaacctgaatcggaggacaaccagtaagctacccttttaccatcattggacaagtagcatccgtactatacttcacaacaatcctaatcctaataccaactatctccctaattgaaaacaaaatactcaaatgggcctgtccttgtagtataaactaatacaccagtcttgtaaaccggagatgaaaacctttttccaaggacaaatcagagaaaaagtctttaactccaccattagcacccaaagctaagattctaatttaaactattctctgttctttcatggggaagcagatttgggtaccacccaagtattgactcacccatcaacaaccgctatgtatttcgtacattactgccagccaccatgaatattgtacggtaccataaatacttgaccacctgtagtacataaaaacccaatccacatcaaaaccccctcctcatgcttacaagcaagtacagcaatcaaccctcaactatcacacatcaactgcaactccaaagtcacccctcacccattaggataccaacaaacctacccacccttaacagtacatagtacataaagccatttaccgtacatagcacattacagtcaaatcccttctcgtccccatggatgacccccctcagataggggtcccttgaccaccatcctccgtgaaatcaatatcccgcacaagagtgctactctcctcgctccgggcccataacacttgggggtagctaaagtgaactgtatccgacatctggttcctacttcagggtcataaaacctaaatagcccacacgttccccttaaataagacatcacgatg

SEQ ID NO: 113 - DNA, 16569 bp, Homo sapiens mitochondrial
  3107: "n" refers to a nucleotide at position 3107 of the Cambridge Reference Sequence (CRS, Anderson et al. 1981 Nature 290:457-465), later determined to be absent from the human mtDNA sequence according to the revised CRS (rCRS, Andrews et al. 1999 Nature Genetics 23:147); "n" therefore represents a single nucleotide deletion at a position corresponding to nucleotide 3107 of SEQ ID NO:1 as provided herein.
gatcacaggtctatcaccctattaaccactcacgggagctctccatgcatttggtattttcgtttggggggtgtgcacgcgatagcattgcgagacgctggagccggagcaccctatgtcgcagtatctgtctttgattcctgccccatcctgttatttatcgcacctacgttcaatattacaggcgaacatacttactaaagtgtgttaattaattaatgcttgtaggacatagtaataacaattgaatgtctgcacagccgctttccacacagacatcataacaaaaaatttccaccaaaccccccctcccccccgcttctggccacagcacttaaacacatctctgccaaaccccaaaaacaaagaaccctaacaccagcctaaccagatttcaaattttatcttttggcggtatgcacttttaacagtcaccccccaactaacacattattttcccctcccactcccatactactaatctcatcaatacaacccccgcccatcctacccagcacacacaccgctgctaaccccataccccgaaccaaccaaaccccaaagacaccccccacagtttatgtagcttacctcctcaaagcaatacactgaaaatgtttagacgggctcacatcaccccataaacaaataggtttggtcctggcctttctattagctcttagtaagattacacatgcaagcatccccgttccagtgagttcaccctctaaatcaccacgatcaaaagggacaagcatcaagcacgcagcaatgcagctcaaaacgcttagcctagccacacccccacgggaaacagcagtgattaacctttagcaataaacgaaagtttaactaagctatactaaccccagggttggtcaatttcgtgccagccaccgcggtcacacgattaacccaagtcaatagaagccggcgtaaagagtgttttagatcaccccctccccaataaagctaaaactcacctgagttgtaaaaaactccagttgacacaaaatagactacgaaagtggctttaacatatctgaacacacaatagctaagacccaaactgggattagataccccactatgcttagccctaaacctcaacagttaaatcaacaaaactgctcgccagaacactacgagccacagcttaaaactcaaaggacctggcggtgcttcatatccctctagaggagcctgttctgtaatcgataaaccccgatcaacctcaccacctcttgctcagcctatataccgccatcttcagcaaaccctgatgaaggctacaaagtaagcgcaagtacccacgtaaagacgttaggtcaaggtgtagcccatgaggtggcaagaaatgggctacattttctaccccagaaaactacgatagcccttatgaaacttaagggtcgaaggtggatttagcagtaaactgagagtagagtgcttagttgaacagggccctgaagcgcgtacacaccgcccgtcaccctcctcaagtatacttcaaaggacatttaactaaaacccctacgcatttatatagaggagacaagtcgtaacatggtaagtgtactggaaagtgcacttggacgaaccagagtgtagcttaacacaaagcacccaacttacacttaggagatttcaacttaacttgaccgctctgagctaaacctagccccaaacccactccaccttactaccagacaaccttagccaaaccatttacccagataaagtataggcgatagaaattgaaacctggcgcaatagatatagtaccgcaagggaaagatgaaaaattataaccaagcataatatagcaaggactaacccctataccttctgcataatgaattaactagaaataactttgcaaggagagccaaagctaagacccccgaaaccagacgagctacctaagaacagctaaaagagcacacccgtctatgtagcaaaatagtgggaagatttataggtagaggcgacaaacctaccgagcctggtgatagctggttgtccaagatagaatcttagttcaactttaaatttgcccacagaaccctctaaatccccttgtaaatttaactgttagtccaaagaggaacagctctttggacactaggaaaaaaccttgtagagagagtaaaaaatttaacacccatagtaggcctaaaagcagccaccaattaagaaagcgttcaagctcaacacccactacctaaaaaatcccaaacatataactgaactcctcacacccaattggaccaatctatcaccctatagaagaactaatgttagtataagtaacatgaaaacattctcctccgcataagcctgcgtcagattaaaacactgaactgacaattaacagcccaatatctacaatcaaccaacaagtcattattaccctcactgtcaacccaacacaggcatgctcataaggaaaggttaaaaaaagtaaaaggaactcggcaaatcttaccccgcctgtttaccaaaaacatcacctctagcatcaccagtattagaggcaccgcctgcccagtgacacatgtttaacggccgcggtaccctaaccgtgcaaaggtagcataatcacttgttccttaaatagggacctgtatgaatggctccacgagggttcagctgtctcttacttttaaccagtgaaattgacctgcccgtgaagaggcgggcatgacacagcaagacgagaagaccctatggagctttaatttattaatgcaaacagtacctaacaaacccacaggtcctaaactaccaaacctgcattaaaaatttcggttggggcgacctcggagcagaacccaacctccgagcagtacatgctaagacttcaccagtcaaagcgaactactatactcaattgatccaataacttgaccaacggaacaagttaccctagggataacagcgcaatcctattctagagtccatatcaacaatagggtttacgacctcgatgttggatcaggacatcccgatggtgcagccgctattaaaggttcgtttgttcaacgattaaagtcctacgtgatctgagttcagaccggagtaatccaggtcggtttctatctacnttcaaattcctccctgtacgaaaggacaagagaaataaggcctacttcacaaagcgccttcccccgtaaatgatatcatctcaacttagtattatacccacacccacccaagaacagggtttgttaagatggcagagcccggtaatcgcataaaacttaaaactttacagtcagaggttcaattcctcttcttaacaacatacccatggccaacctcctactcctcattgtacccattctaatcgcaatggcattcctaatgcttaccgaacgaaaaattctaggctatatacaactacgcaaaggccccaacgttgtaggcccctacgggctactacaacccttcgctgacgccataaaactcttcaccaaagagcccctaaaacccgccacatctaccatcaccctctacatcaccgccccgaccttagctctcaccatcgctcttctactatgaacccccctccccatacccaaccccctggtcaacctcaacctaggcctcctatttattctagccacctctagcctagccgtttactcaatcctctgatcagggtgagcatcaaactcaaactacgccctgatcggcgcactgcgagcagtagcccaaacaatctcatatgaagtcaccctagccatcattctactatcaacattactaataagtggctcctttaacctctccacccttatcacaacacaagaacacctctgattactcctgccatcatgacccttggccataatatgatttatctccacactagcagagaccaaccgaacccccttcgaccttgccgaaggggagtccgaactagtctcaggcttcaacatcgaatacgccgcaggccccttcgccctattcttcatagccgaatacacaaacattattataataaacaccctcaccactacaatcttcctaggaacaacatatgacgcactctcccctgaactctacacaacatattttgtcaccaagaccctacttctaacctccctgttcttatgaattcgaacagcatacccccgattccgctacgaccaactcatacacctcctatgaaaaaacttcctaccactcaccctagcattacttatatgatatgtctccatacccattacaatctccagcatcccccctcaaacctaagaaatatgtctgataaaagagttactttgatagagtaaataataggagcttaaacccccttatttctaggactatgagaatcgaacccatccctgagaatccaaaattctccgtgccacctatcacaccccatcctaaagtaaggtcagctaaataagctatcgggcccataccccgaaaatgttggttatacccttcccgtactaattaatcccctggcccaacccgtcatctactctaccatctttgcaggcacactcatcacagcgctaagctcgcactgattttttacctgagtaggcctagaaataaacatgctagcttttattccagttctaaccaaaaaaataaaccctcgttccacagaagctgccatcaagtatttcctcacgcaagcaaccgcatccataatccttctaatagctatcctcttcaacaatatactctccggacaatgaaccataaccaatactaccaatcaatactcatcattaataatcataatggctatagcaataaaactaggaatagccccctttcacttctgagtcccagaggttgcccaaggcacccctctgacatccggcctgcttcttctcacatgacaaaaactagcccccatctcaatcatataccaaatctctccctcactaaacgtaagccttctcctcactctctcaatcttatccatcatagcaggcagttggggtggattaaaccaaacccagctacgcaaaatcttagcatactcctcaattacccacataggatgaataatagcagttctaccgtacaaccctaacataaccattcttaatttaactatttatattatcctaactactaccgcattcctactactcaacttaaactccagcaccacgaccctactactatctcgcacctgaaacaagctaacatgactaacacccttaattccatccaccctcctctccctaggaggcctgcccccgctaaccggctttttgcccaaatgggccattatcgaagaattcacaaaaaacaatagcctcatcatccccaccatcatagccaccatcaccctccttaacctctacttctacctacgcctaatctactccacctcaatcacactactccccatatctaacaacgtaaaaataaaatgacagtttgaacatacaaaacccaccccattcctccccacactcatcgcccttaccacgctactcctacctatctccccttttatactaataatcttatagaaatttaggttaaatacagaccaagagccttcaaagccctcagtaagttgcaatacttaatttctgtaacagctaaggactgcaaaaccccactctgcatcaactgaacgcaaatcagccactttaattaagctaagcccttactagaccaatgggacttaaacccacaaacacttagttaacagctaagcaccctaatcaactggcttcaatctacttctcccgccgccgggaaaaaaggcgggagaagccccggcaggtttgaagctgcttcttcgaatttgcaattcaatatgaaaatcacctcggagctggtaaaaagaggcctaacccctgtctttagatttacagtccaatgcttcactcagccattttacctcacccccactgatgttcgccgaccgttgactattctctacaaaccacaaagacattggaacactatacctattattcggcgcatgagctggagtcctaggcacagctctaagcctccttattcgagccgagctgggccagccaggcaaccttctaggtaacgaccacatctacaacgttatcgtcacagcccatgcatttgtaataatcttcttcatagtaatacccatcataatcggaggctttggcaactgactagttcccctaataatcggtgcccccgatatggcgtttccccgcataaacaacataagcttctgactcttacctccctctctcctactcctgctcgcatctgctatagtggaggccggagcaggaacaggttgaacagtctaccctcccttagcagggaactactcccaccctggagcctccgtagacctaaccatcttctccttacacctagcaggtgtctcctctatcttaggggccatcaatttcatcacaacaattatcaatataaaaccccctgccataacccaataccaaacgcccctcttcgtctgatccgtcctaatcacagcagtcctacttctcctatctctcccagtcctagctgctggcatcactatactactaacagaccgcaacctcaacaccaccttcttcgaccccgccggaggaggagaccccattctataccaacacctattctgatttttcggtcaccctgaagtttatattcttatcctaccaggcttcggaataatctcccatattgtaacttactactccggaaaaaaagaaccatttggatacataggtatggtctgagctatgatatcaattggcttcctagggtttatcgtgtgagcacaccatatatttacagtaggaatagacgtagacacacgagcatatttcacctccgctaccataatcatcgctatccccaccggcgtcaaagtatttagctgactcgccacactccacggaagcaatatgaaatgatctgctgcagtgctctgagccctaggattcatctttcttttcaccgtaggtggcctgactggcattgtattagcaaactcatcactagacatcgtactacacgacacgtactacgttgtagctcacttccactatgtcctatcaataggagctgtatttgccatcataggaggcttcattcactgatttcccctattctcaggctacaccctagaccaaacctacgccaaaatccatttcactatcatattcatcggcgtaaatctaactttcttcccacaacactttctcggcctatccggaatgccccgacgttactcggactaccccgatgcatacaccacatgaaacatcctatcatctgtaggctcattcatttctctaacagcagtaatattaataattttcatgatttgagaagccttcgcttcgaagcgaaaagtcctaatagtagaagaaccctccataaacctggagtgactatatggatgccccccaccctaccacacattcgaagaacccgtatacataaaatctagacaaaaaaggaaggaatcgaaccccccaaagctggtttcaagccaaccccatggcctccatgactttttcaaaaaggtattagaaaaaccatttcataactttgtcaaagttaaattataggctaaatcctatatatcttaatggcacatgcagcgcaagtaggtctacaagacgctacttcccctatcatagaagagcttatcacctttcatgatcacgccctcataatcattttccttatctgcttcctagtcctgtatgcccttttcctaacactctcaacaaaactaactaatactaacatctcagacgctcaggaaatagaaaccgtctgaactatcctgcccgccatcatcctagtcctcatcgccctcccatccctacgcatcctttacataacagacgaggtcaacgatccctcccttaccatcaaatcaattggccaccaatggtactgaacctacgagtacaccgactacggcggactaatcttcaactcctacatacttcccccattattcctagaaccaggcgacctgcgactccttgacgttgacaatcgagtagtactcccgattgaaacccccattcgtataataattacatcacaagacgtcttgcactcatgagctgtccccacattaggcttaaaaacagatgcaattcccggacgtctaaaccaaaccactttcaccgctacacgaccgggggtatactacggtcaatgctctgaaatctgtggagcaaaccacagtttcatgcccatcgtcctagaattaattcccctaaaaatctttgaaatagggcccgtatttaccctatagcaccccctctaccccctctagagcccactgtaaagctaacttagcattaaccttttaagttaaagattaagagaaccaacacctctttacagtgaaatgccccaactaaatactaccgtatggcccaccataattacccccatactccttacactattcctcatcacccaactaaaaatattaaacacaaactaccacctacctccctcaccaaagcccataaaaataaaaaattataacaaaccctgagaaccaaaatgaacgaaaatctgttcgcttcattcattgcccccacaatcctaggcctacccgccgcagtactgatcattctatttccccctctattgatccccacctccaaatatctcatcaacaaccgactaatcaccacccaacaatgactaatcaaactaacctcaaaacaaatgataaccatacacaacactaaaggacgaacctgatctcttatactagtatccttaatcatttttattgccacaactaacctcctcggactcctgccttactcatttacaccaaccacccaactatctataaacctagccatggccatccccttatgagcgggcgcagtgattataggctttcgctctaagattaaaaatgccctagcccacttcttaccacaaggcacacctacaccccttatccccatactagttattatcgaaaccatcagcctactcattcaaccaatagccctggccgtacgcctaaccgctaacattactgcaggccacctactcatgcacctaattggaagcgccaccctagcaatatcaaccattaaccttccctctacacttatcatcttcacaattctaattctactgactatcctagaaatcgctgtcgccttaatccaagcctacgttttcacacttctagtaagcctctacctgcacgacaacacataatgacccaccaatcacatgcctatcatatagtaaaacccagcccatgacccctaacaggggccctctcagccctcctaatgacctccggcctagccatgtgatttcacttccactccataacgctcctcatactaggcctactaaccaacacactaaccatataccaatgatggcgcgatgtaacacgagaaagcacataccaaggccaccacacaccacctgtccaaaaaggccttcgatacgggataatcctatttattacctcagaagtttttttcttcgcaggatttttctgagccttttaccactccagcctagcccctaccccccaattaggagggcactggcccccaacaggcatcaccccgctaaatcccctagaagtcccactcctaaacacatccgtattactcgcatcaggagtatcaatcacctgagctcaccatagtctaatagaaaacaaccgaaaccaaataattcaagcactgcttattacaattttactgggtctctattttaccctcctacaagcctcagagtacttcgagtctcccttcaccatttccgacggcatctacggctcaacattttttgtagccacaggcttccacggacttcacgtcattattggctcaactttcctcactatctgcttcatccgccaactaatatttcactttacatccaaacatcactttggcttcgaagccgccgcctgatactggcattttgtagatgtggtttgactatttctgtatgtctccatctattgatgagggtcttactcttttagtataaatagtaccgttaacttccaattaactagttttgacaacattcaaaaaagagtaataaacttcgccttaattttaataatcaacaccctcctagccttactactaataattattacattttgactaccacaactcaacggctacatagaaaaatccaccccttacgagtgcggcttcgaccctatatcccccgcccgcgtccctttctccataaaattcttcttagtagctattaccttcttattatttgatctagaaattgccctccttttacccctaccatgagccctacaaacaactaacctgccactaatagttatgtcatccctcttattaatcatcatcctagccctaagtctggcctatgagtgactacaaaaaggattagactgaaccgaattggtatatagtttaaacaaaacgaatgatttcgactcattaaattatgataatcatatttaccaaatgcccctcatttacataaatattatactagcatttaccatctcacttctaggaatactagtatatcgctcacacctcatatcctccctactatgcctagaaggaataatactatcgctgttcattatagctactctcataaccctcaacacccactccctcttagccaatattgtgcctattgccatactagtctttgccgcctgcgaagcagcggtgggcctagccctactagtctcaatctccaacacatatggcctagactacgtacataacctaaacctactccaatgctaaaactaatcgtcccaacaattatattactaccactgacatgactttccaaaaaacacataatttgaatcaacacaaccacccacagcctaattattagcatcatccctctactattttttaaccaaatcaacaacaacctatttagctgttccccaaccttttcctccgaccccctaacaacccccctcctaatactaactacctgactcctacccctcacaatcatggcaagccaacgccacttatccagtgaaccactatcacgaaaaaaactctacctctctatactaatctccctacaaatctccttaattataacattcacagccacagaactaatcatattttatatcttcttcgaaaccacacttatccccaccttggctatcatcacccgatgaggcaaccagccagaacgcctgaacgcaggcacatacttcctattctacaccctagtaggctcccttcccctactcatcgcactaatttacactcacaacaccctaggctcactaaacattctactactcactctcactgcccaagaactatcaaactcctgagccaacaacttaatatgactagcttacacaatagcttttatagtaaagatacctctttacggactccacttatgactccctaaagcccatgtcgaagcccccatcgctgggtcaatagtacttgccgcagtactcttaaaactaggcggctatggtataatacgcctcacactcattctcaaccccctgacaaaacacatagcctaccccttccttgtactatccctatgaggcataattataacaagctccatctgcctacgacaaacagacctaaaatcgctcattgcatactcttcaatcagccacatagccctcgtagtaacagccattctcatccaaaccccctgaagcttcaccggcgcagtcattctcataatcgcccacggacttacatcctcattactattctgcctagcaaactcaaactacgaacgcactcacagtcgcatcataatcctctctcaaggacttcaaactctactcccactaatagctttttgatgacttctagcaagcctcgctaacctcgccttaccccccactattaacctactgggagaactctctgtgctagtaaccacgttctcctgatcaaatatcactctcctacttacaggactcaacatactagtcacagccctatactccctctacatatttaccacaacacaatgaggctcactcacccaccacattaacaacataaaaccctcattcacacgagaaaacaccctcatgttcatacacctatcccccattctcctcctatccctcaaccccgacatcattaccgggttttcctcttgtaaatatagtttaaccaaaacatcagattgtgaatctgacaacagaggcttacgaccccttatttaccgagaaagctcacaagaactgctaactcatgcccccatgtctaacaacatggctttctcaacttttaaaggataacagctatccattggtcttaggccccaaaaattttggtgcaactccaaataaaagtaataaccatgcacactactataaccaccctaaccctgacttccctaattccccccatccttaccaccctcgttaaccctaacaaaaaaaactcatacccccattatgtaaaatccattgtcgcatccacctttattatcagtctcttccccacaacaatattcatgtgcctagaccaagaagttattatctcgaactgacactgagccacaacccaaacaacccagctctccctaagcttcaaactagactacttctccataatattcatccctgtagcattgttcgttacatggtccatcatagaattctcactgtgatatataaactcagacccaaacattaatcagttcttcaaatatctactcattttcctaattaccatactaatcttagttaccgctaacaacctattccaactgttcatcggctgagagggcgtaggaattatatccttcttgctcatcagttgatgatacgcccgagcagatgccaacacagcagccattcaagcaatcctatacaaccgtatcggcgatatcggtttcatcctcgccttagcatgatttatcctacactccaactcatgagacccacaacaaatagcccttctaaacgctaatccaagcctcaccccactactaggcctcctcctagcagcagcaggcaaatcagcccaattaggtctccacccctgactcccctcagccatagaaggccccaccccagtctcagccctactccactcaagcactatagttgtagcaggaatcttcttactcatccgcttccaccccctagcagaaaatagcccactaatccaaactctaacactatgcttaggcgctatcaccactctgttcgcagcagtctgcgcccttacacaaaatgacatcaaaaaaatcgtagccttctccacttcaagtcaactaggactcataatagttacaatcggcatcaaccaaccacacctagcattcctgcacatctgtacccacgccttcttcaaagccatactatttatgtgctccgggtccatcatccacaaccttaacaatgaacaagatattcgaaaaataggaggactactcaaaaccatacctctcacttcaacctccctcaccattggcagcctagcattagcaggaatacctttcctcacaggtttctactccaaagaccacatcatcgaaaccgcaaacatatcatacacaaacgcctgagccctatctattactctcatcgctacctccctgacaagcgcctatagcactcgaataattcttctcaccctaacaggtcaacctcgcttccccacccttactaacattaacgaaaataaccccaccctactaaaccccattaaacgcctggcagccggaagcctattcgcaggatttctcattactaacaacatttcccccgcatcccccttccaaacaacaatccccctctacctaaaactcacagccctcgctgtcactttcctaggacttctaacagccctagacctcaactacttaaccaacaaacttaaaataaaatccccactatgcacattttatttctccaacatactcggattctaccctagcatcacacaccgcacaatcccctatctaggccttcttacgagccaaaacctgcccctactcctcctagacctaacctgactagaaaagctattacctaaaacaatttcacagcaccaaatctccacctccatcatcacctcaacccaaaaaggcataattaaactttacttcctctctttcttcttcccactcatcctaaccctactcctaatcacataacctattcccccgagcaatctcaattacaatatatacaccaacaaacaatgttcaaccagtaactactactaatcaacgcccataatcatacaaagcccccgcaccaataggatcctcccgaatcaaccctgacccctctccttcataaattattcagcttcctacactattaaagtttaccacaaccaccaccccatcatactctttcacccacagcaccaatcctacctccatcgctaaccccactaaaacactcaccaagacctcaacccctgacccccatgcctcaggatactcctcaatagccatcgctgtagtatatccaaagacaaccatcattccccctaaataaattaaaaaaactattaaacccatataacctcccccaaaattcagaataataacacacccgaccacaccgctaacaatcaatactaaacccccataaataggagaaggcttagaagaaaaccccacaaaccccattactaaacccacactcaacagaaacaaagcatacatcattattctcgcacggactacaaccacgaccaatgatatgaaaaaccatcgttgtatttcaactacaagaacaccaatgaccccaatacgcaaaattaaccccctaataaaattaattaaccactcattcatcgacctccccaccccatccaacatctccgcatgatgaaacttcggctcactccttggcgcctgcctgatcctccaaatcaccacaggactattcctagccatgcactactcaccagacgcctcaaccgccttttcatcaatcgcccacatcactcgagacgtaaattatggctgaatcatccgctaccttcacgccaatggcgcctcaatattctttatctgcctcttcctacacatcgggcgaggcctatattacggatcatttctctactcagaaacctgaaacatcggcattatcctcctgcttgcaactatagcaacagccttcataggctatgtcctcccgtgaggccaaatatcattctgaggggccacagtaattacaaacttactatccgccatcccatacattgggacagacctagttcaatgaatctgaggaggctactcagtagacagtcccaccctcacacgattctttacctttcacttcatcttgcccttcattattgcagccctagcagcactccacctcctattcttgcacgaaacgggatcaaacaaccccctaggaatcacctcccattccgataaaatcaccttccacccttactacacaatcaaagacgccctcggcttacttctcttccttctctccttaatgacattaacactattctcaccagacctcctaggcgacccagacaattataccctagccaaccccttaaacacccctccccacatcaagcccgaatgatatttcctattcgcctacacaattctccgatccgtccctaacaaactaggaggcgtccttgccctattactatccatcctcatcctagcaataatccccatcctccatatatccaaacaacaaagcataatatttcgcccactaagccaatcactttattgactcctagccgcagacctcctcattctaacctgaatcggaggacaaccagtaagctacccttttaccatcattggacaagtagcatccgtactatacttcacaacaatcctaatcctaataccaactatctccctaattgaaaacaaaatactcaaatgggcctgtccttgtagtataaactaatacaccagtcttgtaaaccggagatgaaaacctttttccaaggacaaatcagagaaaaagtctttaactccaccattagcacccaaagctaagattctaatttaaactattctctgttctttcatggggaagcagatttgggtaccacccaagtattgactcacccatcaacaaccgctatgtatttcgtacattactgccagtcaccatgaatattgtacggtaccataaatacttgaccacctgtagtacataaaaacccaatccacatcaaaaccccctccccatgcttacaagcaagtacagcaatcaaccttcaactatcacacatcaactgcaactccaaagccacccctcacccactaggataccaacaaacctatccacccttaacagtacatagtacataaaaccatttaccgtacatagcacattacagtcaaatcccttctcgcccccatggatgacccccctcagatagggatcccttgaccaccatcctccgtgaaatcaatatcccgcacaagagtgctactctcctcgctccgggcccataacacttgggggtagctaaagtgaactgtatccgacatctggttcctacttcagggtcataaagcctaaatagcccacacgttccccttaaataagacatcacgatg

SEQ ID NO: 114 - DNA, 16571 bp, Homo sapiens mitochondrial
  3109: "n" refers to a nucleotide at position 3107 of the Cambridge Reference Sequence (CRS, Anderson et al. 1981 Nature 290:457-465), later determined to be absent from the human mtDNA sequence according to the revised CRS (rCRS, Andrews et al. 1999 Nature Genetics 23:147); "n" therefore represents a single nucleotide deletion at a position corresponding to nucleotide 3107 of SEQ ID NO:1 as provided herein.
gatcacaggtctatcaccctattaaccactcacgggagctctccatgcatttggtattttcgtctggggggtatgcacgcgatagcattgcgagacgctggagccggagcaccctatgtcgcagtatctgtctttgattcctgcctcatcctattatttatcgcacctacgttcaatattacaggcgaacatacttactaaagtgtgttaattaattaatgcttgtaggacataataataacaattgaatgtctgcacagccgctttccacacagacatcataacaaaaaatttccaccaaaccccccctcccccccgcttctggccacagcacttaaacacatctctgccaaaccccaaaaacaaagaaccctaacaccagcctaaccagatttcaaattttatcttttggcggtatgcacttttaacagtcaccccccaactaccacattattttcccctcccactcccatactactaatctcatcaatacaacccccgcccatcctacccagcacacacacaccgctgctaaccccataccccgaaccaaccaaaccccaaagacaccccccacagtttatgtagcttacctcctcaaagcaatacactgaaaatgtttagacgggctcacatcaccccataaacaaataggtttggtcctagcctttctattagctcttagtaagattacacatgcaagcatccccgttccagtgagttcaccctctaaatcaccacgatcaaaagggacaagcatcaagcacgcagcaatgcagctcaaaacgcttagcctagccacacccccacgggaaacagcagtgattaacctttagcaataaacgaaagtttaactaagctatactaaccccagggttggtcaatttcgtgccagccaccgcggtcacacgattaacccaagtcaatagaagccggcgtaaagagtgttttaaatcaccccctccccaataaagctaaaactcacctgagttgtaaaaaactccagttgacacaaaatagactacgaaagtggctttaacatatctgaacacacaatagctaagacccaaactgggattagataccccactatgcttagccctaaacctcaacagttaaatcaacaaaactgctcgccagaacactacgagccacagcttaaaactcaaaggacctggcggtgcttcatatccctctagaggagcctgttctgtaatcgataaaccccgatcaacctcaccacctcttgctcagcctatataccgccatcttcagcaaaccctgatgaaggctacaaagtaagcgcaagtacccacgtaaagacgttaggtcaaggtgtagcccatgaggtggcaagaaatgggctacattttctaccccagaaaactacgatagcccttatgaaacttaagggtcgaaggtggatttagcagtaaactaagagtagagtgcttagttgaacagggccctgaagcgcgtacacaccgcccgtcaccctcctcaagtatacttcaaaggacatttaactaaaacccctacgcatttatatagaggagacaagtcgtaacatggtaagtgtactggaaagtgcacttggacgaaccagagtgtagcttaacacaaagcacccaacttacacttaggagatttcaacttaacttgaccgctctgagctaaacctagccccaaacccactccaccttactaccagacaaccttagccaaaccatttacccaaataaagtataggcgatagaaattgaaacctggcgcaatagatatagtaccgcaagggaaagatgaaaaattataaccaagcataatatagcaaggactaacccctataccttctgcataatgaattaactagaaataactttgcaaggagagccaaagctaagacccccgaaaccagacgagctacctaagaacagctaaaagagcacacccgtctatgtagcaaaatagtgggaagatttataggtagaggcgacaaacctaccgagcctggtgatagctggttgtccaagatagaatcttagttcaactttaaatttgcccacagaaccctctaaatccccttgtaaatttaactgttagtccaaagaggaacagctctttggacactaggaaaaaaccttgtagagagagtaaaaaatttaacacccatagtaggcctaaaagcagccaccaattaagaaagcgttcaagctcaacacccactacctaaaaaatcccaaacatataactgaactcctcacacccaattggaccaatctatcaccctatagaagaactaatgttagtataagtaacatgaaaacattctcctccgcataagcctgcgtcagattaaaacactgaactgacaattaacagcccaatatctacaatcaaccaacaagtcattattaccctcactgtcaacccaacacaggcatgctcataaggaaaggttaaaaaaagtaaaaggaactcggcaaatcttaccccgcctgtttaccaaaaacatcacctctagcatcaccagtattagaggcaccgcctgcccagtgacacatgtttaacggccgcggtaccctaaccgtgcaaaggtagcataatcacttgttccttaaatagggacctgtatgaatggctccacgagggttcagctgtctcttacttttaaccagtgaaattgacctgcccgtgaagaggcgggcataacacagcaagacgagaagaccctatggagctttaatttattaatgcaaacagtacctaacaaacccacaggtcctaaactaccaaacctgcattaaaaatttcggttggggcgacctcggagcagaacccaacctccgagcagtacatgctaagacttcaccagtcaaagcgaactactatactcaattgatccaataacttgaccaacggaacaagttaccctagggataacagcgcaatcctattctagagtccatatcaacaatagggtttacgacctcgatgttggatcaggacatcccgatggtgcagccgctattaaaggttcgtttgttcaacgattaaagtcctacgtgatctgagttcagaccggagtaatccaggtcggtttctatctacnttcaaattcctccctgtacgaaaggacaagagaaataaggcctacttcacaaagcgccttcccccgtaaatgatatcatctcaacttagtattatacccacacccacccaagaacagggtttgttaagatggcagagcccggtaatcgcataaaacttaaaactttacagtcagaggttcaattcctcttcttaacaacatacccatggccaacctcctactcctcattgtacccattctaatcgcaatggcattcctaatgcttaccgaacgaaaaattctaggctatatacaactacgcaaaggccccaacgttgtaggcccctacgggctactacaacccttcgctgacgccataaaactcttcaccaaagagcccctaaaacccgccacatctaccatcaccctctacatcaccgccccgaccttagctctcaccatcgctcttctactatgaacccccctccccatacccaaccccctggtcaacctcaacctaggcctcctatttattctagccacctctagcctagccgtttactcaatcctctgatcagggtgagcatcaaactcaaactacgccctgatcggcgcactgcgagcagtagcccaaacaatctcatatgaagtcaccctagccatcattctactatcaacattactaataagtggctcctttaacctctccacccttatcacaacacaagaacacctctgattactcctgccatcatgacccttggccataatatgatttatctccacactagcagagaccaaccgaacccccttcgaccttgccgaaggggagtccgaactagtctcaggcttcaacatcgaatacgccgcaggccccttcgccctattcttcatagccgaatacacaaacattattataataaacaccctcaccactacaatcttcctaggaacaacatatgacgcactctcccctgaactctacacaacatattttgtcaccaagaccctacttctaacctccctgttcttatgaattcgaacagcatacccccgattccgctacgaccaactcatacacctcctatgaaaaaacttcctaccactcaccctagcattacttatatgatatgtctccatacccattacaatctccagcattccccctcaaacctaagaaatatgtctgataaaagagttactttgatagagtaaataataggagcttaaacccccttatttctaggactatgagaatcgaacccatccctgagaatccaaaattctccgtgccacctatcacaccccatcctaaagtaaggtcagctaaataagctatcgggcccataccccgaaaatgttggttatacccttcccgtactaattaatcccctggcccaacccgtcatctactctaccatctttgcaggcacactcatcacagcgctaagctcgcactgattttttacctgagtaggcctagaaataaacatgctagcttttattccagttctaaccaaaaaaataaaccctcgttccacagaagctgccatcaagtatttcctcacgcaagcaaccgcatccataatccttctaatagctatcctcttcaacaatatactctccggacaatgaaccataaccaatactaccaatcaatactcatcattaataatcataatagctatagcaataaaactaggaatagccccctttcacttctgagtcccagaggttacccaaggcacccctctgacatccggcctgcttcttctcacatgacaaaaactagcccccatctcaatcatataccaaatctctccctcactaaacgtaagccttctcctcactctctcaatcttatccatcatagcaggcagttgaggtggattaaaccaaacccagctacgcaaaatcttagcatactcctcaattacccacataggatgaataatagcagttctaccgtacaaccctaacataaccattcttaatttaactatttatattatcctaactactaccgcattcctactactcaacttaaactccagcaccacgaccctactactatctcgcacctgaaacaagctaacatgactaacacccttaattccatccaccctcctctccctaggaggcctgcccccgctaaccggctttttgcccaaatgggccattatcgaagaattcacaaaaaacaatagcctcatcatccccaccatcatagccaccatcaccctccttaacctctacttctacctacgcctaatctactccacctcaatcacactactccccatatctaacaacgtaaaaataaaatgacagtttgaacatacaaaacccaccccattcctccccacactcatcgcccttaccacgctactcctacctatctccccttttatactaataatcttatagaaatttaggttaaatacagaccaagagccttcaaagccctcagtaagttgcaatacttaatttctgtaacagctaaggactgcaaaaccccactctgcatcaactgaacgcaaatcagccactttaattaagctaagcccttactagaccaatgggacttaaacccacaaacacttagttaacagctaagcaccctaatcaactggcttcaatctacttctcccgccgccgggaaaaaaggcgggagaagccccggcaggtttgaagctgcttcttcgaatttgcaattcaatatgaaaatcacctcggagctggtaaaaagaggcctaacccctgtctttagatttacagtccaatgcttcactcagccattttacctcacccccactgatgttcgccgaccgttgactattctctacaaaccacaaagacattggaacactatacctattattcggcgcatgagctggagtcctaggcacagctctaagcctccttattcgagccgagctgggccagccaggcaaccttctaggtaacgaccacatctacaacgttatcgtcacagcccatgcatttgtaataatcttcttcatagtaatacccatcataatcggaggctttggcaactgactagttcccctaataatcggtgcccccgatatggcgtttccccgcataaacaacataagcttctgactcttacctccctctctcctactcctgctcgcatctgctatagtggaggccggagcaggaacaggttgaacagtctaccctcccttagcagggaactactcccaccctggagcctccgtagacctaaccatcttctccttacacctagcaggtgtctcctctatcttaggggccatcaatttcatcacaacaattatcaatataaaaccccctgccataacccaataccaaacgcccctcttcgtctgatccgtcctaatcacagcagtcctacttctcctatctctcccagtcctagctgctggcatcactatactactaacagaccgcaacctcaacaccaccttcttcgaccccgccggaggaggagaccccattctataccaacacctattctgatttttcggtcaccctgaagtttatattcttatcctaccaggcttcggaataatctcccatattgtaacttactactccggaaaaaaagaaccatttggatacataggtatggtctgagctatgatatcaattggcttcctagggtttatcgtgtgagcacaccatatatttacagtaggaatagacgtagacacacgagcatatttcacctccgctaccataatcatcgctatccccaccggcgtcaaagtatttagctgactcgccacactccacggaagcaatatgaaatgatctgctgcagtgctctgagccctaggattcatctttcttttcaccgtaggtggcctgactggcattgtattagcaaactcatcactagacatcgtactacacgacacgtactacgttgtagcccacttccactatgtcctatcaataggagctgtatttgccatcataggaggcttcattcactgatttcccctattctcaggctacaccctagaccaaacctacgccaaaatccatttcactatcatattcatcggcgtaaatctaactttcttcccacaacactttctcggcctatccggaatgccccgacgttactcggactaccccgatgcatacaccacatgaaacatcctatcatctgtaggctcattcatttctctaacagcagtaatattaataattttcatgatttgagaagccttcgcttcgaagcgaaaagtcctaatagtagaagaaccctccataaacctggagtgactatatggatgccccccaccctaccacacattcgaagaacccgtatacataaaatctagacaaaaaaggaaggaatcgaaccccccaaagctggtttcaagccaaccccatggcctccatgactttttcaaaaaggtattagaaaaaccatttcataactttgtcaaagttaaattataggctaaatcctatatatcttaatggcacatgcagcgcaagtaggtctacaagacgctacttcccctatcatagaagagcttatcacctttcatgatcacgccctcataatcattttccttatctgcttcctagtcctgtatgcccttttcctaacactcacaacaaaactaactaatactaacatctcagacgctcaggaaatagaaaccgtctgaactatcctgcccgccatcatcctagtcctcatcgccctcccatccctacgcatcctttacataacagacgaggtcaacgatccctcccttaccatcaaatcaattggccaccaatggtactgaacctacgagtacaccgactacggcggactaatcttcaactcctacatacttcccccattattcctagaaccaggcgacctgcgactccttgacgttgacaatcgagtagtactcccgattgaagcccccattcgtataataattacatcacaagacgtcttgcactcatgagctgtccccacattaggcttaaaaacagatgcaattcccggacgtctaaaccaaaccactttcaccgctacacgaccgggggtatactacggtcaatgctctgaaatctgtggagcaaaccacagtttcatgcccatcgtcctagaattaattcccctaaaaatctttgaaatagggcccgtatttaccctatagcaccccctctaccccctctagagcccactgtaaagctaacttagcattaaccttttaagttaaagattaagagaaccaacacctctttacagtgaaatgccccaactaaatactaccgtatggcccaccataattacccccatactccttacactattcctcatcacccaactaaaaatattaaacacaaactaccacctacctccctcaccaaagcccataaaaataaaaaattataacaaaccctgagaaccaaaatgaacgaaaatctgttcgcttcattcattgcccccacaatcctaggcctacccgccgcagtactgatcattctatttccccctctattgatccccacctccaaatatctcatcaacaaccgactaatcaccacccaacaatgactaatcaaactaacctcaaaacaaatgataaccatacacaacactaaaggacgaacctgatctcttatactagtatccttaatcatttttattgccacaactaacctcctcggactcctgcctcactcatttacaccaaccacccaactatctataaacctagccatggccatccccttatgagcgggcgcagtgattataggctttcgctctaagattaaaaatgccctagcccacttcttaccacaaggcacacctacaccccttatccccatactagttattatcgaaaccatcagcctactcattcaaccaatagccctggccgtacgcctaaccgctaacattactgcaggccacctactcatgcacctaattggaagcgccaccctagcaatatcaaccattaaccttccctctacacttatcatcttcacaattctaattctactgactatcctagaaatcgctgtcgccttaatccaagcctacgttttcacacttctagtaagcctctacctgcacgacaacacataatgacccaccaatcacatgcctatcatatagtaaaacccagcccatgacccctaacaggggccctctcagccctcctaatgacctccggcctagccatgtgatttcacttccactccataacgctcctcatactaggcctactaaccaacacactaaccatataccaatgatggcgcgatgtaacacgagaaagcacataccaaggccaccacacaccacctgtccaaaaaggccttcgatacgggataatcctatttattacctcagaagtttttttcttcgcaggatttttctgagccttttaccactccagcctagcccctaccccccaattaggagggcactggcccccaacaggcatcaccccgctaaatcccctagaagtcccactcctaaacacatccgtattactcgcatcaggagtatcaatcacctgagctcaccatagtctaatagaaaacaaccgaaaccaaataattcaagcactgcttattacaattttactgggtctctattttaccctcctacaagcctcagagtacttcgagtctcccttcaccatttccgacggcatctacggctcaacattttttgtagccacaggcttccacggacttcacgtcattattggctcaactttcctcactatctgcttcatccgccaactaatatttcactttacatccaaacatcactttggcttcgaagccgccgcctgatactggcattttgtagatgtggtttgactatttctgtatgtctccatctattgatgagggtcttactcttttagtataaatagtaccgttaacttccaattaactagttttgacaacattcaaaaaagagtaataaacttcgccttaattttaataatcaacaccctcctagccttactactaataattattacattttgactaccacaactcaacggctacatagaaaaatccaccccttacgagtgcggcttcgaccctatatcccccgcccgcgtccctttctccataaaattcttcttagtagctattaccttcttattatttgatctagaaattgccctccttttacccctaccatgagccctacaaacaactaacctgccactaatagttatgtcatccctcttattaatcatcatcctagccctaagtctggcctatgagtgactacaaaaaggattagactgaaccgaattggtatatagtttaaacaaaacgaatgatttcgactcattaaattatgataatcatatttaccaaatgcccctcatttacataaatattatactagcatttaccatctcacttctaggaatactagtatatcgctcacacctcatatcctccctactatgcctagaaggaataatactatcgctgttcattatagctactctcataaccctcaacacccactccctcttagccaatattgtgcctattgccatactagtctttgccgcctgcgaagcagcggtgggcctagccctactagtctcaatctccaacacatatggcctagactacgtacataacctaaacctactccaatgctaaaactaatcgtcccaacaattatattactaccactgacatgactttccaaaaaacacataatttgaatcaacacaaccacccacagcctaattattagcatcatccctctactattttttaaccaaatcaacaacaacctatttagctgttccccaaccttttcctccgaccccctaacaacccccctcctaatactaactacctgactcctacccctcacaatcatggcaagccaacgccacttatccagtgaaccactatcacgaaaaaaactctacctctctatactaatctccctacaaatctccttaattataacattcacagccacagaactaatcatattttatatcttcttcgaaaccacacttatccccaccttggctatcatcacccgatgaggcaaccagccagaacgcctgaacgcaggcacatacttcctattctacaccctagtaggctcccttcccctactcatcgcactaatttacactcacaacaccctaggctcactaaacattctactactcactctcactgcccaagaactatcaaactcctgagccaacaacttaatatgactagcttacacaatagcttttatagtaaagatacctctttacggactccacttatgactccctaaagcccatgtcgaagcccccatcgctgggtcaatagtacttgccgcagtactcttaaaactaggcggctatggtataatacgcctcacactcattctcaaccccctgacaaaacacatagcctaccccttccttgtactatccctatgaggcataattataacaagctccatctgcctacgacaaacagacctaaaatcgctcattgcatactcttcaatcagccacatagccctcgtagtaacagccattctcatccaaaccccctgaagcttcaccggcgcagtcattctcataatcgcccacgggcttacatcctcattactattctgcctagcaaactcaaactacgaacgcactcacagtcgcatcataatcctctctcaaggacttcaaactctactcccactaatagctttttgatgacttctagcaagcctcgctaacctcgccttaccccccactattaacctactgggagaactctctgtgctagtaaccacgttctcctgatcaaatatcactctcctacttacaggactcaacatactagtcacagccctatactccctctacatatttaccacaacacaatggggctcactcacccaccacattaacaacataaaaccctcattcacacgagaaaacaccctcatgttcatacacctatcccccattctcctcctatccctcaaccccgacatcattaccgggttttcctcttgtaaatatagtttaaccaaaacatcagattgtgaatctgacaacagaggcttacgaccccttatttaccgagaaagctcacaagaactgctaactcatgcccccatgtctaacaacatggctttctcaacttttaaaggataacagctatccattggtcttaggccccaaaaattttggtgcaactccaaataaaagtaataaccatgcacactactataaccaccctaaccctgacttccctaattccccccatccttaccaccctcgttaaccctaacaaaaaaaactcatacccccattatgtaaaatccattgtcgcatccacctttattatcagtctcttccccacaacaatattcatgtgcctagaccaagaagttattatctcgaactgacactgagccacaacccaaacaacccagctctccctaagcttcaaactagactacttctccataatattcatccctgtagcattgttcgttacatggtccatcatagaattctcactgtgatatataaactcagacccaaacattaatcagttcttcaaatatctactcatcttcctaattaccatactaatcttagttaccgctaacaacctattccaactgttcatcggctgagagggcgtaggaattatatccttcttgctcatcagttgatgatacgcccgagcagatgccaacacagcagccattcaagcaatcctatacaaccgtatcggcgatatcggtttcatcctcgccttagcatgatttatcctacactccaactcatgagacccacaacaaatagcccttctaaacgctaatccaagcctcaccccactactaggcctcctcctagcagcagcaggcaaatcagcccaattaggtctccacccctgactcccctcagccatagaaggccccaccccagtctcagccctactccactcaagcactatagttgtagcaggaatcttcttactcatccgcttccaccccctagcagaaaatagcccactaatccaaactctaacactatgcttaggcgctatcaccactctgttcgcagcagtctgcgcccttacacaaaatgacatcaaaaaaatcgtagccttctccacttcaagtcaactaggactcataatagttacaatcggcatcaaccaaccacacctagcattcctgcacatctgtacccacgccttcttcaaagccatactatttatgtgctccgggtccatcatccacaaccttaacaatgaacaagatattcgaaaaataggaggactactcaaaaccatacctctcacttcaacctccctcaccattggcagcctagcattagcaggaatacctttcctcacaggtttctactccaaagaccacatcatcgaaaccgcaaacatatcatacacaaacgcctgagccctatctattactctcatcgctacctccctgacaagcgcctatagcactcgaataattcttctcaccctaacaggtcaacctcgcttccccacccttactaacattaacgaaaataaccccaccctactaaaccccattaaacgcctggcagccggaagcctattcgcaggatttctcattactaacaacatttcccccgcatcccccttccaaacaacaatccccctctacctaaaactcacagccctcgctgtcactttcctaggacttctaacagccctagacctcaactacctaaccaacaaacttaaaataaaatccccactatgcacattttatttctccaacatactcggattctaccctagcatcacacaccgcacaatcccctatctaggccttcttacgagccaaaacctgcccctactcctcctagacctaacctgactagaaaagctattacctaaaacaatttcacagcaccaaatctccacctccatcatcacctcaacccaaaaaggcataattaaactttacttcctctctttcttcttcccactcatcctaaccctactcctaatcacataacctattcccccgagcaatctcaattacaatatatacaccaacaaacaatgttcaaccagtaactactactaatcaacgcccataatcatacaaagcccccgcaccaataggatcctcccgaatcaaccctgacccctctccttcataaattattcagcttcctacactattaaagtttaccacaaccaccaccccatcatactctttcacccacagcaccaatcctacctccatcgctaaccccactaaaacactcaccaagacctcaacccctgacccccatgcctcaggatactcctcaatagccatcgctgtagtatatccaaagacaaccatcattccccctaaataaattaaaaaaactattaaacccatataacctcccccaaaattcagaataataacacacccgaccacaccgctaacaatcaatactaaacccccataaataggagaaggcttagaagaaaaccccacaaaccccattactaaacccacactcaacagaaacaaagcatacatcattattctcgcacggactacaaccacgaccaatgatatgaaaaaccatcgttgtatttcaactacaagaacaccaatgaccccaatacgcaaaactaaccccctaataaaattaattaaccactcattcatcgacctccccaccccatccaacatctccgcatgatgaaacttcggctcactccttggcgcctgcctgatcctccaaatcaccacaggactattcctagccatgcactactcaccagacgcctcaaccgccttttcatcaatcgcccacatcactcgagacgtaaattatggctgaatcatccgctaccttcacgccaatggcgcctcaatattctttatctgcctcttcctacacatcgggcgaggcctatattacggatcatttctctactcagaaacctgaaacatcggcattatcctcctgcttgcaactatagcaacagccttcataggctatgtcctcccgtgaggccaaatatcattctgaggggccacagtaattacaaacttactatccgccatcccatacattgggacagacctagttcaatgaatctgaggaggctactcagtagacagtcccaccctcacacgattctttacctttcacttcatcttgcccttcattattgcagccctagcagcactccacctcctattcttgcacgaaacgggatcaaacaaccccctaggaatcacctcccattccgataaaatcaccttccacccttactacacaatcaaagacgccctcggcttacttctcttccttctctccttaatgacattaacactattctcaccagacctcctaggcgacccagacaattataccctagccaaccccttaaacacccctccccacatcaagcccgaatgatatttcctattcgcctacacaattctccgatccgtccctaacaaactaggaggcgtccttgccctattactatccatcctcatcctagcaataatccccatcctccatatatccaaacaacaaagcataatatttcgcccactaagccaatcactttattgactcctagccgcagacctcctcattctaacctgaatcggaggacaaccagtaagctacccttttaccatcattggacaagtagcatccgtactatacttcacaacaatcctaatcctaataccaactatctccctaattgaaaacaaaatactcaaatgggcctgtccttgtagtataaactaatacaccagtcttgtaaaccggagatgaaaacctttttccaaggacaaatcagagaaaaagtctttaactccaccattagcacccaaagctaagattctaatttaaactattctctgttctttcatggggaagcagatttgggtaccacccaagtattgactcacccatcaacaaccgctatgtatttcgtacattactgccagccaccatgaatattgtacggtaccataaatacttgaccacctgtagtacataaaaacccaatccacatcaaaaccccctccccatgcttacaagcaagtacagcaatcaaccctcaactatcacacatcaactgcaactccaaagccacccctcacccactaggataccaacaaacctacccacccttaacagtacatagtacataaagccatttaccgtacatagcacattacagtcaaatcccttctcgtccccatggatgacccccctcagataggggtcccttgaccaccatcctccgtgaaatcaatatcccgcacaagagtgctactctcctcgctccgggcccataacacttgggggtagctaaagtgaactgtatccgacatctggttcctacttcagggccataaagcctaaatagcccacacgttccccttaaataagacatcacgatg

SEQ ID NO: 115 - DNA, 16572 bp, Homo sapiens mitochondrial
  3110: "n" refers to a nucleotide at position 3107 of the Cambridge Reference Sequence (CRS, Anderson et al. 1981 Nature 290:457-465), later determined to be absent from the human mtDNA sequence according to the revised CRS (rCRS, Andrews et al. 1999 Nature Genetics 23:147); "n" therefore represents a single nucleotide deletion at a position corresponding to nucleotide 3107 of SEQ ID NO:1 as provided herein.
gatcacaggtctatcaccctattaaccactcacgggagctctccatgcatttggtattttcgtctggggggtgtgcacgcgatagcattgcgagacgctggagccggagcaccctatgtcgcagtatctgtctttgattcctgcctcatcccattatttatcgcacctacgttcaatattacaggcgaacatacttactaaagtgtgttaattaatcaatgcttgtaggacataataataacaattgaatgtctgcacagccgctttccacacagacatcataacaaaaaatttccaccaaaccccccctcccccgccttctggccacagcacttaaacatatctctgccaaaccccaaaaacaaagaaccctaacaccagcctaaccagatttcaaattttatcttttggcggtatgcacttttaacagtcaccccccaactaacacattattttcccctcccactcccatactactaatctcatcaatacaacccccgcccatcctgcccagcacacacacaccacgctgctaaccccataccccgaaccaaccaaaccccaaagacaccccccacagtttatgtagcttacctcctcaaagcaatacactgaaaatgtttagacgggctcacatcaccccataaacaaataggtttggtcctagcctttctattagctcttagtaagattacacatgcaagcatccccgttccagtgagttcaccctctaaatcaccacgatcaaaagggacaagcatcaagcacgcagcaatgcagctcaaaacgcttagcctagccacacccccacgggaaacagcagtgattaacctttagcaataaacgaaagtttaactaagctatactaaccccagggttggtcaatttcgtgccagccaccgcggtcacacgattaacccaagtcaatagaagccggcgtaaagagtgttttagatcaccccctccccaataaagctaaaactcacctgaattgtaaaaaactccagttgacacaaaatagactacgaaagtggctttaacatatctgaacacacaatagctaagacccaaactgggattagataccccactatgcttagccctaaacctcaacagttaaatcaacaaaactgctcgccagaacactacgagccacagcttaaaactcaaaggacctggcggtgcttcatatccctctagaggagcctgttctgtaatcgataaaccccgatcaacctcaccacctcttgctcagcctatataccgccatcttcagcaaaccctgatgaaggctacaaagtaagcgcaagtacccacgtaaagacgttaggtcaaggtgtagcccatgaggtggcaagaaatgggctacattttctaccccagaaaactacgatagcccttatgaaacttaagggtcgaaggtggatttagcagtaaactgagagtagagtgcttagttgaacagggccctgaagcgcgtacacaccgcccgtcaccctcctcaagtatacttcaaaggacatttaactaaaacccctacgcatttatatagaggagacaagtcgtaacatggtaagtgtactggaaagtgcacttggacgaaccagagtgtagcttaacacaaagcacccaacttacacttaggagatttcaacttaacttgaccgctctgagctaaacctagccccaaacccactccaccttactaccagacaaccttagccaaaccatttacccaaataaagtataggcgatagaaattgaaacctggcgcaatagatatagtaccgcaagggaaagatgaaaaattatagccaagcataatatagcaaggactaacccctataccttctgcataatgaattaactagaaataactttgcaaggagagccaaagctaagacccccgaaaccagacgagctacctaagaacagctaaaagagcacacccgtctatgtagcaaaatagtgggaagatttataggtagaggcgacaaacctaccgagcctggtgatagctggttgtccaagatagaatcttagttcaactttaaatttgcccacagaaccctctaaatccccttgtaaatttaactgttagtccaaagaggaacagctctttggacactaggaaaaaaccttgtagagagagtaaaaaatttaacacccatagtaggcctaaaagcagccaccaattaagaaagcgttcaagctcaacacccactacctaaaaaatcccaaacatataactgaactcctcacacccaattggaccaatctatcaccctatagaagaactaatgttagtataagtaacatgaaaacattctcctccgcataagcctgcgtcagattaaaacactgaactgacaattaacagcccaatatctacaatcaaccaacaagtcattattaccctcactgtcaacccaacacaggcatgctcataaggaaaggttaaaaaaagtaaaaggaactcggcaaatcttaccccgcctgtttaccaaaaacatcacctctagcatcaccagtattagaggcaccgcctgcccagtgacacatgtttaacggccgcggtaccctaaccgtgcaaaggtagcataatcacttgttccttaaatagggacctgtatgaatggctccacgagggttcagctgtctcttacttttaaccagtgaaattgacctgcccgtgaagaggcgggcatgacacagcaagacgagaagaccctatggagctttaatttattaatgcaaacagtacctaacaaacccacaggtcctaaactaccaaacctgcattaaaaatttcggttggggcgacctcggagcagaacccaacctccgagcagtacatgctaagacttcaccagtcaaagcgaactactatactcaattgatccaataacttgaccaacggaacaagttaccctagggataacagcgcaatcctattctagagtccatatcaacaatagggtttacgacctcgatgttggatcaggacatcccgatggtgcagccgctattaaaggttcgtttgttcaacgattaaagtcctacgtgatctgagttcagaccggagtaatccaggtcggtttctatctacnttcaaattcctccctgtacgaaaggacaagagaaataaggcctacttcacaaagcgccttcccccgtaaatgatatcatctcaacttagtattatacccacacccacccaagaacagggtttgttaagatggcagagcccggtaatcgcataaaacttaaaactttacagtcagaggttcaattcctcttcttaacaacatacccatggccaacctcctactcctcattgtacccattctaatcgcaatggcattcctaatgcttaccgaacgaaaaattctaggctatatacaactacgcaaaggccccaacgttgtaggcccctacgggctactacaacccttcgctgacgccataaaactcttcaccaaagagcccctaaaacccgccacatctaccatcaccctctacatcaccgccccgaccttagctctcaccatcgctcttctactatgaacccccctccccatacccaaccccctggtcaacctcaacctaggcctcctatttattctagccacctctagcctagccgtttactcaatcctctgatcagggtgagcatcaaactcaaactacgccctgatcggcgcactgcgagcagtagcccagacaatctcatatgaagtcaccctagccatcattctactatcaacattactaataagtggctcctttaacctctccacccttatcacaacacaagaacacctctgattactcctgccatcatgacccttggccataatatgatttatctccacactagcagagaccaaccgaacccccttcgaccttgccgaaggggagtccgaactagtctcaggcttcaacatcgaatacgccgcaggccccttcgccctattcttcatagccgaatacacaaacattattataataaacaccctcaccactacaatcttcctaggaacaacatatgacgcactctcccctgaactctacacaacatattttgtcaccaagaccctacttctaacctccctgttcttatgaattcgaacagcatacccccgattccgctacgaccaactcatacacctcctatgaaaaaacttcctaccactcaccctagcattacttatatgatatgtctccatacccattacaatctccagcattccccctcaaacctaagaaatatgtctgataaaagagttactttgatagagtaaataataggagcttaaacccccttatttctaggactatgagaatcgaacccatccctgagaatccaaaattctccgtgccacctatcacaccccatcctaaagtaaggtcagctaaataagctatcgggcccataccccgaaaatgttggttatacccttcccgtactaattaatcccctggcccaacccgtcatctactctaccatctttgcaggcacactcatcacagcgctaagctcgcactgattttttacctgagtaggcctagaaataaacatgctagcttttattccagttctaaccaaaaaaataaaccctcgttccacagaagctgccatcaagtatttcctcacgcaagcaaccgcatccataatccttctaatagctatcctcttcaacaatatactctccggacaatgaaccataaccaatactaccaatcaatactcatcattaataatcataatggctatagcaataaaactaggaatagccccctttcacttctgagtcccagaagttacccaaggcacccctctgacatccggcctgcttcttctcacatgacaaaaactagcccccatctcaatcatataccaaatctctccctcactaaacgtaagccttctcctcactctctcaatcttatccatcatagcaggcagttgaggtggattaaaccaaacccagctacgcaaaatcttagcatactcctcaattacccacataggatgaataatagcagttctaccgtacaaccctaacataaccattcttaatttaactatttatattatcctaactactaccgcattcctactactcaacttaaactccagcaccacgaccctactactatctcgcacctgaaacaagctaacatgactaacacccttaattccatccaccctcctctccctaggaggcctgcccccgctaaccggctttttgcccaaatgggccattatcgaagaattcacaaaaaacaatagcctcatcatccccaccatcatagccaccatcaccctccttaacctctacttctacctacgcctaatctactccacctcaatcacactactccccatgtctaacaacgtaaaaataaaatgacagtttgaacacacaaaacccaccccattcctccccacactcatcgcccttaccacgctactcctacctatctccccttttatactaataatcttatagaaatttaggttaaatacagaccaagagccttcaaagccctcagtaagttgcaatacttaatttctgtaacagctaaggactgcaaaaccccactctgcatcaactgaacgcaaatcagccactttaattaagctaagcccttactagaccaatgggacttaaacccacaaacacttagttaacagctaagcaccctaatcaactggcttcaatctacttctcccgccgccgggaaaaaaggcgggagaagccccggcaggtttgaagctgcttcttcgaatttgcaattcaatatgaaaatcacctcggagctggtaaaaagaggcctaacccctgtctttagatttacagtccaatgcttcactcagccattttacctcacccccactgatgttcgccgaccgttgactattctctacaaaccacaaagacattggaacactatacctattattcggcgcatgagctggagtcctaggcacagctctaagcctccttattcgagccgagctgggccagccaggcaaccttttaggtaacgaccacatctacaacgttatcgtcacagcccatgcatttgtaataatcttcttcatagtaatacccatcataatcggaggctttggcaactgactagtccccctaataatcggtgcccccgatatggcgtttccccgcataaacaacataagcttctgactcttacctccctctctcctactcctgctcgcatctgctatagtggaggccggagcaggaacaggttgaacagtctaccctcccttagcagggaactactcccaccctggagcctccgtagacctaaccatcttctccttacacctagcaggtgtctcctctatcttaggggccatcaatttcatcacaacaattatcaatataaaaccccctgccataacccaataccaaacgcccctcttcgtctgatccgtcctaatcacagcagtcctacttctcctatctctcccagtcctagctgctggcatcactatactactaacagaccgcaacctcaacaccaccttcttcgaccccgccggaggaggagaccccattctataccaacacctattctgatttttcggtcaccctgaagtttatattcttatcctaccaggcttcggaataatctcccatattgtaacttactactccggaaaaaaagaaccatttggatacataggtatggtctgagctatgatatcaattggcttcctagggtttatcgtgtgagcacaccatatatttacagtaggaatagacgtagacacacgagcatatttcacctccgctaccataatcatcgctatccccaccggcgtcaaagtatttagctgactcgccacactccacggaagcaatatgaaatgatctgctgcagtgctctgagccctaggattcatctttcttttcaccgtaggtggcctgactggcattgtattagcaaactcatcactagacatcgtactacacgacacgtactacgttgtagctcacttccactatgtcctatcaataggagctgtatttgccatcataggaggcttcattcactgatttcccctattctcaggttacaccctagaccaaacctacgccaaaatccatttcactatcatattcatcggcgtaaatctaactttcttcccacaacactttctcggcctatccggaatgccccgacgttactcggactaccccgatgcatacaccacatgaaacatcctatcatctgtaggctcattcatttctctaacagcagtaatattaataattttcatgatttgagaagccttcgcttcgaagcgaaaagtcctaatagtagaagaaccctccataaacctggagtgactatatggatgccccccaccctaccacacattcgaagaacccgtatacataaaatctagacaaaaaaggaaggaatcgaaccccccaaagctggtttcaagccaaccccatggcctccatgactttttcaaaaaggtattagaaaaaccatttcataactttgtcaaagttaaattataggctaaatcctatatatcttaatggcacatgcagcgcaagtaggtctacaagacgctacttcccctatcatagaagagcttatcacctttcatgatcacgccctcataatcattttccttatctgcttcctagtcctgtatgcccttttcctaacactcacaacaaaactaactaatactaacatctcagacgctcaggaaatagaaaccgtctgaactatcctgcccgccatcatcctagtcctcatcgccctcccatccctacgcatcctttacataacagacgaggtcaacgatccctcccttaccatcaaatcaattggccaccaatggtactgaacctacgagtacaccgactacggcggactaatcttcaactcctacatacttcccccattattcctagaaccaggcgacctgcgactccttgacgttgacaatcgagtagtactcccgattgaagcccccattcgtataataattacatcacaagacgtcttgcactcatgagctgtccccacattaggcttaaaaacagatgcaattcccggacgtctaaaccaaaccactttcaccgctacacgaccgggggtatactacggtcaatgctctgaaatctgtggagcaaaccacagtttcatgcccatcgtcctagaattaattcccctaaaaatctttgaaatagggcccgtatttaccctatagcaccccctctaccccctctagagcccactgtaaagctaacttagcattaaccttttaagttaaagattaagagaaccaacacctctttacagtgaaatgccccaactaaatactaccgtatggcccaccataattacccccatactccttacactattcctcatcacccaactaaaaatattaaacacaaactaccacctacctccctcaccaaagcccataaaaataaaaaattataacaaaccctgagaaccaaaatgaacgaaaatctgttcgcttcattcattgcccccacaatcctaggcctacccgccgcagtactgatcattctatttccccctctattgatccccacctccaaatatctcatcaacaaccgactaatcaccacccaacaatgactaatcaaactaacctcaaaacaaatgataaccatacacaacactaaaggacgaacctgatctcttatactagtatccttaatcatttttattgccacaactaacctcctcggactcctgcctcactcatttacaccaaccacccaactatctataaacctagccatggccatccccttatgagcgggcgcagtgattataggctttcgctctaagattaaaaatgccctagcccacttcttaccacaaggcacacctacaccccttatccccatactagttattatcgaaaccatcagcctactcattcaaccaatagccctggccgtacgcctaaccgctaacattactgcaggccacctactcatgcacctaattggaagcgccaccctagcaatatcaaccattaaccttccctctacacttatcatcttcacaattctaattctactgactatcctagaaatcgctgtcgccttaatccaagcctacgttttcacacttctagtaagcctctacctgcacgacaacacataatgacccaccaatcacatgcctatcatatagtaaaacccagcccatgacccctaacaggggccctctcagccctcctaatgacctccggcctagccatgtgatttcacttccactccataacgctcctcatactaggcctactaaccaacacactaaccatataccaatgatggcgcgatgtaacacgagaaagcacataccaaggccaccacacaccacctgtccaaaaaggccttcgatacgggataatcctatttattacctcagaagtttttttcttcgcaggatttttctgagccttttaccactccagcctagcccctaccccccaattaggagggcactggcccccaacaggcatcaccccgctaaatcccctagaagtcccactcctaaacacatccgtattactcgcatcaggagtatcaatcacctgagctcaccatagtctaatagaaaacaaccgaaaccaaataattcaagcactgcttattacaattttactgggtctctattttaccctcctacaagcctcagagtacttcgagtctcccttcaccatttccgacggcatctacggctcaacattttttgtagccacaggcttccacggacttcacgtcattattggctcaactttcctcactatctgcttcatccgccaactaatatttcactttacatccaaacatcactttggcttcgaagccgccgcctgatactggcattttgtagatgtggtttgactatttctgtatgtctccatctattgatgagggtcttactcttttagtataaatagtaccgttaacttccaattaactagttttgacaacattcaaaaaagagtaataaacttcgccttaattttaataatcaacaccctcctagccttactactaataattattacattttgactaccacaactcaacggctacatagaaaaatccaccccttacgagtgcggcttcgaccctatatcccccgcccgcgtccctttctccataaaattcttcttagtagctattaccttcttattatttgatctagaaattgccctccttttacccctaccatgagccctacaaacaactaacctgccactaatagttatgtcatccctcttattaatcatcatcctagccctaagtctggcctatgagtgactacaaaaaggattagactgaaccgaattggtatatagtttaaacaaaacgaatgatttcgactcattaaattatgataatcatatttaccaaatgcccctcatttacataaatattatactagcatttaccatctcacttctaggaatactagtatatcgctcacacctcatatcctccctactatgcctagaaggaataatactatcgctgttcattatagctactctcataaccctcaacacccactccctcttagccaatattgtgcctattgccatactagtctttgccgcctgcgaagcagcggtgggcctagccctactagtctcaatctccaacacatatggcctagactacgtacataacctaaacctactccaatgctaaaactaatcgtcccaacaattatattactaccactgacatgactttccaaaaaacacataatttgaatcaacacaaccacccacagcctaattattagcatcatccctctgctattttttaaccaaatcaacaacaacctatttagctgttccccaaccttttcctccgaccccctaacaacccccctcctaatactaactacctgactcctacccctcacaatcatggcaagccaacgccacttatccagtgaaccactatcacgaaaaaaactctacctctctatactaatctccctacaaatctccttaattataacattcacagccacagaactaatcatattttatatcttcttcgaaaccacacttatccccaccttggctatcatcacccgatgaggcaaccagccagaacgcctgaacgcaggcacatacttcctattctacaccctagtaggctcccttcccctactcatcgcactaatttacactcacaacaccctaggctcactaaacattctactactcactctcactgcccaagaactatcaaactcctgagccaacaacttaatatgactagcttacacaatagcttttatagtaaagatacctctttacggactccacttatgactccctaaagcccatgtcgaagcccccatcgctgggtcaatagtacttgccgcagtactcttgaaactaggcggctatggtataatacgcctcacactcattctcaaccccctgacaaaacacatagcctaccccttccttgtactatccctatgaggcataattataacaagctccatctgcctacgacaaacagacctaaaatcgctcattgcatactcttcaatcagccacatagccctcgtagtaacagccattctcatccaaaccccctgaagcttcaccggcgcagtcattctcataatcgcccacggacttacatcctcattactattctgcctagcaaactcaaactacgaacgcactcacagtcgcatcataatcctctctcaaggacttcaaactctactcccactaatagctttttgatgacttctagcaagcctcgctaacctcgccttaccccccactattaacctactgggagaactctctgtgctagtaaccacgttctcctgatcaaatatcactctcctacttacaggactcaacatactagtcacagccctatactccctctacatatttaccacaacacaatggggctcactcacccaccacattaacaacataaaaccctcattcacacgagaaaacaccctcatgttcatacacctatcccccattctcctcctatccctcaaccccgacatcattaccgggttttcctcttgtaaatatagtttaaccaaaacatcagattgtgaatctgacaacagaggcttacgaccccttatttaccgagaaagctcacaagaactgctaactcatgcccccatgtctaacaacatggctttctcaacttttaaaggataacagctatccattggtcttaggccccaagaattttggtgcaactccaaataaaagtaataaccatgcacactactataaccaccctaaccctaacttccctaattccccccatccttaccaccctcgttaaccctaacaaaaaaaactcatacccccattatgtaaaatccattgtcgcatccacctttattatcagtctcttccccacaacaatattcatgtgcctagaccaagaagttattatctcgaactgacactgagccacaacccaaacaacccagctctccctaagcttcaaactagactacttctccataatattcatccctgtagcattgttcgttacatggtccatcatagaattctcactgtgatatataaactcagacccaaacattaatcagttcttcaaatatctactcatcttcctaattaccatactaatcttagttaccgctaacaacctattccaactgttcatcggctgagagggcgtaggaattatatccttcttgctcatcagttgatgatacgcccgagcagatgccaacacagcagccattcaagcaatcctatacaaccgtatcggcgatatcggtttcatcctcgccttagcatgatttatcctacactccaactcatgagacccacaacaaatagcccttctaaacgctaatccaagcctcaccccactactaggcctcctcctagcagcagcaggcaaatcagcccaattaggcctccacccctgactcccctcagccatagaaggccccaccccagtctcagccctactccactcaagcactatagttgtagcaggaatcttcttactcatccgcttccaccccctagcagaaaatagcccactaatccaaactctaacactatgcttaggcgctatcaccactctgttcgcagcagtctgcgcccttacacaaaatgacatcaaaaaaatcgtagccttctccacttcaagtcaactaggactcataatagttacaatcggcatcaaccaaccacacctagcattcctgcacatctgtacccacgccttcttcaaagccatactatttatgtgctccgggtccatcatccacaaccttaacaatgaacaagatattcgaaaaataggaggactactcaaaaccatacctctcacttcaacctccctcaccattggcagcctagcattagcaggaatacctttcctcacaggtttctactccaaagaccacatcatcgaaaccgcaaacatatcatacacaaacgcctgagccctatctattactctcatcgctacctccctgacaagcgcctatagcactcgaataattcttctcaccctaacaggtcaacctcgcttccccacccttactaacattaacgaaaataaccccaccctactaaaccccattaaacgcctggcagccggaagcctattcgcaggattcctcattactaacaacatttcccccgcatcccccttccaaacaacaatccccctctacctaaaactcacagccctcgctgtcactttcctaggacttctaacagccctagacctcaactacctaaccaacaaacttaaaataaaatccccactatgcacattttatttctccaacatactcggattctaccctagcatcacacaccgcacaatcccctatctaggccttcttacgagccaaaacctgcccctactcctcctagacctaacctgactagaaaagctattacctaaaacaatttcacagcaccaaatctccacctccatcatcacctcaacccaaaaaggcataattaaactttacttcctctctttcttcttcccactcatcctaaccctactcctaatcacataacctattcccccgagcaatctcaattacaatatatacaccaacaaacaatgttcaaccagtaactactactaatcaacgcccataatcatacaaagcccccgcaccaataggatcctcccgaatcaaccctgacccctctccttcataaattattcagcttcctacactattaaagtttaccacaaccaccaccccatcatactctttcacccacagcaccaatcctacctccatcgctaaccccactaaaacactcaccaagacctcaacccctgacccccatgcctcaggatactcctcaatagccatcgctgtagtatatccaaagacaaccatcattccccctaaataaattaaaaaaactattaaacccatataacctcccccaaaattcagaataataacacacccgaccacaccgctaacaatcaatactaaacccccataaataggagaaggcttagaagaaaaccccacaaaccccattactaaacccacactcaacagaaacaaagcatacatcattattctcgcacggactacaaccacgaccaatgatatgaaaaaccatcgttgtatttcaactacaagaacaccaatgaccccaatacgcaaaattaaccccctaataaaattaattaaccactcattcatcgacctccccaccccatccaacatctccgcatgatgaaacttcggctcactccttggcgcctgcctgatcctccaaatcaccacaggactattcctagccatgcactactcaccagacgcctcaaccgccttttcatcaatcgcccacatcactcgagacgtaaattatggctgaatcatccgctaccttcacgccaatggcgcctcaatattctttatctgcctcttcctacacatcgggcgaggcctatattacggatcatttctctactcagaaacctgaaacatcggcattatcctcctgcttgcaactatagcaacagccttcataggctatgtcctcccgtgaggccaaatatcattctgaggggccacagtaattacaaacttactatccgccatcccatacattgggacagacctagttcaatgaatctgaggaggctactcagtagacagtcccaccctcacacgattctttacctttcacttcatcttgcccttcattattgcagccctagcagcactccacctcctattcttgcacgaaacgggatcaaacaaccccctaggaatcacctcccattccgataaaatcaccttccacccttactacacaatcaaagacgccctcggcttacttctcttccttctctccttaatgacattaacactattctcaccagacctcctaggcgacccagacaattataccctagccaaccccttaaacacccctccccacatcaagcccgaatgatatttcctattcgcctacacaattctccgatccgtccctaacaaactaggaggcgtccttgccctattactatccatcctcatcctagcaataatccccatcctccatatatccaaacaacaaagcataatatttcgcccactaagccaatcactttattgactcctagccgcagacctcctcattctaacctgaatcggaggacaaccagtaagctacccctttaccatcattggacaagtagcatccgtactatacttcacaacaatcctaatcctaataccaactatctccctaattgaaaacaaaatactcaaatgggcctgtccttgtagtataaactagtacaccagtcttgtaaaccggagatgaaaacctttttccaaggacaaatcagagaaaaagtctttaactccaccattagcacccaaagctaagattctaatttaaactattctctgttctttcatggggaagcagatttgggtgccacccaagtattgactcacccatcaacaaccgctatgtatttcgtacattactgccagccaccatgaatattgtaccgtaccataaatacttgaccacctgtagtacataaaaacccaatccacatcaaaaccccccccccatgcttacaagcaagtacagcaatcaaccctcaactatcacacatcaactgcaactccaaagtcacccctcacccactaggataccaacaaacctacccacccttaacagtacatagtacataaagccatttaccgtacatagcacattacagtcaaatcccttctcgtccccatggatgacccccctcagataggggtcccttgaccaccatcctccgtgaaatcaatatcccgcacaagagtgctactctcctcgctccgggcccataacacttgggggtagctaaagtgaactgtatccgacatctggttcctacttcagggccataaagcctaaatagcccacacgttccccttaaataagacatcacgatg

SEQ ID NO: 116 - DNA, 16570 bp, Homo sapiens mitochondrial
  3108: "n" refers to a nucleotide at position 3107 of the Cambridge Reference Sequence (CRS, Anderson et al. 1981 Nature 290:457-465), later determined to be absent from the human mtDNA sequence according to the revised CRS (rCRS, Andrews et al. 1999 Nature Genetics 23:147); "n" therefore represents a single nucleotide deletion at a position corresponding to nucleotide 3107 of SEQ ID NO:1 as provided herein.
gatcacaggtctatcaccctattaaccactcacgggagctctccatgcatttggtattttcgtctggggggtgtgcacgcgatagcattgcgagacgctggagccggagcaccctatgtcgcagtatctgtctttgattcctgcctcatcctattatttatcgcacctacgttcaatattacaggcgaacatacttactaaagtgtgttaattaattaatgcttgtaggacataataataacaattgaatgtctgcacagccgctttccacacagacatcataacaaaaaatttccaccaaaccccccctcccccgccttctggccacagcacttaaacacatctctgccaaaccccaaaaacaaagaaccctaacaccagcctaaccagatttcaaattttatcttttggcggtatgcacttttaacagtcaccccccaactaacacattattttcccctcccactcccatactactaatctcatcaatacaaccctcgcccatcctacccagcacacacacaccgctgctaaccccataccccgaaccaaccaaaccccaaagacaccccccacagtttatgtagcttacctcctcaaagcaatacactgaaaatgtttagacgggctcacatcaccccataaacaaataggtttggtcctagcctttctattagctcttagtaagattacacatgcaagcatccccgttccagtgagttcaccctctaaatcaccacgatcaaaagggacaagcatcaagcacgcagcaatgcagctcaaaacgcttagcctagccacacccccacgggaaacagcagtgattaacctttagcaataaacgaaagtttaactaagctatactaaccccagggttggtcaatttcgtgccagccaccgcggtcacacgattaacccaagtcaatagaagccggcgtaaagagtgttttagatcaccccctccccaataaagctaaaactcacctgagttgtaaaaaactccagttgacacaaaatagactacgaaagtggctttaacatatctgaacacacaatagctaagacccaaactgggattagataccccactatgcttagccctaaacctcaacagttaaatcaacaaaactgctcgccagaacactacgagccacagcttaaaactcaaaggacctggcggtgcttcatacccctctagaggagcctgttctgtaatcgataaaccccgatcaacctcaccacctcttgctcagcctatataccgccatcttcagcaaaccctgatgaaggctacaaagtaagcgcaagtacccacgtaaagacgttaggtcaaggtgtagcccatgaggtggcaagaaatgggctacattttctaccccagaaaactacgatagcccttatgaaacttaagggtcgaaggtggatttagcagtaaactgagagtagagtgcttagttgaacagggccctgaagcgcgtacacaccgcccgtcaccctcctcaagtatacttcaaaggacatttaactaaaacccctacgcatttatatagaggagacaagtcgtaacatggtaagtgtactggaaagtgcacttggacgaaccagagtgtagcttaacacaaagcacccaacttacacttaggagatttcaacttaacttgaccgctctgagctaaacctagccccaaacccactccaccttactaccagacaaccttagccaaaccatttacccaaataaagtataggcgatagaaattgaaacctggcgcaatagatatagtaccgcaagggaaagatgaaaaattatagccaagcataatatagcaaggactaacccctataccttctgcataatgaattaactagaaataactttgcaaggagagccaaagctaagacccccgaaaccagacgagctacctaagaacagctaaaagagcacacccgtctatgtagcaaaatagtgggaagatttataggtagaggcgacaaacctaccgagcctggtgatagctggttgtccaagatagaatcttagttcaactttaaatttgcccacagaaccctctaaatccccttgtaaatttaactgttagtccaaagaggaacagctctttggacactaggaaaaaaccttgtagagagagtaaaaaatttaacacccatagtaggcctaaaagcagccaccaattaagaaagcgttcaagctcaacacccactacctaaaaaatcccaaacatataactgaactcctcacacccaattggaccaatctatcaccctatagaagaactaatgttagtataagtaacatgaaaacattctcctccgcataagcctgcgtcagattaaaacactgaactgacaattaacagcccaatatctacaatcaaccaacaagtcattattaccctcactgtcaacccaacacaggcatgctcataaggaaaggttaaaaaaagtaaaaggaactcggcaaatcttaccccgcctgtttaccaaaaacatcacctctagcatcaccagtattagaggcaccgcctgcccagtgacacatgtttaacggccgcggtaccctaaccgtgcaaaggtagcataatcacttgttccttaaatagggacctgtatgaatggctccacgagggttcagctgtctcttacttttaaccagtgaaattgacctgcccgtgaagaggcgggcatgacacagcaagacgagaagaccctatggagctttaatttattaatgcaaacagtacctaacaaacccacaggtcctaaactaccaaacctgcattaaaaatttcggttggggcgacctcggagcagaacccaacctccgagcagtacatgctaagacttcaccagtcaaagcgaactactatactcaattgatccaataacttgaccaacggaacaagttaccctagggataacagcgcaatcctattctagagtccatatcaacaatagggtttacgacctcgatgttggatcaggacatcccgatggtgcagccgctattaaaggttcgtttgttcaacgattaaagtcctacgtgatctgagttcagaccggagtaatccaggtcggtttctatctacnttcaaattcctccctgtacgaaaggacaagagaaataaggcctacttcacaaagcgccttcccccgtaaatgatatcatctcaacttagtattatacccacacccacccaagaacagggtttgttaagatggcagagcccggtaatcgcataaaacttaaaactttacagtcagaggttcaattcctcttcttaacaacatacccatggccaacctcctactcctcattgtacccattctaatcgcaatggcattcctaatgcttaccgaacgaaaaattctaggctatatacaactacgcaaaggccccaacgttgtaggcccctacgggctactacaacccttcgctgacgccataaaactcttcaccaaggagcccctaaaacccgccacatctaccatcaccctctacatcaccgccccgaccttagctctcaccatcgctcttctactatgaacccccctccccatacccaaccccctggtcaacctcaacctaggcctcctatttattctagccacctctagcctagccgtttactcaatcctctgatcagggtgagcatcaaactcaaactacgccctgatcggcgcactgcgagcagtagcccaaacaatctcatatgaagtcaccctagccatcattctactatcaacattactaataagtggctcctttaacctctccacccttatcacaacacaagaacacctctgattactcctgccatcatgacccttggccataatatgatttatctccacactagcagagaccaaccgaacccccttcgaccttgccgaaggggagtccgaactagtctcaggcttcaacatcgaatacgccgcaggccccttcgccctattcttcatagccgaatacacaaacattattataataaacaccctcaccactacaatcttcctaggaacaacatatgacgcactctcccctgaactctacacaacatattttgtcaccaagaccctacttctaacctccctgttcttatgaattcgaacagcatacccccgattccgctacgaccaactcatacacctcctatgaaaaaacttcctaccactcaccctagcattacttatatgatatgtctccatacccattacaatctccagcattccccctcaaacctaagaaatatgtctgataaaagagttactttgatagagtaaataataggagcttaaacccccttatttctaggactatgagaatcgaacccatccctgagaatccaaaattctccgtgccacctatcacaccccatcctaaagtaaggtcagctaaataagctatcgggcccataccccgaaaatgttggttatacccttcccgtactaattaatcccctggcccaacccgtcatctactctaccatctttgcaggcacactcatcacagcgctaagctcgcactgattttttacctgagtaggcctagaaataaacatgctagcttttattccagttctaaccaaaaaaataaaccctcgttccacagaagctgccatcaagtatttcctcacgcaagcaaccgcatccataatccttctaatagctatcctcttcaacaatatactctccggacaatgaaccataaccaatactaccaatcaatactcatcattaataatcataatggctatagcaataaaactaggaatagccccctttcacttctgagtcccagaggttacccaaggcacccctctgacatccggcctgcttcttctcacatgacaaaaactagcccccatctcaatcatataccaaatctctccctcactaaacgtaagccttctcctcactctctcaatcttatccatcatagcaggcagttgaggtggattaaaccaaacccagctacgcaaaatcttagcatactcctcaattacccacataggatgaataatagcagttctaccgtacaaccctaacataaccattcttaatttaactatttatattatcctaactactaccgcattcctactactcaacttaaactccagcaccacgaccctactactatctcgcacctgaaacaagctaacatgactaacacccttaattccatccaccctcctctccctaggaggcctgcccccgctaaccggctttttgcccaaatgggccattatcgaagaattcacaaaaaacaatagcctcatcatccccaccatcatagccaccatcaccctccttaacctctacttctacctacgcctaatctactccacctcaatcacactactccccatatctaacaacgtaaaaataaaatgacagtttgaacatacaaaacccaccccattcctccccacactcatcgcccttaccacgctactcctacctatctccccttttatactaataatcttatagaaatttaggttaaatacagaccaagagccttcaaagccctcagtaagttgcaatacttaatttctgtaacagctaaggactgcaaaaccccactctgcatcaactgaacgcaaatcagccactttaattaagctaagcccttactagaccaatgggacttaaacccacaaacacttagttaacagctaagcaccctaatcaactggcttcaatctacttctcccgccgccgggaaaaaaggcgggagaagccccggcaggtttgaagctgcttcttcgaatttgcaattcaatatgaaaatcacctcggagctggtaaaaagaggcctaacccctgtctttagatttacagtccaatgcttcactcagccattttacctcacccccactgatgttcgccgaccgttgactattctctacaaaccacaaagacattggaacactatacctattattcggcgcatgagctggagtcctaggcacagctctaagcctccttattcgagccgagctgggccagccaggcaaccttctaggtaacgaccacatctacaacgttatcgtcacagcccatgcatttgtaataatcttcttcatagtaatacccatcataatcggaggctttggcaactgactagttcccctaataatcggtgcccccgatatggcgtttccccgcataaacaacataagcttctgactcttacctccctctctcctactcctgctcgcatctgctatagtggaggccggagcaggaacaggttgaacagtctaccctcccttagcagggaactactcccaccctggagcctccgtagacctaaccatcttctccttacacctagcaggtgtctcctctatcttaggggccatcaatttcatcacaacaattatcaatataaaaccccctgccataacccaataccaaacgcccctcttcgtctgatccgtcctaatcacagcagtcctacttctcctatctctcccagtcctagctgctggcatcactatactactaacagaccgcaacctcaacaccaccttcttcgaccccgccggaggaggagaccccattctataccaacacctattctgatttttcggtcaccctgaagtttatattcttatcctaccaggcttcggaataatctcccatattgtaacttactactccggaaaaaaagaaccatttggatacataggtatggtctgagctatgatatcaattggcttcctagggtttatcgtgtgagcacaccatatatttacagtaggaatagacgtagacacacgagcatatttcacctccgctaccataatcatcgctatccccaccggcgtcaaagtatttagctgactcgccacactccacggaagcaatatgaaatgatctgctgcagtgctctgagccctaggattcatctttcttttcaccgtaggtggcctgactggcattgtattagcaaactcatcactagacatcgtactacacgacacgtactacgttgtagctcacttccactatgtcctatcaataggagctgtatttgccatcataggaggcttcattcactgatttcccctattctcaggctacaccctagaccaaacctacgccaaaatccatttcactatcatattcatcggcgtaaatctaactttcttcccacaacactttctcggcctatccggaatgccccgacgttactcggactaccccgatgcatacaccacatgaaacatcctatcatctgtaggctcattcatttctctaacagcagtaatattaataattttcatgatttgagaagccttcgcttcgaagcgaaaagtcctaatagtagaagaaccctccataaacctggagtgactatatggatgccccccaccctaccacacattcgaagaacccgtatacataaaatctagacaaaaaaggaaggaatcgaaccccccaaagctggtttcaagccaaccccatggcctccatgactttttcaaaaaggtattagaaaaaccatttcataactttgtcaaagttaaattataggctaaatcctatatatcttaatggcacatgcagcgcaagtaggtctacaagacgctacttcccctatcatagaagagcttatcacctttcatgatcacgccctcataatcattttccttatctgcttcctagtcctgtatgcccttttcctaacactcacaacaaaactaactaatactaacatctcagacgctcaggaaatagaaaccgtctgaactatcctgcccgccatcatcctagtcctcatcgccctcccatccctacgcatcctttacataacagacgaggtcaacgatccctcccttaccatcaaatcaattggccaccaatggtactgaacctacgagtacaccgactacggcggactaatcttcaactcctacatacttcccccattattcctagaaccaggcgacctgcgactccttgacgttgacaatcgagtagtactcccgattgaagcccccattcgtataataattacatcacaagacgtcttgcactcatgagctgtccccacattaggcttaaaaacagatgcaattcccggacgtctaaaccaaaccactttcaccgctacacgaccgggggtatactacggtcaatgctctgaaatctgtggagcaaaccacagtttcatgcccatcgtcctagaattaattcccctaaaaatctttgaaatagggcccgtatttaccctatagcaccccctctaccccctctagagcccactgtaaagctaacttagcattaaccttttaagttaaagattaagagaaccaacacctctttacagtgaaatgccccaactaaatactaccgtatggcccaccataattacccccatactccttacactattcctcatcacccaactaaaaatattaaacacaaactaccacctacctccctcaccaaagcccataaaaataaaaaattataacaaaccctgagaaccaaaatgaacgaaaatctgttcgcttcattcattgcccccacaatcctaggcctacccgccgcagtactgatcattctatttccccctctattgatccccacctccaaatatctcatcaacaaccgactaatcaccacccaacaatgactaatcaaactaacctcaaaacaaatgataaccatacacaacactaaaggacgaacctgatctcttatactagtatccttaatcatttttattgccacaactaacctcctcggactcctgcctcactcatttacaccaaccacccaactatctataaacctagccatggccatccccttatgagcgggcgcagtgattataggctttcgctctaagattaaaaatgccctagcccacttcttaccacaaggcacacctacaccccttatccccatactagttattatcgaaaccatcagcctactcattcaaccaatagccctggccgtacgcctaaccgctaacattactgcaggccacctactcatgcacctaattggaagcaccaccctagcaatatcaaccattaaccttccctctacacttatcatcttcacaattctaattctactgactatcctagaaatcgctgtcgccttaatccaagcctacgttttcacacttctagtaagcctctacctgcacgacaacacataatgacccaccaatcacatgcctatcatatagtaaaacccagcccatgacccctaacaggggccctctcagccctcctaatgacctccggcctagccatgtgatttcacttccactccataacgctcctcatactaggcctactaaccaacacactaaccatataccaatgatggcgcgatgtaacacgagaaagcacataccaaggccaccacacaccacctgtccaaaaaggccttcgatacgggataatcctatttattacctcagaagtttttttcttcgcaggatttttctgagccttttaccactccagcctagcccctaccccccaattaggagggcactggcccccaacaggcatcaccccgctaaatcccctagaagtcccactcctaaacacatccgtattactcgcatcaggagtatcaatcacctgagctcaccatagtctaatagaaaacaaccgaaaccaaataattcaagcactgctcattacaattttactgggtctctattttaccctcctacaagcctcagagtacttcgagtctcccttcaccatttccgacggcatctacggctcaacattttttgtagccacaggcttccacggacttcacgtcattattggctcaactttcctcactatctgcttcatccgccaactaatatttcactttacatccaaacatcactttggcttcgaagccgccgcctgatactggcattttgtagatgtggtttgactatttctgtatgtctccatctattgatgagggtcttactcttttagtataaatagtaccgttaacttccaattaactagttttgacaacattcaaaaaagagtaataaacttcgccttaattttaataatcaacaccctcctagccttactactaataattattacattttgactaccacaactcaacggctacatagaaaaatccaccccttacgagtgcggcttcgaccctatatcccccgcccgcgtccctttctccataaaattcttcttagtagctattaccttcttattatttgatctagaaattgccctccttttacccctaccatgagccctacaaacaactaacctgccactaatagttatgtcatccctcttattaatcatcatcctagccctaagtctggcctatgagtgactacaaaaaggattagactgagccgaattggtatatagtttaaacaaaacgaatgatttcgactcattaaattatgataatcatatttaccaaatgcccctcatttacataaatattatactagcatttaccatctcacttctaggaatactagtatatcgctcacacctcatgtcctccctactatgcctagaaggaataatactatcgctgttcattatagctactctcataaccctcaacacccactccctcttagccaatattgtgcctattgccatactagtctttgccgcctgcgaagcagcggtgggcctagccctactagtctcaatctccaacacatatggcctagactacgtacataacctaaacctactccaatgctaaaactaatcgtcccaacaattatattactaccactgacatgactttccaaaaaacacataatttgaatcaacacaaccacccacagcctaattattagcatcatccctctactattttttaaccaaatcaacaacaacctatttagctgttccccaaccttttcctccgaccccctaacaacccccctcctaatactaactacctgactcctacccctcacaatcatggcaagccaacgccacttatccagtgaaccactatcacgaaaaaaactctacctctctatactaatctccctacaaatctccttaattataacattcacagccacagaactaatcatattttatatcttcttcgaaaccacacttatccccaccttggctatcatcacccgatgaggcaaccagccagaacgcctgaacgcaggcacatacttcctattctacaccctagtaggctcccttcccctactcatcgcactaatttacactcacaacaccctaggctcactaaacattctactactcaccctcactgcccaagaactatcaaactcctgagccaacaacttaatatgactagcttacacaatagcttttatagtaaagatacctctttacggactccacttatgactccctaaagcccatgtcgaagcccccatcgctgggtcaatagtacttgccgcagtactcttgaagctaggcggctatggtataatacgcctcacactcattctcaaccccctgacaaaacacatagcctaccccttccttgtactatccctatgaggcataattataacaagctccatctgcctacgacaaacagacctaaaatcgctcattgcatactcttcaatcagccacatagccctcgtagtaacagccattctcatccaaaccccctgaagcttcaccggcgcagtcattctcataatcgcccacggacttacatcctcattactattctgcctagcaaactcaaactacgaacgcactcacagtcgcatcataatcctctctcaaggacttcaaactctactcccactaatagctttttgatgacttctagcaagcctcgctaacctcgccttaccccccactattaacctactgggagaactctctgtgctagtaaccacattctcctgatcaaatatcactctcctacttacaggactcaacatactagtcacagccctatactccctctacatatttaccacaacacaatggggctcactcacccaccacattaacaacataaaaccctcattcacacgagaaaacaccctcatgttcatacacctatcccccattctcctcctatccctcaaccccgacatcattaccgggttttcctcttgtaaatatagtttaaccaaaacatcagattgtgaatctgacaacagaggcttacgaccccttatttaccgagaaagctcacaagaactgctaactcatgcccccatgtctaacaacatggctttctcaacttttaaaggataacagctatccattggtcttaggccccaagaattttggtgcaactccaaataaaagtaataaccatgcacactactataaccaccctaaccctaacttccctaattccccccatccttaccaccctcgttaaccctaacaaaaaaaactcatacccccattatgtaaaatccattgtcgcatccacctttattatcagtctcttccccacaacaatattcatgtgcctagaccaagaagttattatctcgaactgacactgagccacaacccaaacaacccagctctccctaagcttcaaactagactacttctccataatattcatccctgtagcattgttcgttacatggtccatcatagaattctcactgtgatatataaactcagacccaaacattaatcagttcttcaaatatctactcatcttcctaattaccatactaatcttagttaccgctaacaacctattccaactgttcatcggctgagagggcgtaggaattatatccttcttgctcatcagttgatgatacgcccgagcagatgccaacacagcagccattcaagcaatcctatacaaccgtatcggcgatatcggtttcatcctcgccttagcatgatttatcctacactccaactcatgagacccacaacaaatagcccttctaaacgctaatccaagcctcaccccactactaggcctcctcctagcagcagcaggcaaatcagcccaattaggtctccacccctgactcccctcagccatagaaggccccaccccagtctcagccctactccactcaagcactatagttgtagcaggaatcttcttactcatccgcttccaccccctagcagaaaatagcccactaatccaaactctaacactatgcttaggcgctatcaccactctgttcgcagcagtctgcgcccttacacaaaatgacatcaaaaaaatcgtagccttctccacttcaagtcaactaggactcataatagttacaatcggcatcaaccaaccacacctagcattcctgcacatctgtacccacgccttcttcaaagccatactatttatgtgctccgggtccatcatccacaaccttaacaatgaacaagatattcgaaaaataggaggactactcaaaaccatacctctcacttcaacctccctcaccattggcagcctagcattagcaggaatacctttcctcacaggtttctactccaaagaccacatcatcgaaaccgcaaacatatcatacacaaacgcctgagccctatctattactctcatcgctacctccctgacaagcgcctatagcactcgaataattcttctcaccctaacaggtcaacctcgcttccccacccttactaacattaacgaaaataaccccaccctactaaaccccattaaacgcctggcagccggaagcctattcgcaggatttctcattactaacaacatttcccccgcatcccccttccaaacaacaatccccctctacctaaaactcacagccctcgctgtcactttcctaggacttctaacagccctagacctcaactacctaaccaacaaacttaaaataaaatccccactatgcacattttatttctccaacatactcggattctaccctagcatcacacaccgcacaatcccctatctaggccttcttacgagccaaaacctgcccctactcctcctagacctaacctgactagaaaagctattacctaaaacaatttcacagcaccaaatctccacctccatcatcacctcaacccaaaaaggcataattaaactttacttcctctctttcttcttcccactcatcctaaccctactcctaatcacataacctattcccccgagcaatttcaattacaatatatacaccaacaaacaatgttcaaccagtaactactactaatcaacgcccataatcatacaaagcccccgcaccaataggatcctcccgaatcaaccctgacccctctccttcataaattattcagcttcctacactattaaagtttaccacaaccaccaccccatcatactctttcacccacagcaccaatcctacctccatcgctagccccactaaaacactcaccaagacctcaacccctgacccccatgcctcaggatactcctcaatagccatcgctgtagtatatccaaagacaaccatcattccccctaaataaattaaaaaaactattaaacccatataacctcccccaaaattcagaataataacacacccgaccacaccactaacaatcaatactaaacccccataaataggagaaggcttagaagaaaaccccacaaaccccattactaaacccacactcaacagaaacaaagcatacatcattattctcgcacggactacaaccacgaccaatgatatgaaaaaccatcgttgtatttcaactacaagaacaccaatgaccccaatacgcaaaattaaccccctaataaaattaattaaccactcactcatcgacctccccaccccatccaacatctccgcatgatgaaacttcggctcactccttggcgcctgcctgatcctccaaatcaccacaggactattcctagccatgcactactcaccagacgcctcaaccgccttttcatcaatcgcccacatcactcgagacgtaaattatggctgaatcatccgctaccttcacgccaatggcgcctcaatattctttatctgcctcttcctacacatcgggcgaggcctatattacggatcatttctctactcagaaacctgaaacatcggcattatcctcctgcttgcaactatagcaacagccttcataggctatgtcctcccgtgaggccaaatatcattctgaggggccacagtaattacaaacttactatccgccatcccatacattgggacagacctagttcaatgaatctgaggaggctactcagtagacagtcccaccctcacacgattctttacctttcacttcatcttgcccttcattattgcagccctagcagcactccacctcctattcttgcacgaaacgggatcaaacaaccccctaggaatcacctcccattccgataaaatcaccttccacccttactacacaatcaaagacgccctcggcttacttctcttccttctctccttaatgacattaacactattctcaccagacctcctaggcgacccagacaattataccctagccaaccccttaaacacccctccccacatcaagcccgaatgatatttcctattcgcctacacaattctccgatccgtccctaacaaactaggaggcgtccttgccctattactatccatcctcatcctagcaataatccccatcctccatatatccaaacaacaaagcataatatttcgcccactaagccaatcactttattgactcctagccgcagacctcctcattctaacctgaatcggaggacaaccagtaagctacccttttaccatcattggacaagtagcatccgtactatacttcacaacaatcctaatcctaataccaactatctccctaattgaaaacaaaatactcaaatgggcctgtccttgtagtataaactaatacaccagtcttgtaagccggagatgaaaacctttttccaaggacaaatcagagaaaaagtctttaactccaccattagcacccaaagctaagattctaatttaaactattctctgttctttcatggggaagcagatttgggtaccacccaagtattgactcacccatcaacaaccgctatgtacttcgtacattactgccagccaccatgaatattgtacggtaccataaatacttgaccacctgtagtacataaaaacccaatccacatcaaaaccccctccccatgcttacaagcaagtacagcaatcaacctccaactatcacacatcaactgcaactccaaagccacccctcacccactaggataccaacaaacctacccacccttaacagtacatagcacataaagccatttaccgtacatagcacattacagtcaaatcccttctcgtccccatggatgacccccctcagataggggtcccttgaccaccatcctccgtgaaatcaatatcccgcacaagagtgctactctcctcgctccgggcccataacacttgggggtagctaaagtgaactgtatccgacatctggttcctacttcagggccataaagcctaaatagcccacacgttccccttaaataagacatcacgatg

SEQ ID NO: 117 - DNA, 16570 bp, Homo sapiens mitochondrial
  3108: "n" refers to a nucleotide at position 3107 of the Cambridge Reference Sequence (CRS, Anderson et al. 1981 Nature 290:457-465), later determined to be absent from the human mtDNA sequence according to the revised CRS (rCRS, Andrews et al. 1999 Nature Genetics 23:147); "n" therefore represents a single nucleotide deletion at a position corresponding to nucleotide 3107 of SEQ ID NO:1 as provided herein.
gatcacaggtctatcaccctattaaccactcacgggagctctccatgcatttggtattttcgtctggggggtatgcacgcgatagcattgcgagacgctggagccggagcaccctatgtcgcagtatctgtctttgattcctgcctcatcctattatttatcgcacctacgttcaatattacaggcgaacatacttactaaagtgtgttaattaattaatgcttgtaggacataataataacaattgaatgtctgcacagccgctttccacacagacatcataacaaaaaatttccaccaaaccccccctcccccgccttctggccacagcacttaaacacatctctgccaaaccccaaaaacaaagaaccctaacaccagcctaaccagatttcaaattttatcttttggcggtatgcacttttaacagtcaccccccaactaacacattattttcccctcccactcccatactactaatctcatcaatacaacccccgcccatcctacccagcacacacacaccgctgctaaccccataccccgaaccaaccaaaccccaaagacaccccccacagtttatgtagcttacctcctcaaagcaatacactgaaaatgtttagacgggctcacatcaccccataaacaaataggtttggtcctagcctttctattagctcttagtaagattacacatgcaagcatccccgttccagtgagttcaccctctaaatcaccacgatcaaaagggacaagcatcaagcacgcagcaatgcagctcaaaacgcttagcctagccacacccccacgggaaacagcagtgattaacctttagcaataaacgaaagtttaactaagctatactaaccccagggttggtcaatttcgtgccagccaccgcggtcacacgattaacccaagtcaatagaagccggcgtaaagagtgttttagatcaccccctccccaataaagctaaaactcacctgagttgtaaaaaactccagttgacacaaaatagactacgaaagtggctttaacatatctgaacacacaatagctaagacccaaactgggattagataccccactatgcttagccctaaacctcaacagttaaatcaacaaaactgctcgccagaacactacgagccacagcttaaaactcaaaggacctggcggtgcttcatatccctctagaggagcctgttctgtaatcgataaaccccgatcaacctcaccacctcttgctcagcctatataccgccatcttcagcaaaccctgatgaaggctacaaagtaagcgcaagtacccacgtaaagacgttaggtcaaggtgtagcccatgaggtggcaagaaatgggctacattttctaccccagaaaactacgatagcccttatgaaacttaagggtcgaaggtggatttagcagtaaactgagagtagagtgcttagttgaacagggccctgaagcgcgtacacaccgcccgtcaccctcctcaagtatacttcaaaggacatttaactaaaacccctacgcatttatatagaggagacaagtcgtaacatggtaagtgtactggaaagtgcacttggacgaaccagagtgtagcttaacacaaagcacccaacttacacttaggagatttcaacttaacttgaccgctctgagctaaacctagccccaaacccactccaccttactaccagacaaccttagccaaaccatttacccaaataaagtataggcgatagaaattgaaacctggcgcaatagatatagtaccgcaagggaaagatgaaaaattataaccaagcataatatagcaaggactaacccctataccttctgcataatgaattaactagaaataactttgcaaggagagccaaagctaagacccccgaaaccagacgagctacctaagaacagctaaaagagcacacccgtctatgtagcaaaatagtgggaagatttataggtagaggcgacaaacctaccgagcctggtgatagctggttgtccaagatagaatcttagttcaactttaaatttgcccacagaaccctctaaatccccttgtaaatttaactgttagtccaaagaggaacagctctttggacactaggaaaaaaccttgtagagagagtaaaaaatttaacacccatagtaggcctaaaagcagccaccaattaagaaagcgttcaagctcaacacccactacctaaaaaatcccaaacatataactgaactcctcacacccaattggaccaatctatcaccctatagaagaactaatgttagtataagtaacatgaaaacattctcctccgcataagcctgcgtcagattaaaacactgaactgacaattaacagcccaatatctacaatcaaccaacaagtcattattaccctcactgtcaacccaacacaggcatgctcataaggaaaggttaaaaaaagtaaaaggaactcggcaaatcttaccccgcctgtttaccaaaaacatcacctctagcatcaccagtattagaggcaccgcctgcccagtgacacatgtttaacggccgcggtaccctaaccgtgcaaaggtagcataatcacttgttccttaaatagggacctgtatgaatggctccacgagggttcagctgtctcttacttttaaccagtgaaattgacctgcccgtgaagaggcgggcataacacagcaagacgagaagaccctatggagctttaatttattaatgcaaacagtacctaacaaacccacaggtcctaaactaccaaacctgcattaaaaatttcggttggggcgacctcggagcagaacccaacctccgagcagtacatgctaagacttcaccagtcaaagcgaactactatactcaattgatccaataacttgaccaacggaacaagttaccctagggataacagcgcaatcctattctagagtccatatcaacaatagggtttacgacctcgatgttggatcaggacatcccgatggtgcagccgctattaaaggttcgtttgttcaacgattaaagtcctacgtgatctgagttcagaccggagtaatccaggtcggtttctatctacnttcaaattcctccctgtacgaaaggacaagagaaataaggcctacttcacaaagcgccttcccccgtaaatgatatcatctcaacttagtattatacccacacccacccaagaacagggtttgttaagatggcagagcccggtaatcgcataaaacttaaaactttacagtcagaggttcaattcctcttcttaacaacatacccatggccaacctcctactccttattgtacccattctaatcgcaatggcattcctaatgcttaccgaacgaaaaattctaggctatatacaactacgcaaaggccccaacgttgtaggcccctacgggctactacaacccttcgctgacgccataaaactcttcaccaaagagcccctaaaacccgccacatctaccatcaccctctacatcaccgccccgaccttagctctcaccatcgctcttctactatgaacccccctccccatacccaaccccctggtcaacctcaacctaggcctcctatttattctagccacctctagcctagccgtttactcaatcctctgatcagggtgagcatcaaactcaaactacgccctgatcggcgcactgcgagcagtagcccaaacaatctcatatgaagtcaccctagccatcattctactatcaacattactaataagtggctcctttaacctctccacccttatcacaacacaagaacacctctgattactcctgccatcatgacccttggccataatatgatttatctccacactagcagagaccaaccgaacccccttcgaccttgccgaaggggagtccgaactagtctcaggcttcaacatcgaatacgccgcaggccccttcgccctattcttcatagccgaatacacaaacattattataataaacaccctcaccactacaatcttcctaggaacaacatatgacgcactctcccctgaactctacacaacatattttgtcaccaagaccctacttctaacctccctgttcttatgaattcgaacagcatacccccgattccgctacgaccaactcatacacctcctatgaaaaaacttcctaccactcaccctagcattacttatatgatatgtctccatacccattacaatctccagcattccccctcaaacctaagaaatatgtctgataaaagagttactttgatagagtaaataataggagcttaaacccccttatttctaggactatgagaatcgaacccatccctgagaatccaaaattctccgtgccacctatcacaccccatcctaaagtaaggtcagctaaataagctatcgggcccataccccgaaaatgttggttatacccttcccgtactaattaatcccctggcccaacccgtcatctactctaccatctttgcaggcacactcatcacagcgctaagctcgcactgattttttacctgagtaggcctagaaataaacatgctagcttttattccagttctaaccaaaaaaataaaccctcgttccacagaagctgccatcaagtatttcctcacgcaagcaaccgcatccataatccttctaatagctatcctcttcaacaatatactctccggacaatgaaccataaccaatactaccaatcaatactcatcattaataatcataatggctatagcaataaaactaggaatagccccctttcacttctgagtcccagaggttacccaaggcacccctctgacatccggcctgcttcttctcacatgacaaaaactagcccccatctcaatcatataccaaatctctccctcactaaacgtaagccttctcctcactctctcaatcttatccatcatagcaggcagttgaggtggattaaaccaaacccagctacgcaaaatcttagcatactcctcaattacccacataggatgaataatagcagttctaccgtacaaccctaacataaccattcttaatttaactatttatattatcctaactactaccgcattcctactactcaacttaaactccagcaccacgaccctactactatctcgcacctgaaacaagctaacatgactaacacccttaattccatccaccctcctctccctaggaggcctgcccccgctaaccggctttttgcccaaatgggccattatcgaagaattcacaaaaaacaatagcctcatcatccccaccatcatagccaccatcaccctccttaacctctacttctacctacgcctaatctactccacctcaatcacactactccccatatctaacaacgtaaaaataaaatgacagtttgaacatacaaaacccaccccattcctccccacactcatcgcccttaccacgctactcctacctatctccccttttatactaataatcttatagaaatttaggttaaatacagaccaagagccttcaaagccctcagtaagttgcaatacttaatttctgtaacagctaaggactgcaaaaccccactctgcatcaactgaacgcaaatcagccactttaattaagctaagcccttactagaccaatgggacttaaacccacaaacacttagttaacagctaagcaccctaatcaactggcttcaatctacttctcccgccgccgggaaaaaaggcgggagaagccccggcaggtttgaagctgcttcttcgaatttgcaattcaatatgaaaatcacctcggagctggtaaaaagaggcctaacccctgtctttagatttacagtccaatgcttcactcagccattttacctcacccccactgatgttcgccgaccgttgactattctctacaaaccacaaagacattggaacactatacctattattcggcgcatgagctggagtcctaggcacagctctaagcctccttattcgagccgagctgggccagccaggcaaccttctaggtaacgaccacatctacaacgttatcgtcacagcccatgcatttgtaataatcttcttcatagtaatacccatcataatcggaggctttggcaactgactagttcccctaataatcggtgcccccgatatggcgtttccccgcataaacaacataagcttctgactcttacctccctctctcctactcctgctcgcatctgctatagtggaggccggagcaggaacaggttgaacagtctaccctcccttagcagggaactactcccaccctggagcctccgtagacctaaccatcttctccttacacctagcaggtgtctcctctatcttaggggccatcaatttcatcacaacaattatcaatataaaaccccctgccataacccaataccaaacgcccctcttcgtctgatccgtcctaatcacagcagtcctacttctcctatctctcccagtcctagctgctggcatcactatactactaacagaccgcaacctcaacaccaccttcttcgaccccgccggaggaggagaccccattctataccaacacctattctgatttttcggtcaccctgaagtttatattcttatcctaccaggcttcggaataatctcccatattgtaacttactactccggaaaaaaagaaccatttggatacataggtatggtctgagctatgatatcaattggcttcctagggtttatcgtgtgagcacaccatatatttacagtaggaatagacgtagacacacgagcatatttcacctccgctaccataatcatcgctatccccaccggcgtcaaagtatttagctgactcgccacactccacggaagcaatatgaaatgatctgctgcagtgctctgagccctaggattcatctttcttttcaccgtaggtggcctgactggcattgtattagcaaactcatcactagacatcgtactacacgacacgtactacgttgtagcccacttccactatgtcctatcaataggagctgtatttgccatcataggaggcttcattcactgatttcccctattctcaggctacaccctagaccaaacctacgccaaaatccatttcactatcatattcatcggcgtaaatctaactttcttcccacaacactttctcggcctatccggaatgccccgacgttactcggactaccccgatgcatacaccacatgaaacatcctatcatctgtaggctcattcatttctctaacagcagtaatattaataattttcatgatttgagaagccttcgcttcgaagcgaaaagtcctaatagtagaagaaccctccataaacctggagtgactatatggatgccccccaccctaccacacattcgaagaacccgtatacataaaatctagacaaaaaaggaaggaatcgaaccccccaaagctggtttcaagccaaccccatggcctccatgactttttcaaaaaggtattagaaaaaccatttcataactttgtcaaagttaaattataggctaaatcctatatatcttaatggcacatgcagcgcaagtaggtctacaagacgctacttcccctatcatagaagagcttatcacctttcatgatcacgccctcataatcattttccttatctgcttcctagtcctgtatgcccttttcctaacactcacaacaaaactaactaatactaacatctcagacgctcaggaaatagaaaccgtctgaactatcctgcccgccatcatcctagtcctcatcgccctcccatccctacgcatcctttacataacagacgaggtcaacgatccctcccttaccatcaaatcaattggccaccaatggtactgaacctacgagtacaccgactacggcggactaatcttcaactcctacatacttcccccattattcctagaaccaggcgacctgcgactccttgacgttgacaatcgagtagtactcccgattgaagcccccattcgtataataattacatcacaagacgtcttgcactcatgagctgtccccacattaggcttaaaaacagatgcaattcccggacgtctaaaccaaaccactttcaccgctacacgaccgggggtatactacggtcaatgctctgaaatctgtggagcaaaccacagtttcatgcccatcgtcctagaattaattcccctaaaaatctttgaaatagggcccgtatttaccctatagcaccccctctaccccctctagagcccactgtaaagctaacttagcattaaccttttaagttaaagattaagagaaccaacacctctttacagtgaaatgccccaactaaatactaccgtatggcccaccataattacccccatactccttacactattcctcatcacccaactaaaaatattaaacacaaactaccacctacctccctcaccaaagcccataaaaataaaaaattataacaaaccctgagaaccaaaatgaacgaaaatctgttcgcttcattcattgcccccacaatcctaggcctacccgccgcagtactgatcattctatttccccctctattgatccccacctccaaatatctcatcaacaaccgactaatcaccacccaacaatgactaatcaaactaacctcaaaacaaatgataaccatacacaacactaaaggacgaacctgatctcttatactagtatccttaatcatttttattgccacaactaacctcctcggactcctgcctcactcatttacaccaaccacccaactatctataaacctagccatggccatccccttatgagcgggcgcagtgattataggctttcgctctaagattaaaaatgccctagcccacttcttaccacaaggcacacctacaccccttatccccatactagttattatcgaaaccatcagcctactcattcaaccaatagccctggccgtacgcctaaccgctaacattactgcaggccacctactcatgcacctaattggaagcgccaccctagcaatatcaaccattaaccttccctctacacttatcatcttcacaattctaattctactgactatcctagaaatcgctgtcgccttaatccaagcctacgttttcacacttctagtaagcctctacctgcacgacaacacataatgacccaccaatcacatgcctatcatatagtaaaacccagcccatgacccctaacaggggccctctcagccctcctaatgacctccggcctagccatgtgatttcacttccactccataacgctcctcatactaggcctactaaccaacacactaaccatataccaatgatggcgcgatgtaacacgagaaagcacataccaaggccaccacacaccacctgtccaaaaaggccttcgatacgggataatcctatttattacctcagaagtttttttcttcgcaggatttttctgagccttttaccactccagcctagcccctaccccccaattaggagggcactggcccccaacaggcatcaccccgctaaatcccctagaagtcccactcctaaacacatccgtattactcgcatcaggagtatcaatcacctgagctcaccatagtctaatagaaaacaaccgaaaccaaataattcaagcactgcttattacaattttactgggtctctattttaccctcctacaagcctcagagtacttcgagtctcccttcaccatttccgacggcatctacggctcaacattttttgtagccacaggcttccacggacttcacgtcattattggctcaactttcctcactatctgcttcatccgccaactaatatttcactttacatccaaacatcactttggcttcgaagccgccgcctgatactggcattttgtagatgtggtttgactatttctgtatgtctccatctattgatgagggtcttactcttttagtataaatagtaccgttaacttccaattaactagttttgacaacattcaaaaaagagtaataaacttcgccttaattttaataatcaacaccctcctagccttactactaataattattacattttgactaccacaactcaacggctacatagaaaaatccaccccttacgagtgcggcttcgaccctatatcccccgcccgcgtccctttctccataaaattcttcttagtagctattaccttcttattatttgatctagaaattgccctccttttacccctaccatgagccctacaaacaactaacctgccactaatagttatgtcatccctcttattaatcatcatcctagccctaagtctggcctatgagtgactacaaaaaggattagactgaaccgaattggtatatagtttaaacaaaacgaatgatttcgactcattaaattatgataatcatatttaccaaatgcccctcatttacataaatattatactagcatttaccatctcacttctaggaatactagtatatcgctcacacctcatatcctccctactatgcctagaaggaataatactatcgctgttcattatagctactctcataaccctcaacacccactccctcttagccaatattgtgcctattgccatactagtctttgccgcctgcgaagcagcggtgggcctagccctactagtctcaatctccaacacatatggcctagactacgtacataacctaaacctactccaatgctaaaactaatcgtcccaacaattatattactaccactgacatgactttccaaaaaacacataatttgaatcaacacaaccacccacagcctaattattagcatcatccctctactattttttaaccaaatcaacaacaacctatttagctgttccccaaccttttcctccgaccccctaacaacccccctcctaatactaactacctgactcctacccctcacaatcatggcaagccaacgccacttatccagtgaaccactatcacgaaaaaaactctacctctctatactaatctccctacaaatctccttaattataacattcacagccacagaactaatcatattttatatcttcttcgaaaccacacttatccccaccttggctatcatcacccgatgaggcaaccagccagaacgcctgaacgcaggcacatacttcctattctacaccctagtaggctcccttcccctactcatcgcactaatttacactcacaacaccctaggctcactaaacattctactactcactctcactgcccaagaactatcaaactcctgagccaacaacttaatatgactagcttacacaatagcttttatagtaaagatacctctttacggactccacttatgactccctaaagcccatgtcgaagcccccatcgctgggtcaatagtacttgccgcagtactcttaaaactaggcggctatggtataatacgcctcacactcattctcaaccccctgacaaaacacatagcctaccccttccttgtactatccctatgaggcataattataacaagctccatctgcctacgacaaacagacctaaaatcgctcattgcatactcttcaatcagccacatagccctcgtagtaacagccattctcatccaaaccccctgaagcttcaccggcgcagtcattctcataatcgcccacgggcttacatcctcattactattctgcctagcaaactcaaactacgaacgcactcacagtcgcatcataatcctctctcaaggacttcaaactctactcccactaatagctttttgatgacttctagcaagcctcgctaacctcgccttaccccccactattaacctactgggagaactctctgtgctagtaaccacgttctcctgatcaaatatcactctcctacttacaggactcaacatactagtcacagccctatactccctctacatatttaccacaacacaatggggctcactcacccaccacattaacaacataaaaccctcattcacacgagaaaacaccctcatgttcatacacctatcccccattctcctcctatccctcaaccccgacatcattaccgggttttcctcttgtaaatatagtttaaccaaaacatcagattgtgaatctgacaacagaggcttacgaccccttatttaccgagaaagctcacaagaactgctaactcatgcccccatgtctaacaacatggctttctcaacttttaaaggataacagctatccattggtcttaggccccaaaaattttggtgcaactccaaataaaagtaataaccatgcacactactataaccaccctaaccctgacttccctaattccccccatccttaccaccctcgttaaccctaacaaaaaaaactcatacccccattatgtaaaatccattgtcgcatccacctttattatcagtctcttccccacaacaatattcatgtgcctagaccaagaagttattatctcgaactgacactgagccacaacccaaacaacccagctctccctaagcttcaaactagactacttctccataatattcatccctgtagcattgttcgttacatggtccatcatagaattctcactgtgatatataaactcagacccaaacattaatcagttcttcaaatatctactcatcttcctaattaccatactaatcttagttaccgctaacaacctattccaactgttcatcggctgagagggcgtaggaattatatccttcttgctcatcagttgatgatacgcccgagcagatgccaacacagcagccattcaagcaatcctatacaaccgtatcggcgatatcggtttcatcctcgccttagcatgatttatcctacactccaactcatgagacccacaacaaatagcccttctaaacgctaatccaagcctcaccccactactaggcctcctcctagcagcagcaggcaaatcagcccaattaggtctccacccctgactcccctcagccatagaaggccccaccccagtctcagccctactccactcaagcactatagttgtagcaggaatcttcttactcatccgcttccaccccctagcagaaaatagcccactaatccaaactctaacactatgcttaggcgctatcaccactctgttcgcagcagtctgcgcccttacacaaaatgacatcaaaaaaatcgtagccttctccacttcaagtcaactaggactcataatagttacaatcggcatcaaccaaccacacctagcattcctgcacatctgtacccacgccttcttcaaagccatactatttatgtgctccgggtccatcatccacaaccttaacaatgaacaagatattcgaaaaataggaggactactcaaaaccatacctctcacttcaacctccctcaccattggcagcctagcattagcaggaatacctttcctcacaggtttctactccaaagaccacatcatcgaaaccgcaaacatatcatacacaaacgcctgagccctatctattactctcatcgctacctccctgacaagcgcctatagcactcgaataattcttctcaccctaacaggtcaacctcgcttccccacccttactaacattaacgaaaataaccccaccctactaaaccccattaaacgcctggcagccggaagcctattcgcaggatttctcattactaacaacatttcccccgcatcccccttccaaacaacaatccccctctacctaaaactcacagccctcgctgtcactttcctaggacttctaacagccctagacctcaactacctaaccaacaaacttaaaataaaatccccactatgcacattttatttctccaacatactcggattctaccctagcatcacacaccgcacaatcccctatctaggccttcttacgagccaaaacctgcccctactcctcctagacctaacctgactagaaaagctattacctaaaacaatttcacagcaccaaatctccacctccatcatcacctcaacccaaaaaggcataattaaactttacttcctctctttcttcttcccactcatcctaaccctactcctaatcacataacctattcccccgagcaatctcaattacaatatatacaccaacaaacaatgttcaaccagtaactactactaatcaacgcccataatcatacaaagcccccgcaccaataggatcctcccgaatcaaccctgacccctctccttcataaattattcagcttcctacactattaaagtttaccacaaccaccaccccatcatactctttcacccacagcaccaatcctacctccatcgctaaccccactaaaacactcaccaagacctcaacccctgacccccatgcctcaggatactcctcaatagccatcgctgtagtatatccaaagacaaccatcattccccctaaataaattaaaaaaactattaaacccatataacctcccccaaaattcagaataataacacacccgaccacaccgctaacaatcaatactaaacccccataaataggagaaggcttagaagaaaaccccacaaaccccattactaaacccacactcaacagaaacaaagcatacatcattattctcgcacggactacaaccacgaccaatgatatgaaaaaccatcgttgtatttcaactacaagaacaccaatgaccccaatacgcaaaactaaccccctaataaaattaattaaccactcattcatcgacctccccaccccatccaacatctccgcatgatgaaacttcggctcactccttggcgcctgcctgatcctccaaatcaccacaggactattcctagccatgcactactcaccagacgcctcaaccgccttttcatcaatcgcccacatcactcgagacgtaaattatggctgaatcatccgctaccttcacgccaatggcgcctcaatattctttatctgcctcttcctacacatcgggcgaggcctatattacggatcatttctctactcagaaacctgaaacatcggcattatcctcctgcttgcaactatagcaacagccttcataggctatgtcctcccgtgaggccaaatatcattctgaggggccacagtaattacaaacttactatccgccatcccatacattgggacagacctagttcaatgaatctgaggaggctactcagtagacagtcccaccctcacacgattctttacctttcacttcatcttgcccttcattattgcagccctagcagcactccacctcctattcttgcacgaaacgggatcaaacaaccccctaggaatcacctcccattccgataaaatcaccttccacccttactacacaatcaaagacgccctcggcttacttctcttccttctctccttaatgacattaacactattctcaccagacctcctaggcgacccagacaattataccctagccaaccccttaaacacccctccccacatcaagcccgaatgatatttcctattcgcctacacaattctccgatccgtccctaacaaactaggaggcgtccttgccctattactatccatcctcatcctagcaataatccccatcctccatatatccaaacaacaaagcataatatttcgcccactaagccaatcactttattgactcctagccgcagacctcctcattctaacctgaatcggagggcaaccagtaagctacccttttaccatcattggacaagtagcatccgtactatacttcacaacaatcctaatcctaataccaactatctccctaattgaaaacaaaatactcaaatgggcctgtccttgtagtataaactaatacaccagtcttgtaaaccggagatgaaaacctttttccaaggacaaatcagagaaaaagtctttaactccaccattagcacccaaagctaagattctaatttaaactattctctgttctttcatggggaagcagatttgggtaccacccaagtattgactcacccatcaacaaccgctatgtatttcgtacattactgccagccaccatgaatattgtacggtaccataaatacttgaccacctgtagtacataaaaacccaatccacatcaaaaccccctccccatgcttacaagcaagtacagcaatcaaccctcaactatcacacatcaactgcaactccaaagccacctctcacccactaggataccaacaaacctacccgcccttaacagtacatagtacataaagccatttaccgtacatagcacattacagtcaaatcccttctcgtccccatggatgacccccctcagataggggtcccttgaccaccatcctccgtgaaatcaatatcccgcacaagagtgctactctcctcgctccgggcccataacacttgggggtagctaaagtgaactgtatccgacatctggttcctacttcagggccataaagcctaaatagcccacacgttccccttaaataagacatcacgatg

SEQ ID NO: 118 - DNA, 16561 bp, Homo sapiens mitochondrial
  3108: "n" refers to a nucleotide at position 3107 of the Cambridge Reference Sequence (CRS, Anderson et al. 1981 Nature 290:457-465), later determined to be absent from the human mtDNA sequence according to the revised CRS (rCRS, Andrews et al. 1999 Nature Genetics 23:147); "n" therefore represents a single nucleotide deletion at a position corresponding to nucleotide 3107 of SEQ ID NO:1 as provided herein.
gatcacaggtctatcaccctattaaccactcacgggagctctccatgcatttggtattttcgtctgggggggatgcacgcgatagcattgcgagacgctggagccggagcaccctatgtcgcagtatctgtctttgattcctgcctcatcccattatttatcgcacctacgttcaatattacaggcgaacatacttactaaagtgtgttaattaattaatgcttgtaggacataataataacaattgaatgtctgcacagccgctttccacacagacatcataacaaaaaatttccaccaaaccccccctcccccgccttctggccacagcacttaaacacatctctgccaaaccccaaaaacaaagaaccctaacaccagcctaaccagatttcaaattttatcttttggcggtatgcacttttaacagtcaccccccaactaacacattattttcccctcccactcccatactactaatctcatcaatacaacccccgcccatcctacccagcacacacacaccgctgctaaccccataccccgaaccaaccaaaccccaaagacaccccccacagtttatgtagcttacctcctcaaagcaatacactgaaaatgtttagacgggctcacatcaccccataaacaaataggtttggtcctagcctttctattagctcttagtaagattacacatgcaagcatccccgttccagtgagttcaccctctaaatcaccacgatcaaaagggacaagcatcaagcacgcagcaatgcagctcaaaacgcttagcctagccacacccccacgggaaacagcagtgattaacctttagcaataaacgaaagtttaactaagctatactaaccccagggttggtcaatttcgtgccagccaccgcggtcacacgattaacccaagtcaatagaagccggcgtaaagagtgttttagatcaccccctccccaataaagctaaaactcacctgagttgtaaaaaactccagttgacacaaaatagactacgaaagtggctttaacatatctgaacacacaatagctaagacccaaactgggattagataccccactatgcttagccctaaacctcaacagttaaatcaacaaaactgctcgccagaacactacgagccacagcttaaaactcaaaggacctggcggtgcttcatatccctctagaggagcctgttctgtaatcgataaaccccgatcaacctcaccacctcttgctcagcctatataccgccatcttcagcaaaccctgatgaaggctacaaagtaagcgcaagtacccacgtaaagacgttaggtcaaggtgtagcccatgaggtggcaagaaatgggctacattttctaccccagaaaactacgatagcccttatgaaacttaagggtcgaaggtggatttagcagtaaactgagagtagagtgcttagttgaacagggccctgaagcgcgtacacaccgcccgtcaccctcctcaagtatacttcaaaggacatttaactaaaacccctacgcatttatatagaggagacaagtcgtaacatggtaagtgtactggaaagtgcacttggacgaaccagagtgtagcttaacacaaagcacccaacttacacttaggagatttcaacttaacttgaccgctctgagctaaacctagccccaaacccactccaccttactaccagacaaccttagccaaaccatttacccaaataaagtataggcgatagaaattgaaacctggcgcaatagatatagtaccgcaagggaaagatgaaaaattataaccaagcataatatagcaaggactaacccctataccttctgcataatgaattaactagaaataactttgcaaggagagccaaagctaagacccccgaaaccagacgagctacctaagaacagctaaaagagcacacccgtctatgtagcaaaatagtgggaagatttataggtagaggcgacaaacctaccgagcctggtgatagctggttgtccaagatagaatcttagttcaactttaaatttgcccacagaaccctctaaatccccttgtaaatttaactgttagtccaaagaggaacagctctttggacactaggaaaaaaccttgtagagagagtaaaaaatttaacacccatagtaggcctaaaagcagccaccaattaagaaagcgttcaagctcaacacccactacctaaaaaatcccaaacatataactgaactcctcacacccaattggaccaatctatcaccctatagaagaactaatgttagtataagtaacatgaaaacattctcctccgcataagcctgcgtcagattaaaacactgaactgacaattaacagcccaatatctacaatcaaccaacaagtcattattaccctcactgtcaacccaacacaggcatgctcataaggaaaggttaaaaaaagtaaaaggaactcggcaaatcttaccccgcctgtttaccaaaaacatcacctctagcatcaccagtattagaggcaccgcctgcccagtgacacatgtttaacggccgcggtaccctaaccgtgcaaaggtagcataatcacttgttccttaaatagggacctgtatgaatggctccacgagggttcagctgtctcttacttttaaccagtgaaattgacctgcccgtgaagaggcgggcataacacagcaagacgagaagaccctatggagctttaatttattaatgcaaacagtacctaacaaacccacaggtcctaaactaccaaacctgcattaaaaatttcggttggggcgacctcggagcagaacccaacctccgagcagtacatgctaagacttcaccagtcaaagcgaactactatactcaattgatccaataacttgaccaacggaacaagttaccctagggataacagcgcaatcctattctagagtccatatcaacaatagggtttacgacctcgatgttggatcaggacatcccgatggtgcagccgctattaaaggttcgtttgttcaacgattaaagtcctacgtgatctgagttcagaccggagtaatccaggtcggtttctatctacnttcaaattcctccctgtacgaaaggacaagagaaataaggcctacttcacaaagcgccttcccccgtaaatgatatcatctcaacttagtattatacccacacccacccaagaacagggtttgttaagatggcagagcccggtaatcgcataaaacttaaaactttacagtcagaggttcaattcctcttcttaacaacatacccatggccaacctcctactcctcattgtacccattctaatcgcaatggcattcctaatgcttaccgaacgaaaaattctaggctatatacaactacgcaaaggccccaacgttgtaggcccctacgggctactacaacccttcgctgacgccataaaactcttcaccaaagagcccctaaaacccgccacatctaccatcaccctctacatcaccgccccgaccttagctctcaccatcgctcttctactatgaacccccctccccatacccaaccccctggtcaacctcaacctaggcctcctatttattctagccacctctagcctagccgtttactcaatcctctgatcagggtgagcatcaaactcaaactacgccctgatcggcgcactgcgagcagtagcccaaacaatctcatatgaagtcaccctagccatcattctactatcaacattactaataagtggctcctttaacctctccacccttatcacaacacaagaacacctctgattactcctgccatcatgacccttggccataatatgatttatctccacactagcagagaccaaccgaacccccttcgaccttgccgaaggggagtccgaactagtctcaggcttcaacatcgaatacgccgcaggccccttcgccctattcttcatagccgaatacacaaacattattataataaacaccctcaccactacaatcttcctaggaacaacatatgacgcactctcccctgaactctacacaacatattttgtcaccaagaccctacttctaacctccctgttcttatgaattcgaacagcatacccccgattccgctacgaccaactcatacacctcctatgaaaaaacttcctaccactcaccctagcattacttatatgatatgtctccatacccattacaatctccagcattccccctcaaacctaagaaatatgtctgataaaagagttactttgatagagtaaataataggagcttaaacccccttatttctaggactatgagaatcgaacccatccctgagaatccaaaattctccgtgccacctatcacaccccatcctaaagtaaggtcagctaaataagctatcgggcccataccccgaaaatgttggttatacccttcccgtactaattaatcccctggcccaacccgtcatctactctaccatctttgcaggcacactcatcacagcgctaagctcgcactgattttttacctgagtaggcctagaaataaacatgctagcttttattccagttctaaccaaaaaaataaaccctcgttccacagaagctgccatcaagtatttcctcacgcaagcaaccgcatccataatccttctaatagctatcctcttcaacaatatactctccggacaatgaaccataaccaatactaccaatcaatactcatcattaataatcataatggctatagcaataaaactaggaatagccccctttcacttctgagtcccagaggttacccaaggcacccctctgacatccggcctgcttcttctcacatgacaaaaactagcccccatctcaatcatataccaaatctctccctcactaaacgtaagccttctcctcactctctcaatcttatccatcatagcaggcagttgaggtggattaaaccaaacccagctacgcaaaatcttagcatactcctcaattacccacataggatgaataatagcagttctaccgtacaaccctaacataaccattcttaatttaactatttatattatcctaactactaccgcattcctactactcaacttaaactccagcaccacgaccctactactatctcgcacctgaaacaagctaacatgactaacacccttaattccatccaccctcctctccctaggaggcctgcccccgctaaccggctttttgcccaaatgggccattatcgaagaattcacaaaaaacaatagcctcatcatccccaccatcatagccaccatcaccctccttaacctctacttctacctacgcctaatctactccacctcaatcacactactccccatatctaacaacgtaaaaataaaatgacagtttgaacatacaaaacccaccccattcctccccacactcatcgcccttaccacgctactcctacctatctccccttttatactaataatcttatagaaatttaggttaaatacagaccaagagccttcaaagccctcagtaagttgcaatacttaatttctgtaacagctaaggactgcaaaaccccactctgcatcaactgaacgcaaatcagccactttaattaagctaagcccttactagaccaatgggacttaaacccacaaacacttagttaacagctaagcaccctaatcaactggcttcaatctacttctcccgccgccgggaaaaaaggcgggagaagccccggcaggtttgaagctgcttcttcgaatttgcaattcaatatgaaaatcacctcggagctggtaaaaagaggcctaacccctgtctttagatttacagtccaatgcttcactcagccattttacctcacccccactgatgttcgccgaccgttgactattctctacaaaccacaaagacattggaacactatacctattattcggcgcatgagctggagtcctaggcacagctctaagcctccttattcgagccgagctgggccagccaggcaaccttctaggtaacgaccacatctacaacgttatcgtcacagcccatgcatttgtaataatcttcttcatagtaatacccatcataatcggaggctttggcaactgactagttcccctaataatcggtgcccccgatatggcgtttccccgcataaacaacataagcttctgactcttacctccctctctcctactcctgctcgcatctgctatagtggaggccggagcaggaacaggttgaacagtctaccctcccttagcagggaactactcccaccctggagcctccgtagacctaaccatcttctccttacacctagcaggtgtctcctctatcttaggggccatcaatttcatcacaacaattatcaatataaaaccccctgccataacccaataccaaacgcccctcttcgtctgatccgtcctaatcacagcagtcctacttctcctatctctcccagtcctagctgctggcatcactatactactaacagaccgcaacctcaacaccaccttcttcgaccccgccggaggaggagaccccattctataccaacacctattctgatttttcggtcaccctgaagtttatattcttatcctaccaggcttcggaataatctcccatattgtaacttactactccggaaaaaaagaaccatttggatacataggtatggtctgagctatgatatcaattggcttcctagggtttatcgtgtgagcacaccatatatttacagtaggaatagacgtagacacacgagcatatttcacctccgctaccataatcatcgctatccccaccggcgtcaaagtatttagctgactcgccacactccacggaagcaatatgaaatgatctgctgcagtgctctgagccctaggattcatctttcttttcaccgtaggtggcctgactggcattgtattagcaaactcatcactagacatcgtactacacgacacgtactacgttgtagcccacttccactatgtcctatcaataggagctgtatttgccatcataggaggcttcattcactgatttcccctattctcaggctacaccctagaccaaacctacgccaaaatccatttcactatcatattcatcggcgtaaatctaactttcttcccacaacactttctcggcctatccggaatgccccgacgttactcggactaccccgatgcatacaccacatgaaacatcctatcatctgtaggctcattcatttctctaacagcagtaatattaataattttcatgatttgagaagccttcgcttcgaagcgaaaagtcctaatagtagaagaaccctccataaacctggagtgactatatggatgccccccaccctaccacacattcgaagaacccgtatacataaaatctagacaaaaaaggaaggaatcgaaccccccaaagctggtttcaagccaaccccatggcctccatgactttttcaaaaaggtattagaaaaaccatttcataactttgtcaaagttaaattataggctaaatcctatatatcttaatggcacatgcagcgcaagtaggtctacaagacgctacttcccctatcatagaagagcttatcacctttcatgatcacgccctcataatcattttccttatctgcttcctagtcctgtatgcccttttcctaacactcacaacaaaactaactaatactaacatctcagacgctcaggaaatagaaaccgtctgaactatcctgcccgccatcatcctagtcctcatcgccctcccatccctacgcatcctttacataacagacgaggtcaacgatccctcccttaccatcaaatcaattggccaccaatggtactgaacctacgagtacaccgactacggcggactaatcttcaactcctacatacttcccccattattcctagaaccaggcgacctgcgactccttgacgttgacaatcgagtagtactcccgattgaagcccccattcgtataataattacatcacaagacgtcttgcactcatgagctgtccccacattaggcttaaaaacagatgcaattcccggacgtctaaaccaaaccactttcaccgctacacgaccgggggtatactacggtcaatgctctgaaatctgtggagcaaaccacagtttcatgcccatcgtcctagaattaattcccctaaaaatctttgaaatagggcccgtatttaccctatagcaccccctctagagcccactgtaaagctaacttagcattaaccttttaagttaaagattaagagaaccaacacctctttacagtgaaatgccccaactaaatactaccgtatggcccaccataattacccccatactccttacactattcctcatcacccaactaaaaatattaaacacaaactaccacctacctccctcaccaaagcccataaaaataaaaaattataacaaaccctgagaaccaaaatgaacgaaaatctgttcgcttcattcattgcccccacaatcctaggcctacccgccgcagtactgatcattctatttccccctctattgatccccacctccaaatatctcatcaacaaccgactaatcaccacccaacaatgactaatcaaactaacctcaaaacaaatgataaccatacacaacactaaaggacgaacctgatctcttatactagtatccttaatcatttttattgccacaactaacctcctcggactcctgcctcactcatttacaccaaccacccaactatctataaacctagccatggccatccccttatgagcgggcgcagtgattataggctttcgctctaagattaaaaatgccctagcccacttcttaccacaaggcacacctacaccccttatccccatactagttattatcgaaaccatcagcctactcattcaaccaatagccctggccgtacgcctaaccgctaacattactgcaggccacctactcatgcacctaattggaagcgccaccctagcaatatcaaccattaaccttccctctacacttatcatcttcacaattctaattctactgactatcctagaaatcgctgtcgccttaatccaagcctacgttttcacacttctagtaagcctctacctgcacgacaacacataatgacccaccaatcacatgcctatcatatagtaaaacccagcccatgacccctaacaggggccctctcagccctcctaatgacctccggcctagccatgtgatttcacttccactccataacgctcctcatactaggcctactaaccaacacactaaccatataccaatgatggcgcgatgtaacacgagaaagcacataccaaggccaccacacaccacctgtccaaaaaggccttcgatacgggataatcctatttattacctcagaagtttttttcttcgcaggatttttctgagccttttaccactccagcctagcccctaccccccaattaggagggcactggcccccaacaggcatcaccccgctaaatcccctagaagtcccactcctaaacacatccgtattactcgcatcaggagtatcaatcacctgagctcaccatagtctaatagaaaacaaccgaaaccaaataattcaagcactgcttattacaattttactgggtctctattttaccctcctacaagcctcagagtacttcgagtctcccttcaccatttccgacggcatctacggctcaacattttttgtagccacaggcttccacggacttcacgtcattattggctcaactttcctcactatctgcttcatccgccaactaatatttcactttacatccaaacatcactttggcttcgaagccgccgcctgatactggcattttgtagatgtggtttgactatttctgtatgtctccatctattgatgagggtcttactcttttagtataaatagtaccgttaacttccaattaactagttttgacaacattcaaaaaagagtaataaacttcgccttaattttaataatcaacaccctcctagccttactactaataattattacattttgactaccacaactcaacggctacatagaaaaatccaccccttacgagtgcggcttcgaccctatatcccccgcccgcgtccctttctccataaaattcttcttagtagctattaccttcttattatttgatctagaaattgccctccttttacccctaccatgagccctacaaacaactaacctgccactaatagttatgtcatccctcttattaatcatcatcctagccctaagtctggcctatgagtgactacaaaaaggattagactgaaccgaattggtatatagtttaaacaaaacgaatgatttcgactcattaaattatgataatcatatttaccaaatgcccctcatttacataaatattatactagcatttaccatctcacttctaggaatactagtatatcgctcacacctcatatcctccctactatgcctagaaggaataatactatcgctgttcattatagctactctcataaccctcaacacccactccctcttagccaatattgtgcctattgccatactagtctttgccgcctgcgaagcagcggtgggcctagccctactagtctcaatctccaacacatatggcctagactacgtacataacctaaacctactccaatgctaaaactaatcgtcccaacaattatattactaccactgacatgactttccaaaaaacacataatttgaatcaacacaaccacccacagcctaattattagcatcatccctctactattttttaaccaaatcaacaacaacctatttagctgttccccaaccttttcctccgaccccctaacaacccccctcctaatactaactacctgactcctacccctcacaatcatggcaagccaacgccacttatccagtgaaccactatcacgaaaaaaactctacctctctatactaatctccctacaaatctccttaattataacattcacagccacagaactaatcatattttatattttcttcgaaaccacacttatccccaccttggctatcatcacccgatgaggcaaccagccagaacgcctgaacgcaggcacatacttcctattctacaccctagtaggctcccttcccctactcatcgcactaatttacactcacaacaccctaggctcactaaacattctactactcactctcactgcccaagaactatcaaactcctgagccaacaacttaatatgactagcttacacaatagcttttatagtaaagatacctctttacggactccacttatgactccctaaagcccatgtcgaagcccccatcgctgggtcaatagtacttgccgcagtactcttaaaactaggcggctatggtataatacgcctcacactcattctcaaccccctgacaaaacacatagcctaccccttccttgtactatccctatgaggcataattataacaagctccatctgcctacgacaaacagacctaaaatcgctcattgcatactcttcaatcagccacatagccctcgtagtaacagccattctcatccaaaccccctgaagcttcaccggcgcagtcattctcataatcgcccacgggcttacatcctcattactattctgcctagcaaactcaaactacgaacgcactcacagtcgcatcataatcctctctcaaggacttcaaactctactcccactaatagctttttgatgacttctagcaagcctcgctaacctcgccttaccccccactattaacctactgggagaactctctgtgctagtaaccacgttctcctgatcaaatatcactctcctacttacaggactcaacatactagtcacagccctatactccctctacatatttaccacaacacaatggggctcactcacccaccacattaacaacataaaaccctcattcacacgagaaaacaccctcatgttcatacacctatcccccattctcctcctatccctcaaccccgacatcattaccgggttttcctcttgtaaatatagtttaaccaaaacatcagattgtgaatctgacaacagaggcttacgaccccttatttaccgagaaagctcacaagaactgctaactcatgcccccatgtctaacaacatggctttctcaacttttaaaggataacagctatccattggtcttaggccccaaaaattttggtgcaactccaaataaaagtaataaccatgcacactactataaccaccctaaccctgacttccctaattccccccatccttaccaccctcgttaaccctaacaaaaaaaactcatacccccattatgtaaaatccattgtcgcatccacctttattatcagtctcttccccacaacaatattcatgtgcctagaccaagaagttattatctcgaactgacactgagccacaacccaaacaacccagctctccctaagcttcaaactagactacttctccataatattcatccctgtagcattgttcgttacatggtccatcatagaattctcactgtgatatataaactcagacccaaacattaatcagttcttcaaatatctactcatcttcctaattaccatactaatcttagttaccgctaacaacctattccagctgttcatcggctgagagggcgtaggaattatatccttcttgctcatcagttgatgatacgcccgagcagatgccaacacagcagccattcaagcaatcctatacaaccgtatcggcgatatcggtttcatcctcgccttagcatgatttatcctacactccaactcatgagacccacaacaaatagcccttctaaacgctaatccaagcctcaccccactactaggcctcctcctagcagcagcaggcaaatcagcccaattaggtctccacccctgactcccctcagccatagaaggccccaccccagtctcagccctactccactcaagcactatagttgtagcaggaatcttcttactcatccgcttccaccccctagcagaaaatagcccactaatccaaactctaacactatgcttaggcgctatcaccactctgttcgcagcagtctgcgcccttacacaaaatgacatcaaaaaaatcgtagccttctccacttcaagtcaactaggactcataatagttacaatcggcatcaaccaaccacacctagcattcctgcacatctgtacccacgccttcttcaaagccatactatttatgtgctccgggtccatcatccacaaccttaacaatgaacaagatattcgaaaaataggaggactactcaaaaccatacctctcacttcaacctccctcaccattggcagcctagcattagcaggaatacctttcctcacaggtttctactccaaagaccacatcatcgaaaccgcaaacatatcatacacaaacgcctgagccctatctattactctcatcgctacctccctgacaagcgcctatagcactcgaataattcttctcaccctaacaggtcaacctcgcttccccacccttactaacattaacgaaaataaccccaccctactaaaccccattaaacgcctggcagccggaagcctattcgcaggatttctcattactaacaacatttcccccgcatcccccttccaaacaacaatccccctctacctaaaactcacagccctcgctgtcactttcctaggacttctaacagccctagacctcaactacctaaccaacaaacttaaaataaaatccccactatgcacattttatttctccaacatactcggattctaccctagcatcacacaccgcacaatcccctatctaggccttcttacgagccaaaacctgcccctactcctcctagacctaacctgactagaaaagctattacctaaaacaatttcacagcaccaaatctccacctccatcatcacctcaacccaaaaaggcataattaaactttacttcctctctttcttcttcccactcatcctaaccctactcctaatcacataacctattcccccgagcaatctcaattacaatatatacaccaacaaacaatgttcaaccagtaactactactaatcaacgcccataatcatacaaagcccccgcaccaataggatcctcccgaatcaaccctgacccctctccttcataaattattcagcttcctacactattaaagtttaccacaaccaccaccccatcatactctttcacccacagcaccaatcctacctccatcgctaaccccactaaaacactcaccaagacctcaacccctgacccccatgcctcaggatactcctcaatagccatcgctgtagtatatccaaagacaaccatcatcccccctaaataaattaaaaaaactattaaacccatataacctcccccaaaattcagaataataacacacccgaccacaccgctaacaatcaatactaaacccccataaataggagaaggcttagaagaaaaccccacaaaccccattactaaacccacactcaacagaaacaaagcatacatcattattctcgcacggactacaaccacgaccaatgatatgaaaaaccatcgttgtatttcaactacaagaacaccaatgaccccaatacgcaaaactaaccccctaataaaattaattaaccactcattcatcgacctccccaccccatccaacatctccgcatgatgaaacttcggctcactccttggcgcctgcctgatcctccaaatcaccacaggactattcctagccatgcactactcaccagacgcctcaaccgccttttcatcaatcgcccacatcactcgagacgtaaattatggctgaatcatccgctaccttcacgccaatggcgcctcaatattctttatctgcctcttcctacacatcgggcgaggcctatattacggatcatttctctactcagaaacctgaaacatcggcattatcctcctgcttgcaactatagcaacagccttcataggctatgtcctcccgtgaggccaaatatcattctgaggggccacagtaattacaaacttactatccgccatcccatacattgggacagacctagttcaatgaatctgaggaggctactcagtagacagtcccaccctcacacgattctttacctttcacttcatcttgcccttcattattgcagccctagcagcactccacctcctattcttgcacgaaacgggatcaaacaaccccctaggaatcacctcccattccgataaaatcaccttccacccttactacacaatcaaagacgccctcggcttacttctcttccttctctccttaatgacattaacactattctcaccagacctcctaggcgacccagacaattataccctagccaaccccttaaacacccctccccacatcaagcccgaatgatatttcctattcgcctacacaattctccgatccgtccctaacaaactaggaggcgtccttgccctattactatccatcctcatcctagcaataatccccatcctccatatatccaaacaacaaagcataatatttcgcccactaagccaatcactttattgactcctagccgcagacctcctcattctaacctgaatcggaggacaaccagtaagctacccttttaccatcattggacaagtagcatccgtactatacttcacaacaatcctaatcctaataccaactatctccctaattgaaaacaaaatactcaaatgggcctgtccttgtagtataaactaatacaccagtcttgtaaaccggagatgaaaacctttttccaaggacaaatcagagaaaaagtctttaactccaccattagcacccaaagctaagattctaatttaaactattctctgttctttcatggggaagcagatttgagtaccacccaagtattgactcacccatcaacaaccgctatgtatttcgtacattactgccagccaccatgaatattgtacggtaccataaatacttgaccacctgtagtacataaaaacccaatccacatcaaaaccccctccccatgcttacaagcaagtacagcaatcaaccctcaactatcacacatcaactgcaactccaaagccacccctcacccactaggataccaacaaacctacccacccttaacagtacatagtacataaagccatttaccgtacatagcacattacagtcaaatcccttctcgtccccatggatgacccccctcagataggggtcccttgaccaccatcctccgtgaaatcaatatcccgcacaagagtgctactctcctcgctccgggcccataacacttgggggtagctaaagtgaactgtatccggcatctggttcctacttcagggccataaagcctaaatagcccacacgttccccttaaataagacatcacgatg

SEQ ID NO: 119 - DNA, 16570 bp, Homo sapiens mitochondrial
  3108: "n" refers to a nucleotide at position 3107 of the Cambridge Reference Sequence (CRS, Anderson et al. 1981 Nature 290:457-465), later determined to be absent from the human mtDNA sequence according to the revised CRS (rCRS, Andrews et al. 1999 Nature Genetics 23:147); "n" therefore represents a single nucleotide deletion at a position corresponding to nucleotide 3107 of SEQ ID NO:1 as provided herein.
gatcacaggtctatcaccctattaaccactcacgggagctctccatgcatttggtattttcgtctggggggtgtgcacgcgatagcattgcgagacgctggagccggagcaccctatgtcgcagtatctgtctttgattcctgcctcattctattatttatcgcacctacgttcaatattacaggcgaacatacttactaaagtgtgttaattaattaatgcttgtaggacataataataacaattgaatgtctgcacagccgctttccacacagacatcataacaaaaaatttccaccaaaccccccctcccccgccttctggccacagcacttaaacacatctctgccaaaccccaaaaacaaagaaccctaacaccagcctaaccagatttcaaattttatcttttggcggtatgcacttttaacagtcaccccccaactaacacattattttcccctcccactcccatactactaatctcatcaatacaacccccgcccatcctacccagcacacacacaccgctgctaaccccataccccgaaccaaccaaaccccaaagacaccccccacagtttatgtagcttacctcctcaaagcaatacactgaaaatgtttagacgggctcacatcaccccataaacaaataggtttggtcctagcctttctattagctcttagtaagattacacatgcaagcatccccgttccagtgagttccccctctaaatcaccacgatcaaaagggacaagcatcaagcacgcagcaatgcagctcaaaacgcttagcctagccacacccccacgggaaacagcagtgattaacctttagcaataaacgaaagtttaactaagctatactaaccccagggttggtcaatttcgtgccagccaccgcggtcacacgattaacccaagtcaatagaagccggcgtaaagagtgttttagatcaccccctccccaataaagctaaaactcacctgagttgtaaaaaactccagttgacacaaaatagactacgaaagtggctttaacatatctgaacacacaatagctaagacccaaactgggattagataccccactatgcttagccctaaacctcaacagttaaatcaacaaaactgctcgccagaacactacgagccacagcttaaaactcaaaggacctggcggtgcttcatatccctctagaggagcctgttctgtaatcgataaaccccgatcaacctcaccacctcttgctcagcctatataccgccatcttcagcaaaccctgatgaaggctacaaagtaagcgcaagtacccacgtaaagacgttaggtcaaggtgtagcccatgaggtggcaagaaatgggctacattttctaccccagaaaactacgatagcccttatgaaacttaagggtcgaaggtggatttagcagtaaactgagagtagagtgcttagttgaacagggccctgaagcgcgtacacaccgcccgtcaccctcctcaagtatacttcaaaggacatttaactaaaacccctacgcatttatatagaggagacaagtcgtaacatggtaagtgtactggaaagtgcacttggacgaaccagagtgtagcttaacacaaagcacccaacttacacttaggagatttcaacttaacttgaccgctctgagctaaacctagccccaaacccactccaccttactaccagacaaccttagccaaaccatttacccaaataaagtataggcgatagaaattgaaacctggcgcaatagatatagtaccgcaagggaaagatgaaaaattatagccaagcataatatagcaaggactaacccctataccttctgcataatgaattaactagaaataactttgcaaggagagccaaagctaagacccccgaaaccagacgagctacctaagaacagctaaaagagcacacccgtctatgtagcaaaatagtgggaagatttataggtagaggcgacaaacctaccgagcctggtgatagctggttgtccaagatagaatcttagttcaactttaaatttgcccacagaaccctctaaatccccttgtaaatttaactgttagtccaaagaggaacagctctttggacactaggaaaaaaccttgtagagagagtaaaaaatttaacacccatagtaggcctaaaagcagccaccaattaagaaagcgttcaagctcaacacccactacctaaaaaatcccaaacatataactgaactcctcacacccaattggaccaatctatcaccctatagaagagctaatgttagtataagtaacatgaaaacattctcctccgcataagcctgcgtcagattaaaacactgaactgacaattaacagcccaatatctacaatcaaccaacaagtcattattaccctcactgtcaacccaacacaggcatgctcataaggaaaggttaaaaaaagtaaaaggaactcggcaaatcttaccccgcctgtttaccaaaaacatcacctctagcatcaccagtattagaggcaccgcctgcccagtgacacatgtttaacggccgcggtaccctaaccgtgcaaaggtagcataatcacttgttccttaaatagggacctgtatgaatggctccacgagggttcagctgtctcttacttttaaccagtgaaattgacctgcccgtgaagaggcgggcatgacacagcaagacgagaagaccctatggagctttaatttattaatgcaaacagtacctaacaaacccacaggtcctaaactaccaaacctgcattaaaaatttcggttggggcgacctcggagcagaacccaacctccgagcagtacatgctaagacttcaccagtcaaagcgaactactatactcaattgatccaataacttgaccaacggaacaagttaccctagggataacagcgcaatcctattctagagtccatatcaacaatagggtttacgacctcgatgttggatcaggacatcccaatggtgcagccgctattaaaggttcgtttgttcaacgattaaagtcctacgtgatctgagttcagaccggagtaatccaggtcggtttctatctacnttcaaattcctccctgtacgaaaggacaagagaaataaggcctacttcacaaagcgccttcccccgtaaatgatatcatctcaacttagtattatacccacacccacccaagaacagggtttgttaagatggcagagcccggtaatcgcataaaacttaaaactttacagtcagaggttcaattcctcttcttaacaacatacccatggccaacctcctactcctcattgtacccattctaatcgcaatggcattcctaatgcttaccgaacgaaaaattctaggctatatacaactacgcaaaggccccaacgttgtaggcccctacgggctactacaacccttcgctgacgccataaaactcttcaccaaagagcccctaaaacccgccacatctaccatcaccctctacatcaccgccccgaccttagctctcaccatcgctcttctactatgaacccccctccccatacccaaccccctggtcaacctcaacctaggcctcctatttattctagccacctctagcctagccgtttactcaatcctctgatcagggtgagcatcaaactcaaactacgccctgatcggcgcactgcgagcagtagcccaaacaatctcatatgaagtcaccctagccatcattctactatcaacattactaataagtggctcctttaacctctccacccttatcacaacacaagaacacctctgattactcctgccatcatgacccttggccataatatgatttatctccacactagcagagaccaaccgaacccccttcgaccttgccgaaggggagtccgaactagtctcaggcttcaacatcgaatacgccgcaggccccttcgccctattcttcatagccgaatacacaaacattattataataaacaccctcaccactacaatcttcctaggaacaacatatgacgcactctcccctgaactctacacaacatattttgtcaccaagaccctacttctaacctccctgttcttatgaattcgaacagcatacccccgattccgctacgaccaactcatacacctcctatgaaaaaacttcctaccactcaccctagcattacttatatgatatgtctccatacccattacaatctccagcattccccctcaaacctaagaaatatgtctgataaaagagttactttgatagagtaaataataggagcttaaacccccttatttctaggactatgagaatcgaacccatccctgagaatccaaaattctccgtgccacctatcacaccccatcctaaagtaaggtcagctaaataagctatcgggcccataccccgaaaatgttggttatacccttcccgtactaattaatcccctggcccaacccgtcatctactctaccatctttgcaggcacactcatcacagcgctaagctcgcactgattttttacctgagtaggcctagaaataaacatgctagcttttattccagttctaaccaaaaaaataaaccctcgttccacagaagctgccatcaagtatttcctcacgcaagcaaccgcatccataatccttctaatagctatcctcttcaacaacatactctccggacaatgaaccataaccaatactaccaatcaatactcatcattaataatcataatggctatagcaataaaactaggaatagccccctttcacttctgagtcccagaggttacccaaggcacccctctgacatccggcctgcttcttctcacatgacaaaaactagcccccatctcaatcatataccaaatctctccctcactaaacgtaagccttctcctcactctctcaatcttatccatcatagcaggcagttgaggtggattaaaccaaacccagctacgcaaaatcttagcatactcctcaattacccacataggatgaataatagcagttctaccgtacaaccctaacataaccattcttaatttaactatttatattatcctaactactaccgcattcctactactcaacttaaactccagcaccacgaccctactactatctcgcacctgaaacaagctaacatgactaacacccttaattccatccaccctcctctccctaggaggcctgcccccgctaaccggctttttgcccaaatgggccattatcgaagaattcacaaaaaacaatagcctcatcatccccaccatcatagccaccatcaccctccttaacctctacttctacctacgcctaatctactccacctcaatcacactactccccatatctaacaacgtaaaaataaaatgacagtttgaacatacaaaacccaccccattcctccccacactcatcgcccttaccacgctactcctacctatctccccttttatactaataatcttatagaaatttaggttaaatacagaccaagagccttcaaagccctcagtaagttgcaatacttaatttctgtaacagctaaggactgcaaaaccccactctgcatcaactgaacgcaaatcagccactttaattaagctaagcccttactagaccaatgggacttaaacccacaaacacttagttaacagctaagcaccctaatcaactggcttcaatctacttctcccgccgccgggaaaaaaggcgggagaagccccggcaggtttgaagctgcttcttcgaatttgcaattcaatatgaaaatcacctcggagctggtaaaaagaggcctaacccctgtctttagatttacagtccaatgcttcactcagccattttacctcacccccactgatgttcgccgaccgttgactattctctacaaaccacaaagacattggaacactatacctattattcggcgcatgagctggagtcctaggcacagctctaagcctccttattcgagccgagctgggccagccaggcaaccttctaggtaacgaccacatctacaacgttatcgtcacagcccatgcatttgtaataatcttcttcatagtaatacccatcataatcggaggctttggcaactgactagttcccctaataatcggtgcccccgatatggcgtttccccgcataaacaacataagcttctgactcttacctccctctctcctactcctgctcgcatctgctatagtggaggccggagcaggaacaggttgaacagtctaccctcccttagcagggaactactcccaccctggagcctccgtagacctaaccatcttctccttacacctagcaggtgtctcctctatcttaggggccatcaatttcatcacaacaattatcaatataaaaccccctgccataacccaataccaaacgcccctcttcgtctgatccgtcctaatcacagcagtcctacttctcctatatctcccagtcctagctgctggtatcactatactactaacagaccgcaacctcaacaccaccttcttcgaccccgccggaggaggagaccccattctataccaacacctattctgatttttcggtcaccctgaagtttatattcttatcctaccaggcttcggaataatctcccatattgtaacttactactccggaaaaaaagaaccatttggatacatgggtatggtctgagctatgatatcaattggcttcctagggtttatcgtgtgagcacaccatatatttacagtaggaatagacgtagacacacgagcatatttcacctccgctaccataatcatcgctatccccaccggcgtcaaagtatttagctgactcgccacactccacggaagcaatatgaaatgatctgctgcagtgctctgagccctaggattcatctttcttttcaccgtaggtggcctgactggcattgtattagcaaactcatcactagacatcgtactacacgacacgtactacgttgtagctcacttccactatgtcctatcaataggagctgtatttgccatcataggaggcttcattcactgatttcccctattctcaggctacaccctagaccaaacctacgccaaaatccatttcactatcatattcatcggcgtaaatctaactttcttcccacaacactttctcggcctatccggaatgccccgacgttactcggactaccccgatgcatacaccacatgaaacatcctatcatctgtaggctcattcatttctctaacagcagtaatattaataattttcatgatttgagaagccttcgcttcgaagcgaaaagtcctaatagtagaagaaccctccataaacctggagtgactatatggatgccccccaccctaccacacattcgaagaacccgtatacataaaatctagacaaaaaaggaaggaatcgaaccccccaaagctggtttcaagccaaccccatggcctccatgactttttcaaaaaggtattagaaaaaccatttcataactttgtcaaagttaaattataggctaaatcctatatatcttaatggcacatgcagcgcaagtaggtctacaagacgctacttcccctatcatagaagagcttatcacctttcatgatcacgccctcataatcattttccttatctgcttcctagtcctgtatgcccttttcctaacactcacaacaaaactaactaatactaacatctcagacgctcaggaaatagaaaccgtctgaactatcctgcccgccatcatcctagtcctcatcgccctcccatccctacgcatcctttacataacagacgaggtcaacgatccctcccttaccatcaaatcaattggccaccaatggtactgaacctacgagtacaccgactacggcggactaatcttcaactcctacatacttcccccattattcctagaaccaggcgacctgcgactccttgacgttgacaatcgagtagtactcccgattgaagcccccattcgtataataattacatcacaagacgtcttgcactcatgagctgtccccacattaggcttaaaaacagatgcaattcccggacgtctaaaccaaaccactttcaccgctacacgaccgggggtatactacggtcaatgctctgaaatctgtggagcaaaccacagtttcatgcccatcgtcctagaattaattcccctaaaaatctttgaaatagggcccgtatttaccctatagcaccccctctaccccctctagagcccactgtaaagctaacttagcattaaccttttaagttaaagattaagagaaccaacacctctttacagtgaaatgccccaactaaatactaccgtatggcccaccataattacccccatactccttacactattcctcatcacccaactaaaaatattaaacacaaactaccacctacctccctcaccaaagcccataaaaataaaaaattataacaaaccctgagaaccaaaatgaacgaaaatctgttcgcttcattcattgcccccacaatcctaggcctacccgccgcagtactgatcattctatttccccctctattgatccccacctccaaatatctcatcaacaaccgactaatcaccacccaacaatgactaatcaaactaacctcaaaacaaatgataaccatacacaacactaaaggacgaacctgatctcttatactagtatccttaatcatttttattgccacaactaacctcctcggactcctgcctcactcatttacaccaaccacccaactatctataaacctagccatggccatccccttatgagcgggcgcagtgattataggctttcgctctaagattaaaaatgccctagcccacttcttaccacaaggcacacctacaccccttatccccatactagttattatcgaaaccatcagcctactcattcaaccaatagccctggccgtacgcctaaccgctaacattactgcaggccacctactcatgcacctaattggaagcgccaccctagcaatatcaaccattaaccttccctctacacttatcatcttcacaattctaattctactgactatcctagaaatcgctgtcgccttaatccaagcctacgttttcacacttctagtaagcctctacctgcacgacaacacataatgacccaccaatcacatgcctatcatatagtaaaacccagcccatgacccctaacaggagccctctcagccctcctaatgacctccggcctagccatgtgatttcacttccactccataacgctcctcatactaggcctactaaccaacacactaaccatataccaatgatggcgcgatgtaacacgagaaagcacataccaaggccaccacacaccacctgtccaaaaaggccttcgatacgggataatcctatttattacctcagaagtttttttcttcgcaggatttttctgagccttttaccactccagcctagcccctaccccccaattaggagggcactggcccccaacaggcatcaccccgctaaatcccctagaagtcccactcctaaacacatccgtattactcgcatcaggagtatcaatcacctgagctcaccatagtctaatagaaaacaaccgaaaccaaataattcaagcactgcttattacaattttactgggtctctattttaccctcctacaagcctcagagtacttcgagtctcccttcaccatttccgacggcatctacggctcaacattttttgtagccacaggcttccacggacttcacgtcattattggctcaactttcctcactatctgcttcatccgccaactaatatttcactttacatccaaacatcactttggcttcgaagccgccgcctgatactggcattttgtagatgtggtttgactatttctgtatgtctccatctattgatgagggtcttactcttttagtataaatagtaccgttaacttccaattaactagttttgacaacattcaaaaaagagtaataaacttcgccttaattttaataatcaacaccctcctagccttactactaataattattacattttgactaccacaactcaacggctacatagaaaaatccaccccttacgagtgcggcttcgaccctatatcccccgcccgcgtccctttctccataaaattcttcttagtagctattaccttcttattatttgatctagaaattgccctccttttacccctaccatgagccctacaaacaactaacctgccactaatagttatgtcatccctcttattaatcatcatcctagccctaagtctggcctatgagtgactacaaaaaggattagactgaaccgaattggtatatagtttaaacaaaacgaatgatttcgactcattaaattatgataatcatatttaccaaatgcccctcatttacataaatattatactagcatttgccatctcacttctaggaatactagtatatcgctcacacctcatatcctccctactatgcctagaaggaataatactatcgctgttcattatagctactctcataaccctcaacacccactccctcttagccaatattgtgcctattgccatactagtctttgccgcctgcgaagcagcggtgggcctagccctactagtctcaatctccaacacatatggcctagactacgtacataacctaaacctactccaatgctaaaactaatcgtcccaacaattatattactaccactgacatgactttccaaaaaacacataatttgaatcaacacaaccacccacagcctaattattagcatcatccctctactattttttaaccaaatcaacaacaacctatttagctgttccccaaccttttcctccgaccccctaacaacccccctcctaatactaactacctgactcctacccctcacaatcatggcaagccaacgccacttatccagtgaaccactatcacgaaaaaaactctacctctctatactaatctccctacaaatctccttaattataacattcacagccacagaactaatcatattttatatcttcttcgaaaccacacttatccccaccttggctatcatcacccgatgaggcaaccagccagaacgcctgaacgcaggcacatacttcctattctacaccctagtaggctcccttcccctactcatcgcactaatttacactcacaacaccctaggctcactaaacattctactactcactctcactgcccaagaactatcaaactcctgagccaacaacttaatatgactagcttacacaatagcttttatagtaaagatacctctttacggactccacttatgactccctaaagcccatgtcgaagcccccatcgctgggtcaatagtacttgccgcagtactcttgaaactaggcggctatggtataatacgcctcacactcattctcaaccccctgacaaaacacatagcctaccccttccttgtactatccctatgaggcataattataacaagctccatctgcctacgacaaacagacctaaaatcgctcattgcatactcttcaatcagccacatagccctcgtagtaacagccattctcatccaaaccccctgaagcttcaccggcgcagtcattctcataatcgcccacggacttacatcctcattactattctgcctagcaaactcaaactacgaacgcactcacagtcgcatcataatcctctctcaaggacttcaaactctactcccactaatagctttttgatgacttctagcaagcctcgctaacctcgccttaccccccactattaacctactgggagaactctctgtgctagtaaccacgttctcctgatcaaatatcactctcctacttacaggactcaacatactagtcacagccctatactccctctacatatttaccacaacacaatggggctcactcacccaccacattaacaacataaaaccctcattcacacgagaaaacaccctcatgttcatacacctatcccccattctcctcctatccctcaaccccgacatcattaccgggttttcctcttgtaaatatagtttaaccaaaacatcagattgtgaatctgacaacagaggcttacgaccccttatttaccgagaaagctcacaagaactgctaactcatgcccccatgtctaacaacatggctttctcaacttttaaaggataacagctatccattggtcttaggccccaagaattttggtgcaactccaaataaaagtaataaccatgcacactactataaccaccctaaccctaacttccctaattccccccatccttaccaccctcgttaaccctaacaaaaaaaactcatacccccattatgtaaaatccattgtcgcatccacctttattatcagtctcttccccacaacaatattcatgtgcctagaccaagaagttattatctcgaactgacactgagccacaacccaaacaacccagctctccctaagcttcaaactagactacttctccataatattcatccctgtagcattgttcgttacatggtccatcatagaattctcactgtgatatataaactcagacccaaacattaatcagttcttcaaatatctactcatcttcctaattaccatactaatcttagttaccgctaacaacctattccaactgttcatcggctgagagggcgtaggaattatatccttcttgctcatcagttgatgatacgcccgagcagatgccaacacagcagccattcaagcaatcctatacaaccgtatcggcgatatcggtttcatcctcgccttagcatgatttatcctacactccaactcatgagacccacaacaaatagcccttctaaacgctaatccaagcctcaccccactactaggcctcctcctagcagcagcaggcaaatcagcccaattaggtctccacccctgactcccctcagccatagaaggccccaccccagtctcagccctactccactcaagcactatagttgtagcaggaatcttcttactcatccgcttccaccccctagcagaaaatagcccactaatccaaactctaacactatgcttaggcgctatcaccactctgttcgcagcagtctgcgcccttacacaaaatgacatcaaaaaaatcgtagccttctccacttcaagtcaactaggactcataatagttacaatcggcatcaaccaaccacacctagcattcctgcacatctgtacccacgccttcttcaaagccatactatttatgtgctccgggtccatcatccacaaccttaacaatgaacaagatattcgaaaaataggaggactactcaaaaccatacctctcacttcaacctccctcaccattggcagcctagcattagcaggaatacctttcctcacaggtttctactccaaagaccacatcatcgaaaccgcaaacatatcatacacaaacgcctgagccctatctattactctcatcgctacctccctgacaagcgcctatagcactcgaataattcttctcaccctaacaggtcaacctcgcttccccacccttactaacattaacgaaaataaccccaccctactaaaccccattaaacgcctggcagccggaagcctattcgcaggatttctcattactaacaacatttcccccgcatcccccttccaaacaacaatccccctctacctaaaactcacagccctcgctgtcactttcctaggacttctaacagccctagacctcaactacctaaccaacaaacttaaaataaaatccccactatgcacattttatttctccaacatactcggattctaccctagcatcatacaccgcacaatcccctatctaggccttcttacgagccaaaacctgcccctactcctcctagacctaacctgactagaaaagctattacctaaaacaatttcacagcaccaaatctccacctccatcatcacctcaacccaaaaaggcataattaaactttacttcctctctttcttcttcccactcatcctaaccctactcctgatcacataacctattcccccgagcaatctcaattacaatatatacaccaacaaacaatgttcaaccagtaactactactaatcaacgcccataatcatacaaagcccccgcaccaataggatcctcccgaatcaaccctgacccctctccttcataaattattcagcttcctacactattaaagtttaccacaaccaccaccccatcatactctttcacccacagcaccaatcctacctccatcgctaaccccactaaaacactcaccaagacctcaacccctgacccccatgcctcaggatactcctcaatagccatcgctgtagtatatccaaagacaaccatcattccccctaaataaattaaaaaaactattaaacccatataacctcccccaaaattcagaataataacacacccgaccacaccgctaacaatcaatactaaacccccataaataggagaaggcttagaagaaaaccccacaaaccccattactaaacccacactcaacagaaacaaagcatacatcattattctcgcacggactacaaccacgaccaatgatatgaaaaaccatcgttgtatttcaactacaagaacaccaatgaccccaatacgcaaaattaaccccctaataaaattaattaaccactcattcatcgacctccccaccccatccaacatctccgcatgatgaaacttcggctcactccttggcgcctgcctgatcctccaaatcaccacaggactattcctagccatgcactactcaccagacgcctcaaccgccttttcatcaatcgcccacatcactcgagacgtaaattatggctgaatcatccgctaccttcacgccaatggcgcctcaatattctttatctgcctcttcctacacatcgggcgaggcctatattacggatcatttctctactcagaaacctgaaacatcggcattatcctcctgcttgcaactatagcaacagccttcataggctatgtcctcccgtgaggccaaatatcattctgaggggccacagtaattacaaacttactatccgccatcccatacattgggacagacctagttcaatgaatctgaggaggctactcagtagacagtcccaccctcacacgattctttacctttcacttcatcttgcccttcattattgcagccctagcagcactccacctcctattcttgcacgaaacgggatcaaacaaccccctaggaatcacctcccattccgataaaatcaccttccacccttactacacaatcaaagacgccctcggcttacttctcttcctcctctccttaatgacattaacactattctcaccagacctcctaggcgacccagacaattataccctagccaaccccttaaacacccctccccacatcaagcccgaatgatatttcctattcgcctacacaattctccgatccgtccctaacaaactaggaggcgtccttgccctattactatccatcctcatcctagcaataatccccatcctccatatatccaaacaacaaagcataatatttcgcccactaagccaatcactttattgactcctagccgcagacctcctcattctaacctgaatcggaggacaaccagtaagctacccttttaccatcattggacaagtagcatccgtactatacttcacaacaatcctaatcctaataccaactatctccctaattgaaaacaaaatactcaaatgggcctgtccttgtagtataaactaatacaccagtcttgtaaaccggagatgaaaacctttttccaaggacaaatcagagaaaaagtctttaactccaccattagcacccaaagctaagattctaatttaaactattctctgttctttcatggggaagcagatttgggtaccacccaagtattgactcacccatcaacaaccgctatgtatttcgtacattactgccagccaccatgaatattgtacggtaccataaatacttgaccacctgtagtacataaaaacccaatccacatcaaaaccccctccccatgcttacaagcaagtacagcaatcaaccctcaactatcacacatcaactgcaactccaaagccacccctcacccactaggataccaacaaacctacccacccttaacagtacatagtacataaagccatttaccgtacatagcacattgcagtcaaatcccttctcgtccccatggatgacccccctcagataggagtcccttgaccaccatcctccgtgaaatcaatatcccgcacaagagtgctactctcctcgctccgggcccataacacttgggggtagctaaagtgaactgtatccgacatctggttcctacttcagggccataaagcctaaatagcccacacgttccccttaaataagacatcacgatg

SEQ ID NO: 120 - DNA, 16570 bp, Homo sapiens mitochondrial
  3108: "n" refers to a nucleotide at position 3107 of the Cambridge Reference Sequence (CRS, Anderson et al. 1981 Nature 290:457-465), later determined to be absent from the human mtDNA sequence according to the revised CRS (rCRS, Andrews et al. 1999 Nature Genetics 23:147); "n" therefore represents a single nucleotide deletion at a position corresponding to nucleotide 3107 of SEQ ID NO:1 as provided herein.
gatcacaggtctatcaccctattaaccactcacgggagctctccatgcatttggtattttcgtctggggggtatgcacgcgatagcattgcgagacgctggagccggagcaccctatgtcgcagtatctgtctttgattcctgcctcatcctattatttatcgcacctacgttcaatattacaggcgaacatacttactaaagtgtgttaattaattaatgcttgtaggacataataataacaattgaatgtctgcacagccgctttccacacagacatcataacaaaaaatttccaccaaaccccccctcccccgccttctggccacagcacttaaacacatctctgccaaaccccaaaaacaaagaaccctaacaccagcctaaccagatttcaaattttatcttttggcggtatgcacttttaacagtcaccccccaactaacacattatttttccctcccactcccatactactaatctcatcaatacaacccccgcccatcctacccagcacacacacaccgctgctaaccccataccccgaaccaaccaaaccccaaagacaccccccacagtttatgtagcttacctcctcaaagcaatacactgaaaatgtttagacgggctcacatcaccccataaacaaataggtttggtcctagcctttctattagctcttagtaagattacacatgcaagcatccccgttccagtgagttcaccctctaaatcaccacgatcaaaagggacaagcatcaagcacgcagcaatgcagctcaaaacgcttagcctagccacacccccacgggaaacagcagtgattaacctttagcaataaacgaaagtttaactaagctatactaaccccagggttggtcaatttcgtgccagccaccgcggtcacacgattaacccaagtcaatagaagccggcgtaaagagtgttttagatcaccccctccccaataaagctaaaactcacctgagttgtaaaaaactccagttgacacaaaatagactacgaaagtggctttaacatatctgaacacacaatagctaagacccaaactgggattagataccccactatgcttagccctaaacctcaacagttaaatcaacaaaactgctcgccagaacactacgagccacagcttaaaactcaaaggacctggcggtgcttcatatccctctagaggagcctgttctgtaatcgataaaccccgatcaacctcaccacctcttgctcagcctatataccgccatcttcagcaaaccctgatgaaggctacaaagtaagcgcaagtacccacgtaaagacgttaggtcaaggtgtagcccatgaggtggcaagaaatgggctacattttctaccccagaaaactacgatagcccttatgaaacttaagggtcgaaggtggatttagcagtaaactgagagtagagtgcttagttgaacagggccctgaagcgcgtacacaccgcccgtcaccctcctcaagtatacttcaaaggacatttaactaaaacccctacgcatttatatagaggagacaagtcgtaacatggtaagtgtactggaaagtgcacttggacgaaccagagtgtagcttaacacaaagcacccaacttacacttaggagatttcaacttaacttgaccgctctgagctaaacctagccccaaacccactccaccttactaccagacaaccttagccaaaccatttacccaaataaagtataggcgatagaaattgaaacctggcgcaatagatatagtaccgcaagggaaagatgaaaaattataaccaagcataatatagcaaggactaacccctataccttctgcataatgaattaactagaaataactttgcaaggagagccaaagctaagacccccgaaaccagacgagctacctaagaacagctaaaagagcacacccgtctatgtagcaaaatagtgggaagatttataggtagaggcgacaaacctaccgagcctggtgatagctggttgtccaagatagaatcttagttcaactttaaatttgcccacagaaccctctaaatccccttgtaaatttaactgttagtccaaagaggaacagctctttggacactaggaaaaaaccttgtagagagagtaaaaaatttaacacccatagtaggcctaaaagcagccaccaattaagaaagcgttcaagctcaacacccactacctaaaaaatcccaaacatataactgaactcctcacacccaattggaccaatctatcaccctatagaagaactaatgttagtataagtaacatgaaaacattctcctccgcataagcctgcgtcagattaaaacactgaactgacaattaacagcccaatatctacaatcaaccaacaagtcattattaccctcactgtcaacccaacacaggcatgctcataaggaaaggttaaaaaaagtaaaaggaactcggcaaatcttaccccgcctgtttaccaaaaacatcacctctagcatcaccagtattagaggcaccgcctgcccagtgacacatgtttaacggccgcggtaccctaaccgtgcaaaggtagcataatcacttgttccttaaatagggacctgtatgaatggctccacgagggttcagctgtctcttacttttaaccagtgaaattgacctgcccgtgaagaggcgggcataacacagcaagacgagaagaccctatggagctttaatttattaatgcaaacagtacctaacaaacccacaggtcctaaactaccaaacctgcattaaaaatttcggttggggcgacctcggagcagaacccaacctccgagcagtacatgctaagacttcaccagtcaaagcgaactactatactcaattgatccaataacttgaccaacggaacaagttaccctagggataacagcgcaatcctattctagagtccatatcaacaatagggtttacgacctcgatgttggatcaggacatcccgatggtgcagccgctattaaaggttcgtttgttcaacgattaaagtcctacgtgatctgagttcagaccggagtaatccaggtcggtttctatctacnttcaaattcctccctgtacgaaaggacaagagaaataaggcctacttcacaaagcgccttcccccgtaaatgatatcatctcaacttagtattatacccacacccacccaagaacagggtttgttaagatggcagagcccggtaatcgcataaaacttaaaactttacagtcagaggttcaattcctcttcttaacaacatacccatggccaacctcctactcctcattgtacccattctaatcgcaatggcattcctaatgcttaccgaacgaaaaattctaggctatatacaactacgcaaaggccccaacgttgtaggcccctacgggctactacaacccttcgctgacgccataaaactcttcaccaaagagcccctaaaacccgccacatctaccatcaccctctacatcaccgccccgaccttagctctcaccatcgctcttctactatgaacccccctccccatacccaaccccctggtcaacctcaacctaggcctcctatttattctagccacctctagcctagccgtttactcaatcctctgatcagggtgagcatcaaactcaaactacgccctgatcggcgcactgcgagcagtagcccaaacaatctcatatgaagtcaccctagccatcatcctactatcaacattactaataagtggctcctttaacctctccacccttatcacaacacaagaacacctctgattactcctgccatcatgacccttggccataatatgatttatctccacactagcagagaccaaccgaacccccttcgaccttgccgaaggggagtccgaactagtctcaggcttcaacatcgaatacgccgcaggccccttcgccctattcttcatagccgaatacacaaacattattataataaacaccctcaccactacaatcttcctaggaacaacatatgacgcactctcccctgaactctacacaacatattttgtcaccaagaccctacttctaacctccctgttcttatgaattcgaacagcatacccccgattccgctacgaccaactcatgcacctcctatgaaaaaacttcctaccactcaccctagcattacttatatgatatgtctccatacccattacaatctccagcattccccctcaaacctaagaaatatgtctgataaaagagttactttgatagagtaaataataggagcttaaacccccttatttctaggaccatgagaatcgaacccatccctgagaatccaaaattctccgtgccacctatcacaccccatcctaaagtaaggtcagctaaataagctatcgggcccataccccgaaaatgttggttatacccttcccgtactaattaatcccctggcccaacccgtcatctactctaccatctttgcaggcacactcatcacagcgctaagctcgcactgattttttacctgagtaggcctagaaataaacatgctagcttttattccagttctaaccaaaaaaataaaccctcgttccacagaagctgccatcaagtatttcctcacgcaagcaaccgcatccataatccttctaatagctatcctcttcaacaatatactctccggacaatgaaccataaccaatactaccaatcaatactcatcattaataatcataatggctatagcaataaaactaggaatagccccctttcacttctgagtcccagaggttacccaaggcacccctctgacatccggcctgcttcttctcacatgacaaaaactagcccccatctcaatcatataccaaatctctccctcactaaacgtaagccttctcctcactctctcaatcttatccatcatagcaggcagttgaggtggattaaaccaaacccagctacgcaaaatcttagcatactcctcaattacccacataggatgaataatagcagttctaccgtacaaccctaacataaccattcttaatttaactatttatattatcctaactactaccgcattcctactactcaacttaaactccagcaccacgaccctactactatctcgcacctgaaacaagctaacatgactaacacccttaattccatccaccctcctctccctaggaggcctgcccccgctaaccggctttttgcccaaatgggccattatcgaagaattcacaaaaaacaatagcctcatcatccccaccatcatagccaccatcaccctccttaacctctacttctacctacgcctaatctactccacctcaatcacactactccccatatctaacaacgtaaaaataaaatgacagtttgaacatacaaaacccaccccattcctccccacactcatcgcccttaccacgctactcctacctatctccccttttatactaataatcttatagaaatttaggttaaatacagaccaagagccttcaaagccctcagtaagttgcaatacttaatttctgtaacagctaaggactgcaaaaccccactctgcatcaactgaacgcaaatcagccactttaattaagctaagcccttactagaccaatgggacttaaacccacaaacacttagttaacagctaagcaccctaatcaactggcttcaatctacttctcccgccgccgggaaaaaaggcgggagaagccccggcaggtttgaagctgcttcttcgaatttgcaattcaatatgaaaatcacctcggagctggtaaaaagaggcctaacccctgtctttagatttacagtccaatgcttcactcagccattttacctcacccccactgatgttcgccgaccgttgactattctctacaaaccacaaagacattggaacactatacctattattcggcgcatgagctggagtcctaggcacagctctaagcctccttattcgagccgagctgggccagccaggcaaccttctaggtaacgaccacatctacaacgttatcgtcacagcccatgcatttgtaataatcttcttcatagtaatacccatcataatcggaggctttggcaactgactagttcccctaataatcggtgcccccgatatggcgtttccccgcataaacaacataagcttctgactcttacctccctctctcctactcctgctcgcatctgctatagtggaggccggagcaggaacaggttgaacagtctaccctcccttagcagggaactactcccaccctggagcctccgtagacctaaccatcttctccttacacctagcaggtgtctcctctatcttaggggccatcaatttcatcacaacaattatcaatataaaaccccctgccataacccaataccaaacgcccctcttcgtctgatccgtcctaatcacagcagtcctacttctcctatctctcccagtcctagctgctggcatcactatactactaacagaccgcaacctcaacaccaccttcttcgaccccgccggaggaggagaccccattctataccaacacctattctgatttttcggtcaccctgaagtttatattcttatcctaccaggcttcggaataatctcccatattgtaacttactactccggaaaaaaagaaccatttggatacataggtatggtctgagctatgatatcaattggcttcctagggtttatcgtgtgagcacaccatatatttacagtaggaatagacgtagacacacgagcatatttcacctccgctaccataatcatcgctatccccaccggcgtcaaagtatttagctgactcgccacactccacggaagcaatatgaaatgatctgctgcagtgctctgagccctaggattcatctttcttttcaccgtaggtggcctgactggcattgtattagcaaactcatcactagacatcgtactacacgacacgtactacgttgtagcccacttccactatgtcctatcaataggagctgtatttgccatcataggaggcttcattcactgatttcccctattctcaggctacaccctagaccaaacctacgccaaaatccatttcactatcatattcatcggcgtaaatctaactttcttcccacaacactttctcggcctatccggaatgccccgacgttactcggactaccccgatgcatacaccacatgaaacatcctatcatctgtaggctcattcatttctctaacagcagtaatattaataattttcatgatttgagaagccttcgcttcgaagcgaaaagtcctaatagtagaagaaccctccataaacctggagtgactatatggatgccccccaccctaccacacattcgaagaacccgtatacataaaatctagacaaaaaaggaaggaatcgaaccccccaaagctggtttcaagccaaccccatggcctccatgactttttcaaaaaggtattagaaaaaccatttcataactttgtcaaagttaaattataggctaaatcctatatatcttaatggcacatgcagcgcaagtaggtctacaagacgctacttcccctatcatagaagagcttatcacctttcatgatcacgccctcataatcattttccttatctgcttcctagtcctgtatgcccttttcctaacactcacaacaaaactaactaatactaacatctcagacgctcaggaaatagaaaccgtctgaactatcctgcccgccatcatcctagtcctcatcgccctcccatccctacgcatcctttacataacagacgaggtcaacgatccctcccttaccatcaaatcaattggccaccaatggtactgaacctacgagtacaccgactacggcggactaatcttcaactcctacatacttcccccattattcctagaaccaggcgacctgcgactccttgacgttgacaatcgagtagtactcccgattgaagcccccattcgtataataattacatcacaagacgtcttgcactcatgagctgtccccacattaggcttaaaaacagatgcaattcccggacgtctaaaccaaaccactttcaccgctacacgaccgggggtatactacggtcaatgctctgaaatctgtggagcaaaccacagtttcatgcccatcgtcctagaattaattcccctaaaaatctttgaaatagggcccgtatttaccctatagcaccccctctaccccctctagagcccactgtaaagctaacttagcattaaccttttaagttaaagattaagagaaccaacacctctttacagtgaaatgccccaactaaatactaccgtatggcccaccataattacccccatactccttacactattcctcatcacccaactaaaaatattaaacacaaactaccacctacctccctcaccaaagcccataaaaataaaaaattataacaaaccctgagaaccaaaatgaacgaaaatctgttcgcttcattcattgcccccacaatcctaggcctacccgccgcagtactgatcattctatttccccctctattgatccccacctccaaatatctcatcaacaaccgactaatcaccacccaacaatgactaatcaaactaacctcaaaacaaatgataaccatacacaacactaaaggacgaacctgatctcttatactagtatccttaatcatttttattgccacaactaacctcctcggactcctgcctcactcatttacaccaaccacccaactatctataaacctagccatggccatccccttatgagcgggcgcagtgattataggctttcgctctaagattaaaaatgccctagcccacttcttaccacaaggcacacctacaccccttatccccatactagttattatcgaaaccatcagcctactcattcaaccaatagccctggccgtacgcctaaccgctaacattactgcaggccacctactcatgcacctaattggaagcgccaccctagcaatatcaaccattaaccttccctctacacttatcatcttcacaattctaattctactgactatcctagaaatcgctgtcgccttaatccaagcctacgttttcacacttctagtaagcctctacctgcacgacaacacataatgacccaccaatcacatgcctatcatatagtaaaacccagcccatgacccctaacaggggccctctcagccctcctaatgacctccggcctagccatgtgatttcacttccactccataacgctcctcatactaggcctactaaccaacacactaaccatataccaatgatggcgcgatgtaacacgagaaagcacataccaaggccaccacacaccacctgtccaaaaaggccttcgatacgggataatcctatttattacctcagaagtttttttcttcgcaggatttttctgagccttttaccactccagcctagcccctaccccccaattaggagggcactggcccccaacaggcatcaccccgctaaatcccctagaagtcccactcctaaacacatccgtattactcgcatcaggagtatcaatcacctgagctcaccatagtctaatagaaaacaaccgaaaccaaataattcaagcactgcttattacaattttactgggtctctattttaccctcctacaagcctcagagtacttcgagtctcccttcaccatttccgacggcatctacggctcaacattttttgtagccacaggcttccacggacttcacgtcattattggctcaactttcctcactatctgcttcatccgccaactaatatttcactttacatccaaacatcactttggcttcgaagccgccgcctgatactggcattttgtagatgtggtttgactatttctgtatgtctccatctattgatgagggtcttactcttttagtataaatagtaccgttaacttccaattaactagttttgacaacattcaaaaaagagtaataaacttcgccttaattttaataatcaacaccctcctagccttactactaataattattacattttgactaccacaactcaacggctacatagaaaaatccaccccttacgagtgcggcttcgaccctatatcccccgcccgcgtccctttctccataaaattcttcttagtagctattaccttcttattatttgatctagaaattgccctccttttacccctaccatgagccctacaaacaactaacctgccactaatagttatgtcatccctcttattaatcatcatcctagccctaagtctggcctatgagtgactacaaaaaggattagactgaaccgaattggtatatagtttaaacaaaacgaatgatttcgactcattaaattatgataatcatatttaccaaatgcccctcatttacataaatattatactagcatttaccatctcacttctaggaatactagtatatcgctcacacctcatatcctccctactatgcctagaaggaataatactatcgctgttcattatagctactctcataaccctcaacacccactccctcttagccaatattgtgcctattgccatactagtctttgccgcctgcgaagcagcggtgggcctagccctactagtctcaatctccaacacatatggcctagactacgtacataacctaaacctactccaatgctaaaactaatcgtcccaacaattatattactaccactgacatgactttccaaaaaacacataatttgaatcaacacaaccacccacagcctaattattagcatcatccctctactattttttaaccaaatcaacaacaacctatttagctgttccccaaccttttcctccgaccccctaacaacccccctcctaatactaactacctgactcctacccctcacaatcatggcaagccaacgccacttatccagtgaaccactatcacgaaaaaaactctacctctctatactaatctccctacaaatctccttaattataacattcacagccacagaactaatcatattttatatcttcttcgaaaccacacttatccccaccttggctatcatcacccgatgaggcaaccagccagaacgcctgaacgcaggcacatacttcctattctacaccctagtaggctcccttcccctactcatcgcactaatttacactcacaacaccctaggctcactaaacattctactactcactctcactgcccaagaactatcaaactcctgagccaacaacttaatatgactagcttacacaatagcttttatagtaaagatacctctttacggactccacttatgactccctaaagcccatgtcgaagcccccatcgctgggtcaatagtacttgccgcagtactcttaaaactaggcggctatggtataatacgcctcacactcattctcaaccccctgacaaaacacatagcctaccccttccttgtactatccctatgaggcataattataacaagctccatctgcctacgacaaacagacctaaaatcgctcattgcatactcttcaatcagccacatagccctcgtagtaacagccattctcatccaaaccccctgaagcttcaccggcgcagtcattctcataatcgcccacgggcttacatcctcattactattctgcctagcaaactcaaactacgaacgcactcacagtcgcatcataatcctctctcaaggacttcaaactctactcccactaatagctttttgatgacttctagcaagcctcgctaacctcgccttaccccccactattaacctactgggagaactctctgtgctagtaaccacgttctcctgatcaaatatcactctcctacttacaggactcaacatactagtcacagccctatactccctctacatatttaccacaacacaatggggctcactcacccaccacattaacaacataaaaccctcattcacacgagaaaacaccctcatgttcatacacctatcccccattctcctcctatccctcaaccccgacatcattaccgggttttcctcttgtaaatatagtttaaccaaaacatcagattgtgaatctgacaacagaggcttacgaccccttatttaccgagaaagctcacaagaactgctaactcatgcccccatgtctaacaacatggctttctcaacttttaaaggataacagctatccattggtcttaggccccaaaaattttggtgcaactccaaataaaagtaataaccatgcacactactataaccaccctaaccctgacttccctaattccccccatccttaccaccctcgttaaccctaacaaaaaaaactcatacccccattatgtaaaatccattgtcgcatccacctttattatcagtctcttccccacaacaatattcatgtgcctagaccaagaagttattatctcgaactgacactgagccacaacccaaacaacccagctctccctaagcttcaaactagactacttctccataatattcatccctgtagcattgttcgttacatggtccatcatagaattctcactgtgatatataaactcagacccaaacattaatcagttcttcaaatatctactcatcttcctaattaccatactaatcttagttaccgctaacaacctattccaactgttcatcggctgagagggcgtaggaattatatccttcttgctcatcagttgatgatacgcccgagcagatgccaacacagcagccattcaagcaatcctatacaaccgtatcggcgatatcggtttcatcctcgccttagcatgatttatcctacactccaactcatgagacccacaacaaatagcccttctaaacgctaatccaagcctcaccccactactaggcctcctcctagcagcagcaggcaaatcagcccaattaggtctccacccctgactcccctcagccatagaaggccccaccccagtctcagccctactccactcaagcactatagttgtagcaggaatcttcttactcatccgcttccaccccctagcagaaaatagcccactaatccaaactctaacactatgcttaggcgctatcaccactctgttcgcagcagtctgcgcccttacacaaaatgacatcaaaaaaatcgtagccttctccacttcaagtcaactaggactcataatagttacaatcggcatcaaccaaccacacctagcattcctgcacatctgtacccacgccttcttcaaagccatactatttatgtgctccgggtccatcatccacaaccttaacaatgaacaagatattcgaaaaataggaggactactcaaaaccatacctctcacttcaacctccctcaccattggcagcctagcattagcaggaatacctttcctcacaggtttctactccaaagaccacatcatcgaaaccgcaaacatatcatacacaaacgcctgagccctatctattactctcatcgctacctccctgacaagcgcctatagcactcgaataattcttctcaccctaacaggtcaacctcgcttccccacccttactaacattaacgaaaataaccccaccctactaaaccccattaaacgcctggcagccggaagcctattcgcaggatttctcattactaacaacatttcccccgcatcccccttccaaacaacaatccccctctacctaaaactcacagccctcgctgtcactttcctaggacttctaacagccctagacctcaactacctaaccaacaaacttaaaataaaatccccactatgcacattttatttctccaacatactcggattctaccctagcatcacacaccgcacaatcccctatctaggccttcttacgagccaaaacctgcccctactcctcctagacctaacctgactagaaaagctattacctaaaacaatttcacagcaccaaatctccacctccatcatcacctcaacccaaaaaggcataattaaactttacttcctctctttcttcttcccactcatcctaaccctactcctaatcacataacctattcccccgagcaatctcaattacaatatatacaccaacaaacaatgttcaaccagtaactactactaatcaacgcccataatcatacaaagcccccgcaccaataggatcctcccgaatcaaccctgacccctctccttcataaattattcagcttcctacactattaaagtttaccacaaccaccaccccatcatactctttcacccacagcaccaatcctacctccatcgctaaccccactaaaacactcaccaagacctcaacccctgacccccatgcctcaggatactcctcaatagccatcgctgtagtatatccaaagacaaccatcattccccctaaataaattaaaaaaactattaaacccatataacctcccccaaaattcagaataataacacacccgaccacaccgctaacaatcaatactaaacccccataaataggagaaggcttagaagaaaaccccacaaaccccattactaaacccacactcaacagaaacaaagcatacatcattattctcgcacggactacaaccacgaccaatgatatgaaaaaccatcgttgtatttcaactacaagaacaccaatgaccccaatacgcaaaactaaccccctaataaaattaattaaccactcattcatcgacctccccaccccatccaacatctccgcatgatgaaacttcggctcactccttggcgcctgcctgatcctccaaatcaccacaggactattcctagccatgcactactcaccagacgcctcaaccgccttttcatcaatcgcccacatcactcgagacgtaaattatggctgaatcatccgctaccttcacgccaatggcgcctcaatattctttatctgcctcttcctacacatcgggcgaggcctatattacggatcatttctctactcagaaacctgaaacatcggcattatcctcctgcttgcaactatagcaacagccttcataggctatgtcctcccgtgaggccaaatatcattctgaggggccacagtaattacaaacttactatccgccatcccatacattgggacagacctagttcaatgaatctgaggaggctactcagtagacagtcccaccctcacacgattctttacctttcacttcatcttgcccttcattattgcagccctagcagcactccacctcctattcttgcacgaaacgggatcaaacaaccccctaggaatcacctcccattccgataaaatcaccttccacccttactacacaatcaaagacgccctcggcttacttctcttccttctctccttaatgacattaacactattctcaccagacctcctaggcgacccagacaattataccctagccaaccccttaaacacccctccccacatcaagcccgaatgatatttcctattcgcctacacaattctccgatccgtccctaacaaactaggaggcgtccttgccctattactatccatcctcatcctagcaataatccccatcctccatatatccaaacaacaaagcataatatttcgcccactaagccaatcactttattgactcctagccgcagacctcctcattctaacctgaatcggaggacaaccagtaagctacccttttaccatcattggacaagtagcatccgtactatacttcacaacaatcctaatcctaataccaactatctccctaattgaaaacaaaatactcaaatgggcctgtccttgtagtataaactaatacaccagtcttgtaaaccggagatgaaaacctttttccaaggacaaatcagagaaaaagtctttaactccaccattagcacccaaagctaagattctaatttaaactattctctgttctttcatggggaagcagatttgggtaccacccaagtattgactcacccatcaacaaccgctatgtatttcgtacattactgccagccaccatgaatattgtacggtaccataaatacttgaccacctgtagtacataaaaacccaatccacatcaaaaccccctccccatgcttacaagcaagtacagcaatcaaccctcaactatcacacatcaactgcaactccaaagccacccctcacccactaggataccaacaaacctacccatccttaacagcacatagtacataaagtcatttaccgtacatagcacattacagtcaaatcccttctcgtccccatggatgacccccctcagataggggtcccttgaccaccatcctccgtgaaatcaatatcccgcacaagagtgctactctcctcgctccgggcccataacacttgggggtagctaaagtgaactgtatccgacatctggttcctacttcagggtcataaagcctaaatagcccacacgttccccttaaataagacatcacgatg

SEQ ID NO: 121 - DNA, 16570 bp, Homo sapiens mitochondrial
  3108: "n" refers to a nucleotide at position 3107 of the Cambridge Reference Sequence (CRS, Anderson et al. 1981 Nature 290:457-465), later determined to be absent from the human mtDNA sequence according to the revised CRS (rCRS, Andrews et al. 1999 Nature Genetics 23:147); "n" therefore represents a single nucleotide deletion at a position corresponding to nucleotide 3107 of SEQ ID NO:1 as provided herein.
gatcacaggtctatcaccctattaaccactcacgggagctctccatgcatttggtattttcgtttggggggtgtgcacgcgatagcattgcgagacgctggagccggagccccctatgtcgcagtatctgtctttgattcctgccccatcctattatttatcgcacctacgttcaatattacaggcgagcatacttactaaagtgtgttaattagttaatgcttgtaggacatagtaataacaattgaatgtctgcacagccgctttccacacagacatcataacaaaaaatttccaccaaaccccccctccccccccgcttctggccacagcacttaaacacatctctgccaaaccccaaaaacaaagaaccctaacaccagcctaaccagatttcaaattttatcttttggcggtatgcacttttaacagtcaccccccaactaacacattattttcccctcccactcccatactactaatctcatcaatacaacccccgcccatcctacccagcacacacaccgctgctaaccccataccccgaaccaaccaaaccccaaagacaccccccacagtttatgtagcttacctcctcaaagcaatacactgaaaatgtttagacgggctcacatcaccccataaacaaataggtttggtcctggcctttctattagctcttagtaagattacacatgcaagcatccccgttccagtgagttcaccctctaaatcaccacgatcaaaagggacaagcatcaagcacgcagcaatgcagctcaaaacgcttagcctagccacacccccacgggaaacagcagtgattaacctttagcaataaacgaaagtttaactaagctatactaaccccagggttggtcaatttcgtgccagccaccgcggtcacacgattaacccaagtcaatagaagccggcgtaaagagtgttttagatcaccccctccccaataaagctaaaactcacctgagttgtaaaaaactccagttgacacaaaatagactacgaaagtggctttaacatatctgaacacacaatagctaagacccaaactgggattagataccccactatgcttagccctaaacctcaacagttaaatcaacaaaactgctcgccagaacactacgagccacagcttaaaactcaaaggacctggcggtgcttcatatccctctagaggagcctgttctgtaatcgataaaccccgatcaacctcaccacctcttgctcagcctatataccgccatcttcagcaaaccctgatgaaggctacaaagtaagcgcaagtacccacgtaaagacgttaggtcaaggtgtagcccatgaggtggcaagaaatgggctacattttctaccccagaaaactacgatagcccttatgaaacttaagggtcgaaggtggatttagcagtaaactgagagtagagtgcttagttgaacagggccctgaagcgcgtacacaccgcccgtcaccctcctcaagtatacttcaaaggacatttaactaaaacccctacgcatttatatagaggagacaagtcgtaacatggtaagtgtactggaaagtgcacttggacgaaccagagtgtagcttaacacaaagcacccaacttacacttaggagatttcaacttaacttgaccgctctgagctaaacctagccccaaacccactccaccttactaccagacaaccttagccaaaccatttacccagataaagtataggcgatagaaattgaaacctggcgcaatagatatagtaccgcaagggaaagatgaaaaattataaccaagcataatatagcaaggactaacccctataccttctgcataatgaattaactagaaataactttgcaaggagagccaaagctaagacccccgaaaccagacgagctacctaagaacagctaaaagagcacacccgtctatgtagcaaaatagtgggaagatttataggtagaggcgacaaacctaccgagcctggtgatagctggttgtccaagatagaatcttagttcaactttaaatttgcccacagaaccctctaaatccccttgtaaatttaactgttagtccaaagaggaacagctctttggacactaggaaaaaaccttgtagagagagtaaaaaatttaacacccatagtaggcctaaaagcagccaccaattaagaaagcgttcaagctcaacacccactacctaaaaaatcccaaacatataactgaactcctcacacccaattggaccaatctatcaccctatagaagaactaatgttagtataagtaacatgaaaacattctcctccgcataagcctgcgtcagattaaaacactgaactgacaattaacagcccaatatctacaatcaaccaacaagtcattattaccctcactgtcaacccaacacaggcatgctcataaggaaaggttaaaaaaagtaaaaggaactcggcaaatcttaccccgcctgtttaccaaaaacatcacctctagcatcaccagtattagaggcaccgcctgcccagtgacacatgtttaacggccgcggtaccctaaccgtgcaaaggtagcataatcacttgttccttaaatagggacctgtatgaatggctccacgagggttcagctgtctcttacttttaaccagtgaaattgacctgcccgtgaagaggcgggcatgacacagcaagacgagaagaccctatggagctttaatttattaatgcaaacagtacctaacaaacccacaggtcctaaactaccaaacctgcattaaaaatttcggttggggcgacctcggagcagaacccaacctccgagcagtacatgctaagacttcaccagtcaaagcgaactactatactcaattgatccaataacttgaccaacggaacaagttaccctagggataacagcgcaatcctattctagagtccatatcaacaatagggtttacgacctcgatgttggatcaggacatcccgatggtgcagccgctattaaaggttcgtttgttcaacgattaaagtcctacgtgatctgagttcagaccggagtaatccaggtcggtttctatctacnttcaaattcctccctgtacgaaaggacaagagaaataaggcctacttcacaaagcgccttcccccgtaaatgatatcatctcaacttagtattatacccacacccacccaagaacagggtttgttaagatggcagagcccggtaatcgcataaaacttaaaactttacagtcagaggttcaattcctcttcttaacaacatacccatggccaacctcctactcctcattgtacccattctaatcgcaatggcattcctaatgcttaccgaacgaaaaattctaggctatatacaactacgcaaaggccccaacgttgtaggcccctacgggctactacaacccttcgctgacgccataaaactcttcaccaaagagcccctaaaacccgccacatctaccatcaccctctacatcaccgccccgaccttagctctcaccatcgctcttctactatgaacccccctccccatacccaaccccctggtcaacctcaacctaggcctcctatttattctagccacctctagcctagccgtttactcaatcctctgatcagggtgagcatcaaactcaaactacgccctgatcggcgcactgcgagcagtagcccaaacaatctcatatgaagtcaccctagccatcattctactatcaacattactaataagtggctcctttaacctctccacccttatcacaacacaagaacacctctgattactcctgccatcatgacccttggccataatatgatttatctccacactagcagagaccaaccgaacccccttcgaccttgccgaaggggagtccgaactagtctcaggcttcaacatcgaatacgccgcaggccccttcgccctattcttcatagccgaatacacaaacattattataataaacaccctcaccactacaatcttcctaggaacaacatatgacgcactctcccctgaactctacacaacatattttgtcaccaagaccctacttctaacctccctgttcttatgaattcgaacagcatacccccgattccgctacgaccaactcatacacctcctatgaaaaaacttcctaccactcaccctagcattacttatatgatatgtctccatacccattacaatctccagcatcccccctcaaacctaagaaatatgtctgataaaagagttactttgatagagtaaataataggagcttaaacccccttatttctaggactatgagaatcgaacccatccctgagaatccaaaattctccgtgccacctatcacaccccatcctaaagtaaggtcagctaaataagctatcgggcccataccccgaaaatgttggttatacccttcccgtactaattaatcccctggcccaacccgtcatctactctaccatctttgcaggcacactcatcacagcgctaagctcgcactgattttttacctgagtaggcctagaaataaacatgctagcttttattccagttctaaccaaaaaaataaaccctcgttccacagaagctgccatcaagtatttcctcacgcaagcaaccgcatccataatccttctaatagctatcctcttcaacaatatactctccggacaatgaaccataaccaatactaccaatcaatactcatcattaataatcataatggctatagcaataaaactaggaatagccccctttcacttctgagtcccagaggttgcccaaggcacccctctgacatccggcctgcttcttctcacatgacaaaaactagcccccatctcaatcatataccaaatctctccctcactaaacgtaagccttctcctcactctctcaatcttatccatcatagcaggcagttgaggtggattaaaccaaacccagctacgcaaaatcttagcatactcctcaattacccacataggatgaataatagcagttctaccgtacaaccctaacataaccattcttaatttaactatttatattatcctaactactaccgcattcctactactcaacttaaactccagcaccacgaccctactactatctcgcacctgaaacaagctaacatgactaacacccttaattccatccaccctcctctccctaggaggcctgcccccgctaaccggctttttgcccaaatgggccattatcgaagaattcacaaaaaacaatagcctcatcatccccaccatcatagccaccatcaccctccttaacctctacttctacctacgcctaatctactccacctcaatcacactactccccatatctaacaacgtaaaaataaaatgacagtttgaacatacaaaacccaccccattcctccccacactcatcgcccttaccacgctactcctacctatctccccttttatactaataatcttatagaaatttaggttaaatacagaccaagagccttcaaagccctcagtaagttgcaatacttaatttctgtaacagctaaggactgcaaaaccccactctgcatcaactgaacgcaaatcagccactttaattaagctaagcccttactagaccaatgggacttaaacccacaaacacttagttaacagctaagcaccctaatcaactggcttcaatctacttctcccgccgccgggaaaaaaggcgggagaagccccggcaggtttgaagctgcttcttcgaatttgcaattcaatatgaaaatcacctcggagctggtaaaaagaggcctaacccctgtctttagatttacagtccaatgcttcactcagccattttacctcacccccactgatgttcgccgaccgttgactattctctacaaaccacaaagacattggaacactatacctactattcggcgcatgagctggagtcctaggcacagctctaagcctccttattcgagccgagctgggccagccaggcaaccttctaggtaacgaccacatctacaacgttatcgtcacagcccatgcatttgtaataatcttcttcatagtaatacccatcataatcggaggctttggcaactgactagttcccctaataatcggtgcccccgatatggcgtttccccgcataaacaacataagcttctgactcttacctccctctctcctactcctgctcgcatctgctatagtggaggccggagcaggaacaggttgaacagtctaccctcccttagcagggaactactcccaccctggagcctccgtagacctaaccatcttctccttacacctagcaggtgtctcctctatcttaggggccatcaatttcatcacaacaattatcaatataaaaccccctgccataacccaataccaaacgcccctcttcgtctgatccgtcctaatcacagcagtcctacttctcctatctctcccagtcctagctgctggcatcactatactactaacagaccgcaacctcaacaccaccttcttcgaccccgccggaggaggagaccccattctataccaacacctattctgatttttcggtcaccctgaagtttatattcttatcctaccaggcttcggaataatctcccatattgtaacttactactccggaaaaaaagaaccatttggatacataggtatggtctgagctatgatatcaattggcttcctagggtttatcgtgtgagcacaccatatatttacagtaggaatagacgtagacacacgagcatatttcacctccgctaccataatcatcgctatccccaccggcgtcaaagtatttagctgactcgccacactccacggaagcaatatgaaatgatctgctgcagtgctctgagccctaggattcatctttcttttcaccgtaggtggcctgactggcattgtattagcaaactcatcactagacatcgtactacacgacacgtactacgttgtagctcacttccactatgtcctatcaataggagctgtatttgccatcataggaggcttcattcactgatttcccctattctcaggctacaccctagaccaaacctacgccaaaatccatttcactatcatattcatcggcgtaaatctaactttcttcccacaacactttctcggcctatccggaatgccccgacgttactcggactaccccgatgcatacaccacatgaaacatcctatcatctgtaggctcattcatttctctaacagcagtaatattaataattttcatgatttgagaagccttcgcttcgaagcgaaaagtcctaatagtagaagaaccctccataaacctggagtgactatatggatgccccccaccctaccacacattcgaagaacccgtatacataaaatctagacaaaaaaggaaggaatcgaaccccccaaagctggtttcaagccaaccccatggcctccatgactttttcaaaaaggtattagaaaaaccatttcataactttgtcaaagttaaattataggctaaatcctatatatcttaatggcacatgcagcgcaagtaggtctacaagacgctacttcccctatcatagaagagcttatcacctttcatgatcacgccctcataatcattttccttatctgcttcctagtcctgtatgcccttttcctaacactcacaacaaaactaactaatactaacatctcagacgctcaggaaatagaaaccgtctgaactatcctgcccgccatcatcctagtcctcatcgccctcccatccctacgcatcctttacataacagacgaggtcaacgatccctcccttaccatcaaatcaattggccaccaatggtactgaacctacgagtacaccgactacggcggactaatcttcaactcctacatacttcccccattattcctagaaccaggcgacctgcgactccttgacgttgacaatcgagtagtactcccgattgaaacccccattcgtataataattacatcacaagacgtcttgcactcatgagctgtccccacattaggcttaaaaacagatgcaattcccggacgtctaaaccaaaccactttcaccgctacacgaccgggggtatactacggtcaatgctctgaaatctgtggagcaaaccacagtttcatgcccatcgtcctagaattaattcccctaaaaatctttgaaatagggcccgtatttaccctatagcaccccctctaccccctctagagcccactgtaaagctaacttagcattaaccttttaagttaaagattaagagaaccaacacctctttacagtgaaatgccccaactaaatactaccgtatggcccaccataattacccccatactccttacactattcctcatcacccaactaaaaatattaaacacaaactaccacctacctccctcaccaaagcccataaaaataaaaaattataacaaaccctgagaaccaaaatgaacgaaaatctgttcgcttcattcattgcccccacaatcctaggcctacccgccgcagtactgatcattctatttccccctctattgatccccacctccaaatatctcatcaacaaccgactaatcaccacccaacaatgactaatcaaactaacctcaaaacaaatgataaccatacacaacactaaaggacgaacctgatctcttatactagtatccttaatcatttttattgccacaactaacctcctcggactcctgccttactcatttacaccaaccacccaactatctataaacctagccatggccatccccttatgagcgggcgcagtgattataggctttcgctctaagattaaaaatgccctagcccacttcttaccacaaggcacacctacaccccttatccccatactagttattatcgaaaccatcagcctactcattcaaccaatagccctggccgtacgcctaaccgctaacattactgcaggccacctactcatgcacctaattggaagcgccaccctagcaatatcaaccattaaccttccctctacacttatcatcttcacaattctaattctactgactatcctagaaatcgctgtcgccttaatccaagcctacgttttcacacttctagtaagcctctacctgcacgacaacacataatgacccaccaatcacatgcctatcatatagtaaaacccagcccatgacccctaacaggggccctctcagccctcctaatgacctccggcctagccatgtgatttcacttccactccataacgctcctcatactaggcctactaaccaacacactaaccatataccaatgatggcgcgatgtaacacgagaaagcacataccaaggccaccacacaccacctgtccaaaaaggccttcgatacgggataatcctatttattacctcagaagtttttttcttcgcaggatttttctgagccttttaccactccagcctagcccctaccccccaattaggagggcactggcccccaacaggcatcaccccgctaaatcccctagaagtcccactcctaaacacatccgtattactcgcatcaggagtatcaatcacctgagctcaccatagtctaatagaaaacaaccgaaaccaaataattcaagcactgcttattacaattttactgggtctctattttaccctcctacaagcctcagagtacttcgagtctcccttcaccatttccgacggcatctacggctcaacattttttgtagccacaggcttccacggacttcacgtcattattggctcaactttcctcactatctgcttcatccgccaactaatatttcactttacatccaaacatcactttggcttcgaagccgccgcctgatactggcattttgtagatgtggtttgactatttctgtatgtctccatctattgatgagggtcttactcttttagtataaacagtaccgttaacttccaattaactagttttgacaacattcaaaaaagagtaataaacttcgccttaattttaataatcaacaccctcctagccttactactaataattattacattttgactaccacaactcaacggctacatagaaaaatccaccccttacgagtgcggcttcgaccctatatcccccgcccgcgtccctttctccataaaattcttcttagtagctattaccttcttattatttgatctagaaattgccctccttttacccctaccatgagccctacaaacaactaacctgccactaatagttatgtcatccctcttattaatcatcatcctagccctaagtctggcctatgagtgactacaaaaaggattagactgaaccgaattggtatatagtttaaacaaaacgaatgatttcgactcattaaattatgataatcatatttaccaaatgcccctcatttacataaatattatactagcatttaccatctcacttctaggaatactagtatatcgctcacacctcatatcctccctactatgcctagaaggaataatactatcgctgttcattatagctactctcataaccctcaacacccactccctcttagccaatattgtgcctattgccatactagtctttgccgcctgcgaagcagcggtgggcctagccctactagtctcaatctccaacacatatggcctagactacgtacataacctaaacctactccaatgctaaaactaatcgtcccaacaattatattactaccactgacatgactttccaaaaaacacataatttgaatcaacacaaccacccacagcctaattattagcatcatccctctactattttttaaccaaatcaacaacaacctatttagctgttccccaaccttttcctccgaccccctaacaacccccctcctaatactaactacctgactcctacccctcacaatcatggcaagccaacgccacttatccagtgaaccactatcacgaaaaaaactctacctctctatactaatctccctacaaatctccttaattataacattcacagccacagaactaatcatattttatatcttcttcgaaaccacacttatccccaccttggctatcatcacccgatgaggcaaccagccagaacgcctgaacgcaggcacatacttcctattctacaccctagtaggctcccttcccctactcatcgcactaatttacactcacaacaccctaggctcactaaacattctactactcactctcactgcccaagaactatcaaactcctgagccaacaacttaatatgactagcttacacaatagcttttatagtaaagatacctctttacggactccacttatgactccctaaagcccatgtcgaagcccccatcgctgggtcaatagtacttgccgcagtactcttaaaactaggcggctatggtataatacgcctcacactcattctcaaccccctgacaaaacacatagcctaccccttccttgtactatccctatgaggcataattataacaagctccatctgcctacgacaaacagacctaaaatcgctcattgcatactcttcaatcagccacatagccctcgtagtaacagccattctcatccaaaccccctgaagcttcaccggcgcagtcattctcataatcgcccacggacttacatcctcattactattctgcctagcaaactcaaactacgaacgcactcacagtcgcatcataatcctctctcaaggacttcaaactctactcccactaatagctttttgatgacttctagcaagcctcgctaacctcgccttaccccccactattaacctactgggagaactctctgtgctagtaaccacgttctcctgatcaaatatcactctcctacttacaggactcaacatactagtcacagccctatactccctctacatatttaccacaacacaatgaggctcactcacccaccacattaacaacataaaaccctcattcacacgagaaaacaccctcatgttcatacacctatcccccattctcctcctatccctcaaccccgacatcattaccgggttttcctcttgtaaatatagtttaaccaaaacatcagattgtgaatctgacaacagaggcttacgaccccttatttaccgagaaagctcacaagaactgctaactcatgcccccatgtctaacaacatggctttctcaacttttaaaggataacagctatccattggtcttaggccccaaaaattttggtgcaactccaaataaaagtaataaccatgcacactactataaccaccctaaccctgacttccctaattccccccatccttaccaccctcgttaaccctaacaaaaaaaactcatacccccattatgtaaaatccattgtcgcatccacctttattatcagtctcttccccacaacaatattcatgtgcctagaccaagaagttattatctcgaactgacactgagccacaacccaaacaacccagctctccctaagcttcaaactagactacttctccataatattcatccctgtagcattgttcgttacatggtccatcatagaattctcactgtgatatataaactcagacccaaacattaatcagttcttcaaatatctactcattttcctaattaccatactaatcttagttaccgctaacaacctattccaactgttcatcggctgagagggcgtaggaattatatccttcttgctcatcagttgatgatacgcccgagcagatgccaacacagcagccattcaagcaatcctatacaaccgtatcggcgatatcggtttcatcctcgccttagcatgatttatcctacactccaactcatgagacccacaacaaatagcccttctaaacgctaatccaagcctcaccccactactaggcctcctcctagcagcagcaggcaaatcagcccaattaggtctccacccctgactcccctcagccatagaaggccccaccccagtctcagccctactccactcaagcactatagttgtagcaggaatcttcttactcatccgcttccaccccctagcagaaaatagcccactaatccaaactctaacactatgcttaggcgctatcaccactctgttcgcagcagtctgcgcccttacacaaaatgacatcaaaaaaatcgtagccttctccacttcaagtcaactaggactcataatagttacaatcggcatcaaccaaccacacctagcattcctgcacatctgtacccacgccttcttcaaagccatactatttatgtgctccgggtccatcatccacaaccttaacaatgaacaagatattcgaaaaataggaggactactcaaaaccatacctctcacttcaacctccctcaccattggcagcctagcattagcaggaatacctttcctcacaggtttctactccaaagaccacatcatcgaaaccgcaaacatatcatacacaaacgcctgagccctatctattactctcatcgctacctccctgacaagcgcctatagcactcgaataattcttctcaccctaacaggtcaacctcgcttccccacccttactaacattaacgaaaataaccccaccctactaaaccccattaaacgcctggcagccggaagcctattcgcaggatttctcattactaacaacatttcccccgcatcccccttccaaacaacaatccccctctacctaaaactcacagccctcgctgtcactttcctaggacttctaacagccctagacctcaactacctaaccaacaaacttaaaataaaatccccactatgcacattttatttctccaacatactcggattctaccctagcatcacacaccgcacaatcccctatctaggccttcttacgagccaaaacctgcccctactcctcctagacctaacctgactagaaaagctattacctaaaacaatttcacagcaccaaatctccacctccatcatcacctcaacccaaaaaggcataattaaactttacttcctctctttcttcttcccactcatcctaaccctactcctaatcacataacctattcccccgagcaatctcaattacaatatatacaccaacaaacaatgttcaaccagtaactactactaatcaacgcccataatcatacaaagcccccgcaccaataggatcctcccgaatcaaccctgacccctctccttcataaattattcagcttcctacactattaaagtttaccacaaccaccaccccatcatactctttcacccacagcaccaatcctacctccatcgctaaccccactaaaacactcaccaagacctcaacccctgacccccatgcctcaggatactcctcaatagccatcgctgtagtatatccaaagacaaccatcattccccctaaataaattaaaaaaactattaaacccatataacctcccccaaaattcagaataataacacacccgaccacaccgctaacaatcaatactaaacccccataaataggagaaggcttagaagaaaaccccacaaaccccattactaaacccacactcaacagaaacaaagcatacatcattattctcgcacggactacaaccacgaccaatgatatgaaaaaccatcgttgtatttcaactacaagaacaccaatgaccccaatacgcaaaattaaccccctaataaaattaattaaccactcattcatcgacctccccaccccatccaacatctccgcatgatgaaacttcggctcactccttggcgcctgcctgatcctccaaatcaccacaggactattcctagccatgcactactcaccagacgcctcaaccgccttttcatcaatcgcccacatcactcgagacgtaaattatggctgaatcatccgctaccttcacgccaatggcgcctcaatattctttatctgcctcttcctacacatcgggcgaggcctatattacggatcatttctctactcagaaacctgaaacatcggcattatcctcctgcttgcaactatagcaacagccttcataggctatgtcctcccgtgaggccaaatatcattctgaggggccacagtaattacaaacttactatccgccatcccatacattgggacagacctagttcaatgaatctgaggaggctactcagtagacagtcccaccctcacacgattctttacctttcacttcatcttgcccttcattattgcagccctagcagcactccacctcctattcttgcacgaaacgggatcaaacaaccccctaggaatcacctcccattccgataaaatcaccttccacccttactacacaatcaaagacgccctcggcttacttctcttccttctctccttaatgacattaacactattctcaccagacctcctaggcgacccagacaattataccctagccaaccccttaaacacccctccccacatcaagcccgaatgatatttcctattcgcctacacaattctccgatccgtccctaacaaactaggaggcgtccttgccctattactatccatcctcatcctagcaataatccccatcctccatatatccaaacaacaaagcataatatttcgcccactaagccaatcactttattgactcctagccgcagacctcctcattctaacctgaatcggaggacaaccagtaagctacccttttaccatcattggacaagtagcatccgtactatacttcacaacaatcctaatcctaataccaactatctccctaattgaaaacaaaatactcaaatgggcctgtccttgtagtataaactaatacaccagtcttgtaaaccggagatgaaaacctttttccaaggacaaatcagagaaaaagtctttaactccaccattagcacccaaagctaagattctaatttaaactattctctgttctttcatggggaagcagatttgggtaccacccaagtattgactcacccatcaacaaccgctatgtatttcgtacattactgccagtcaccatgaatattgtacggtaccataaatacttgaccacctgtagtacataaaaacccaatccacatcaaaaccccctccccatgcttacaagcaagtacagcaatcaaccttcaactatcacacatcaactgcaactccaaagccacccctcacccactaggataccaacaaacctatccacccttaacagtacatagtacataaaaccatttaccgtacatagcacattacagtcaaatcccttctcgcccccatggatgacccccctcagataggggtcccttgaccaccatcctccgtgaaatcaatatcccgcacaagagtgctactctcctcgctccgggcccataacacttgggggtagctaaagtgaactgtatccgacatctggttcctacttcagggccataaagcctaaatagcccacacgttccccttaaataagacatcacgatg

SEQ ID NO: 122 - DNA, 16572 bp, Homo sapiens mitochondrial
  3110: "n" refers to a nucleotide at position 3107 of the Cambridge Reference Sequence (CRS, Anderson et al. 1981 Nature 290:457-465), later determined to be absent from the human mtDNA sequence according to the revised CRS (rCRS, Andrews et al. 1999 Nature Genetics 23:147); "n" therefore represents a single nucleotide deletion at a position corresponding to nucleotide 3107 of SEQ ID NO:1 as provided herein.
gatcacaggtctatcaccctattaaccactcacgggagctctccatgcatttggtattttcgtctggggggtatgcacgcgatagcattgcgagacgctggagccggagcaccctatgtcgcagtatctgtctttgattcctgcctcatcctattatttatcgcacctacgttcaatattacaggcgaacatacttactaaagtgtgttaattaattaatgcttgtaggacataataataacaattgaatgtctgcacagccgctttccacacagacatcataacaaaaaatttccaccaaaccccccctccccccccgcttctggccacagcacttaaacacatctctgccaaaccccaaaaacaaagaaccctaacaccagcctaaccagatttcaaattttatcttttggcggtatgcacttttaacagtcaccccccaactaacacattattttcccctcccactcccatactactaatctcatcaatacaacccccgcccatcctacccagcacacacacaccgctgctaaccccataccccgaaccaaccaaaccccaaagacaccccccacagtttatgtagcttacctcctcaaagcaatacactgaaaatgtttagacgggctcacatcaccccataaacaaataggtttggtcctagcctttctattagctcttagtaagattacacatgcaagcatccccgttccagtgagttcaccctctaaatcaccacgatcaaaagggacaagcatcaagcacgcagcaatgcagctcaaaacgcttagcctagccacacccccacgggaaacagcagtgattaacctttagcaataaacgaaagtttaactaagctatactaaccccagggttggtcaatttcgtgccagccaccgcggtcacacgattaacccaagtcaatagaagccggcgtaaagagtgttttagatcaccccctccccaataaagctaaaactcacctgagttgtaaaaaactccagttgacacaaaatagactacgaaagtggctttaacatatctgaacacacaatagctaagacccaaactgggattagataccccactatgcttagccctaaacctcaacagttaaatcaacaaaactgctcgccagaacactacgagccacagcttaaaactcaaaggacctggcggtgcttcatatccctctagaggagcctgttctgtaatcgataaaccccgatcaacctcaccacctcttgctcagcctatataccgccatcttcagcaaaccctgatgaaggctacaaagtaagcgcaagtacccacgtaaagacgttaggtcaaggtgtagcccatgaggtggcaagaaatgggctacattttctaccccagaaaactacgatagcccttatgaaacttaagggtcgaaggtggatttagcagtaaactgagagtagagtgcttagttgaacaaggccctgaagcgcgtacacaccgcccgtcaccctcctcaagtatacttcaaaggacatttaactaaaacccctacgcatttatatagaggagacaagtcgtaacatggtaagtgtactggaaagtgcacttggacgaaccagagtgtagcttaacacaaagcacccaacttacacttaggagatttcaacttaacttgaccgctctgagctaaacctagccccaaacccactccaccttactaccagacaaccttagccaaaccatttacccaaataaagtataggcgatagaaattgaaacctggcgcaatagatatagtaccgcaagggaaagatgaaaaattataaccaagcataatatagcaaggactaacccctataccttctgcataatgaattaactagaaataactttgcaaggagagccaaagctaagacccccgaaaccagacgagctacctaagaacagctaaaagagcacacccgtctatgtagcaaaatagtgggaagatttataggtagaggcgacaaacctaccgagcctggtgatagctggttgtccaagatagaatcttagttcaactttaaatttgcccacagaaccctctaaatccccttgtaaatttaactgttagtccaaagaggaacagctctttggacactaggaaaaaaccttgtagagagagtaaaaaatttaacacccatagtaggcctaaaagcagccaccaattaagaaagcgttcaagctcaacacccactacctaaaaaatcccaaacatataactgaactcctcacacccaattggaccaatctatcaccctatagaagaactaatgttagtataagtaacatgaaaacattctcctccgcataagcctgcgtcagattaaaacactgaactgacaattaacagcccaatatctacaatcaaccaacaagtcattattaccctcactgtcaacccaacacaggcatgctcataaggaaaggttaaaaaaagtaaaaggaactcggcaaatcttaccccgcctgtttaccaaaaacatcacctctagcatcaccagtattagaggcaccgcctgcccagtgacacatgtttaacggccgcggtaccctaaccgtgcaaaggtagcataatcacttgttccttaaatagggacctgtatgaatggctccacgagggttcagctgtctcttacttttaaccagtgaaattgacctgcccgtgaagaggcgggcataacacagcaagacgagaagaccctatggagctttaatttattaatgcaaacagtacctaacaaacccacaggtcctaaactaccaaacctgcattaaaaatttcggttggggcgacctcggagcagaacccaacctccgagcagtacatgctaagacttcaccagtcaaagcgaactactatactcaattgatccaataacttgaccaacggaacaagttaccctagggataacagcgcaatcctattctagagtccatatcaacaatagggtttacgacctcgatgttggatcaggacatcccaatggtgcagccgctattaaaggttcgtttgttcaacgattaaagtcctacgtgatctgagttcagaccggagtaatccaggtcggtttctatctacnttcaaattcctccctgtacgaaaggacaagagaaataaggcctacttcacaaagcgccttcccccgtaaatgatatcatctcaacttagtattatacccacacccacccaagaacagggtttgttaagatggcagagcccggtaatcgcataaaacttaaaactttacagtcagaggttcaattcctcttcttaacaacatacccatggccaacctcctactcctcattgtacccattctaatcgcaatggcattcctaatgcttaccgaacgaaaaattctaggctatatacaactacgcaaaggccccaacgttgtaggcccctacgggctactacaacccttcgctgacgccataaaactcttcaccaaagagcccctaaaacccgccacatctaccatcaccctctacatcaccgccccgaccttagctctcaccatcgctcttctactatgaacccccctccccatacccaaccccctggtcaacctcaacctaggcctcctatttattctagccacctctagcctagccgtttactcaatcctctgatcagggtgagcatcaaactcaaactacgccctgatcggcgcactgcgagcagtagcccaaacaatctcatatgaagtcaccctagccatcattctactatcaacattactaataagtggctcctttaacctctccacccttatcacaacacaagaacacctctgattactcctgccatcatgacccttggccataatatgatttatctccacactagcagagaccaaccgaacccccttcgaccttgccgaaggggagtccgaactagtctcaggcttcaacatcgaatacgccgcaggccccttcgccctattcttcatagccgaatacacaaacattattataataaacaccctcaccactacaatcttcctaggaacaacatatgacgcactctcccctgaactctacacaacatattttgtcaccaagaccctacttctaacctccctgttcttatgaattcgaacagcatacccccgattccgctacgaccaactcatacacctcctatgaaaaaacttcctaccactcaccctagcattacttatatgatatgtctccatacccattacaatctccagcattccccctcaaacctaagaaatatgtctgataaaagagttactttgatagagtaaataataggagcttaaacccccttatttctaggactatgagaatcgaacccatccctgagaatccaaaattctccgtgccacctatcacaccccatcctaaagtaaggtcagctaaataagctatcgggcccataccccgaaaatgttggttatacccttcccgtactaattaatcccctggcccaacccgtcatctactctaccatctttgcaggcacactcatcacagcgctaagctcgcactgattttttacctgagtaggcctagaaataaacatgctagcttttattccagttctaaccaaaaaaataaaccctcgttccacagaagctgccatcaagtatttcctcacgcaagcaaccgcatccataatccttctaatagctatcctcttcaacaatatactctccggacaatgaaccataaccaatactaccaatcaatactcatcattaataatcataatggctatagcaataaaactaggaatagccccctttcacttctgagtcccagaggttacccaaggcacccctctgacatccggcctgcttcttctcacatgacaaaaactagcccccatctcaatcatataccaaatctctccctcactaaacgtaagccttctcctcactctctcaatcttatccatcatagcaggcagttgaggtggattaaaccaaacccagctacgcaaaatcttagcatactcctcaattacccacataggatgaataatagcagttctaccgtacaaccctaacataaccattcttaatttaactatttatattatcctaactactaccgcattcctactactcaacttaaactccagcaccacgaccctactactatctcgcacctgaaacaagctaacatgactaacacccttaattccatccaccctcctctccctaggaggcctgcccccgctaaccggctttttgcccaaatgggccattatcgaagaattcacaaaaaacaatagcctcatcatccccaccatcatagccaccatcaccctccttaacctctacttctacctacgcctaatctactccacctcaatcacactactccccatatctaacaacgtaaaaataaaatgacagtttgaacatacaaaacccaccccattcctccccacactcatcgcccttaccacgctactcctacctatctccccttttatactaataatcttatagaaatttaggttaaatacagaccaagagccttcaaagccctcagtaagttgcaatacttaatttctgtaacagctaaggactgcaaaaccccactctgcatcaactgaacgcaaatcagccactttaattaagctaagcccttactagaccaatgggacttaaacccacaaacacttagttaacagctaagcaccctaatcaactggcttcaatctacttctcccgccgccgggaaaaaaggcgggagaagccccggcaggtttgaagctgcttcttcgaatttgcaattcaatatgaaaatcacctcggagctggtaaaaagaggcctaacccctgtctttagatttacagtccaatgcttcactcagccattttacctcacccccactgatgttcgccgaccgttgactattctctacaaaccacaaagacattggaacactatacctattattcggcgcatgagctggagtcctaggcacagctctaagcctccttattcgagccgagctgggccagccaggcaaccttctaggtaacgaccacatctacaacgttatcgtcacagcccatgcatttgtaataatcttcttcatagtaatacccatcataatcggaggctttggcaactgactagttcccctaataatcggtgcccccgatatggcgtttccccgcataaacaacataagcttctgactcttacctccctctctcctactcctgctcgcatctgctatagtggaggccggagcaggaacaggttgaacagtctaccctcccttagcagggaactactcccaccctggagcctccgtagacctaaccatcttctccttacacctagcaggtgtctcctctatcttaggggccatcaatttcatcacaacaattatcaatataaaaccccctgccataacccaataccaaacgcccctcttcgtctgatccgtcctaatcacagcagtcctacttctcctatctctcccagtcctagctgctggcatcactatactactaacagaccgcaacctcaacaccaccttcttcgaccccgccggaggaggagaccccattctataccaacacctattctgatttttcggtcaccctgaagtttatattcttatcctaccaggcttcggaataatctcccatattgtaacttactactccggaaaaaaagaaccatttggatacataggtatggtctgagctatgatatcaattggcttcctagggtttatcgtgtgagcacaccatatatttacagtaggaatagacgtagacacacgagcatatttcacctccgctaccataatcatcgctatccccaccggcgtcaaagtatttagctgactcgccacactccacggaagcaatatgaaatgatctgctgcagtgctctgagccctaggattcatctttcttttcaccgtaggtggcctgactggcattgtattagcaaactcatcactagacatcgtactacacgacacgtactacgttgtagcccacttccactatgtcctatcaataggagctgtatttgccatcataggaggcttcattcactgatttcccctattctcaggctacaccctagaccaaacctacgccaaaatccatttcactatcatattcatcggcgtaaatctaactttcttcccacaacactttctcggcctatccggaatgccccgacgttactcggactaccccgatgcatacaccacatgaaacatcctatcatctgtaggctcattcatttctctaacagcagtaatattaataattttcatgatttgagaagccttcgcttcgaagcgaaaagtcctaatagtagaagaaccctccataaacctggagtgactatatggatgccccccaccctaccacacattcgaagaacccgtatacataaaatctagacaaaaaaggaaggaatcgaaccccccaaagctggtttcaagccaaccccatggcctccatgactttttcaaaaaggtattagaaaaaccatttcataactttgtcaaagttaaattataggctaaatcctatatatcttaatggcacatgcagcgcaagtaggtctacaagacgctacttcccctatcatagaagagcttatcacctttcatgatcacgccctcataatcattttccttatctgcttcctagtcctgtatgcccttttcctaacactcacaacaaaactaactaatactaacatctcagacgctcaggaaatagaaaccgtctgaactatcctgcccgccatcatcctagtcctcatcgccctcccatccctacgcatcctttacataacagacgaggtcaacgatccctcccttaccatcaaatcaattggccaccaatggtactgaacctacgagtacaccgactacggcggactaatcttcaactcctacatacttcccccattattcctagaaccaggcgacctgcgactccttgacgttgacaatcgagtagtactcccgattgaagcccccattcgtataataattacatcacaagacgtcttgcactcatgagctgtccccacattaggcttaaaaacagatgcaattcccggacgtctaaaccaaaccactttcaccgctacacgaccgggggtatactacggtcaatgctctgaaatctgtggagcaaaccacagtttcatgcccatcgtcctagaattaattcccctaaaaatctttgaaatagggcccgtatttaccctatagcaccccctctaccccctctagagcccactgtaaagctaacttagcattaaccttttaagttaaagattaagagaaccaacacctctttacagtgaaatgccccaactaaatactaccgtatggcccaccataattacccccatactccttacactattcctcatcacccaactaaaaatattaaacacaaactaccacctacctccctcaccaaagcccataaaaataaaaaattataacaaaccctgagaaccaaaatgaacgaaaatctgttcgcttcattcattgcccccacaatcctaggcctacccgccgcagtactgatcattctatttccccctctattgatccccacctccaaatatctcatcaacaaccgactaatcaccacccaacaatgactaatcaaactaacctcaaaacaaatgataaccatacacaacactaaaggacgaacctgatctcttatactagtatccttaatcatttttattgccacaactaacctcctcggactcctgcctcactcatttacaccaaccacccaactatctataaacctagccatggccatccccttatgagcgggcgcagtgattataggctttcgctctaagattaaaaatgccctagcccacttcttaccacaaggcacacctacaccccttatccccatactagttattatcgaaaccatcagcctactcattcaaccaatagccctggccgtacgcctaaccgctaacattactgcaggccacctactcatgcacctaattggaagcgccaccctagcaatatcaaccattaaccttccctctacacttatcatcttcacaattctaattctactgactatcctagaaatcgctgtcgccttaatccaagcctacgttttcacacttctagtaagcctctacctgcacgacaacacataatgacccaccaatcacatgcctatcatatagtaaaacccagcccatgacccctaacaggggccctctcagccctcctaatgacctccggcctagccatgtgatttcacttccactccataacgctcctcatactaggcctactaaccaacacactaaccatataccaatgatggcgcgatgtaacacgagaaagcacataccaaggccaccacacaccacctgtccaaaaaggccttcgatacgggataatcctatttattacctcagaagtttttttcttcgcaggatttttctgagccttttaccactccagcctagcccctaccccccaattaggagggcactggcccccaacaggcatcaccccgctaaatcccctagaagtcccactcctaaacacatccgtattactcgcatcaggagtatcaatcacctgagctcaccatagtctaatagaaaacaaccgaaaccaaataattcaagcactgcttattacaattttactgggtctctattttaccctcctacaagcctcagagtacttcgagtctcccttcaccatttccgacggcatctacggctcaacattttttgtagccacaggcttccacggacttcacgtcattattggctcaactttcctcactatctgcttcatccgccaactaatatttcactttacatccaaacatcactttggcttcgaagccgccgcctgatactggcattttgtagatgtggtttgactatttctgtatgtctccatctattgatgagggtcttactcttttagtataaatagtaccgttaacttccaattaactagttttgacaacattcaaaaaagagtaataaacttcgccttaattttaataatcaacaccctcctagccttactactaataattattacattttgactaccacaactcaacggctacatagaaaaatccaccccttacgagtgcggcttcgaccctatatcccccgcccgcgtccctttctccataaaattcttcttagtagctattaccttcttattatttgatctagaaattgccctccttttacccctaccatgagccctacaaacaactaacctgccactaatagttatgtcatccctcttattaatcatcatcctagccctaagtctggcctatgagtgactacaaaaaggattagactgaaccgaattggtatatagtttaaacaaaacgaatgatttcgactcattaaattatgataatcatatttaccaaatgcccctcatttacataaatattatactagcatttaccatctcacttctaggaatactagtatatcgctcacacctcatatcctccctactatgcctagaaggaataatactatcgctgttcattatagctactctcataaccctcaacacccactccctcttagccaatattgtgcctattgccatactagtctttgccgcctgcgaagcagcggtgggcctagccctactagtctcaatctccaacacatatggcctagactacgtacataacctaaacctactccaatgctaaaactaatcgtcccaacaattatattactaccactgacatgactttccaaaaaacacataatttgaatcaacacaaccacccacagcctaattattagcatcatccctctactattttttaaccaaatcaacaacaacctatttagctgttccccaaccttttcctccgaccccctaacaacccccctcctaatactaactacctgactcctacccctcacaatcatggcaagccaacgccacttatccagtgaaccactatcacgaaaaaaactctacctctctatactaatctccctacaaatctccttaattataacattcacagccacagaactaatcatattttatatcttcttcgaaaccacacttatccccaccttggctatcatcacccgatgaggcaaccagccagaacgcctgaacgcaggcacatacttcctattctacaccctagtaggctcccttcccctactcatcgcactaatttacactcacaacaccctaggctcactaaacattctactactcactctcactgcccaagaactatcaaactcctgagccaacaacttaatatgactagcttacacaatagcttttatagtaaagatacctctttacggactccacttatgactccctaaagcccatgtcgaagcccccatcgctgggtcaatagtacttgccgcagtactcttaaaactaggcggctatggtataatacgcctcacactcattctcaaccccctgacaaaacacatagcctaccccttccttgtactatccctatgaggcataattataacaagctccatctgcctacgacaaacagacctaaaatcgctcattgcatactcttcaatcagccacatagccctcgtagtaacagccattctcatccaaaccccctgaagcttcaccggcgcagtcattctcataatcgcccacgggcttacatcctcattactattctgcctagcaaactcaaactacgaacgcactcacagtcgcatcataatcctctctcaaggacttcaaactctactcccactaatagctttttgatgacttctagcaagcctcgctaacctcgccttaccccccactattaacctactgggagaactctctgtgctagtaaccacgttctcctgatcaaatatcactctcctacttacaggactcaacatactagtcacagccctatactccctctacatatttaccacaacacaatggggctcactcacccaccacattaacaacataaaaccctcattcacacgagaaaacaccctcatgttcatacacctatcccccattctcctcctatccctcaaccccgacatcattaccgggttttcctcttgtaaatatagtttaaccaaaacatcagattgtgaatctgacaacagaggcttacgaccccttatttaccgagaaagctcacaagaactgctaactcatgcccccatgtctaacaacatggctttctcaacttttaaaggataacagctatccattggtcttaggccccaaaaattttggtgcaactccaaataaaagtaataaccatgcacactactataaccaccctaaccctgacttccctaattccccccatccttaccaccctcgttaaccctaacaaaaaaaactcatacccccattatgtaaaatccattgtcgcatccacctttattatcagtctcttccccacaacaatattcatgtgcctagaccaagaagttattatctcgaactgacactgagccacaacccaaacaacccagctctccctaagcttcaaactagactacttctccataatattcatccctgtagcattgttcgttacatggtccatcatagaattctcactgtgatatataaactcagacccaaacattaatcagttcttcaaatatctactcatcttcctaattaccatactaatcttagttaccgctaacaacctattccaactgttcatcggctgagagggcgtaggaattatatccttcttgctcatcagttgatgatacgcccgagcagatgccaacacagcagccattcaagcaatcctatacaaccgtatcggcgatatcggtttcatcctcgccttagcatgatttatcctacactccaactcatgagacccacaacaaatagcccttctaaacgctaatccaagcctcaccccactactaggcctcctcctagcagcagcaggcaaatcagcccaattaggtctccacccctgactcccctcagccatagaaggccccaccccagtctcagccctactccactcaagcactatagttgtagcaggaatcttcttactcatccgcttccaccccctagcagaaaatagcccactaatccaaactctaacactatgcttaggcgctatcaccactctgttcgcagcagtctgcgcccttacacaaaatgacatcaaaaaaatcgtagccttctccacttcaagtcaactaggactcataatagttacaatcggcatcaaccaaccacacctagcattcctgcacatctgtacccacgccttcttcaaagccatactatttatgtgctccgggtccatcatccacaaccttaacaatgaacaagatattcgaaaaataggaggactactcaaaaccatacctctcacttcaacctccctcaccattggcagcctagcattagcaggaatacctttcctcacaggtttctactccaaagaccacatcatcgaaaccgcaaacatatcatacacaaacgcctgagccctatctattactctcatcgctacctccctgacaagcgcctatagcactcgaataattcttctcaccctaacaggtcaacctcgcttccccacccttactaacattaacgaaaataaccccaccctactaaaccccattaaacgcctggcagccggaagcctattcgcaggatttctcattactaacaacatttcccccgcatcccccttccaaacaacaatccccctctacctaaaactcacagccctcgctgtcactttcctaggacttctaacagccctagacctcaactacctaaccaacaaacttaaaataaaatccccactatgcacattttatttctccaacatactcggattctaccctagcatcacacaccgcacaatcccctatctaggccttcttacgagccaaaacctgcccctactcctcctagacctaacctgactagaaaagctattacctaaaacaatttcacagcaccaaatctccacctccatcatcacctcaacccaaaaaggcataattaaactttacttcctctctttcttcttcccactcatcctaaccctactcctaatcacataacctattcccccgagcaatctcaattacaatatatacaccaacaaacaatgttcaaccagtaactactactaatcaacgcccataatcatacaaagcccccgcaccaataggatcctcccgaatcaaccctgacccctctccttcataaattattcagcttcctacactattaaagtttaccacaaccaccaccccatcatactctttcacccacagcaccaatcctacctccatcgctaaccccactaaaacactcaccaagacctcaacccctgacccccatgcctcaggatactcctcaatagccatcgctgtagtatatccaaagacaaccatcattccccctaaataaattaaaaaaactattaaacccatataacctcccccaaaattcagaataataacacacccgaccacaccgctaacaatcaatactaaacccccataaataggagaaggcttagaagaaaaccccacaaaccccattactaaacccacactcaacagaaacaaagcatacatcattattctcgcacggactacaaccacgaccaatgatatgaaaaaccatcgttgtatttcaactacaagaacaccaatgaccccaatacgcaaaactaaccccctaataaaattaattaaccactcattcatcgacctccccaccccatccaacatctccgcatgatgaaacttcggctcactccttggcgcctgcctgatcctccaaatcaccacaggactattcctagccatgcactactcaccagacgcctcaaccgccttttcatcaatcgcccacatcactcgagacgtaaattatggctgaatcatccgctaccttcacgccaatggcgcctcaatattctttatctgcctcttcctacacatcgggcgaggcctatattacggatcatttctctactcagaaacctgaaacatcggcattatcctcctgcttgcaactatagcaacagccttcataggctatgtcctcccgtgaggccaaatatcattctgaggggccacagtaattacaaacttactatccgccatcccatacattgggacagacctagttcaatgaatctgaggaggctactcagtagacagtcccaccctcacacgattctttacctttcacttcatcttgcccttcattattgcagccctagcagcactccacctcctattcttgcacgaaacgggatcaaacaaccccctaggaatcacctcccattccgataaaatcaccttccacccttactacacaatcaaagacgccctcggcttacttctcttccttctctccttaatgacattaacactattctcaccagacctcctaggcgacccagacaattataccctagccaaccccttaaacacccctccccacatcaagcccgaatgatatttcctattcgcctacacaattctccgatccgtccctaacaaactaggaggcgtccttgccctattactatccatcctcatcctagcaataatccccatcctccatatatccaaacaacaaagcataatatttcgcccactaagccaatcactttattgactcctagccgcagacctcctcattctaacctgaatcggaggacaaccagtaagctacccttttaccatcattggacaagtagcatccgtactatacttcacaacaatcctaatcctaataccaactatctccctaattgaaaacaaaatactcaaatgggcctgtccttgtagtataaactaatacaccagtcttgtaaaccggagatgaaaacctttttccaaggacaaatcagagaaaaagtctttaactccaccattagcacccaaagctaagattctaatttaaactattctctgttctttcatggggaagcagatttgggtaccacccaagtattgactcacccatcaacaaccgctatgtatttcgtacattactgccagccaccatgaatattgtacggtaccataaatacttgaccacctgtagtacataaaaacccaatccacatcaaaaccccccccccatgcttacaagcaagtacagcaatcaaccctcaactatcacacatcaactgcaactccaaagccacccctcacccactaggataccaacaaacctacccccccttaacagtacatagtacataaagccatttaccgtacatagcacattacagtcaaatcccttctcgtccccatggatgacccccctcagataggggtcccttgaccaccatcctccgtgaaatcaatatcccgcacaagagtgctactctcctcgctccgggcccataacacttgggggtagctaaagtgaactgtatccgacatctggttcctacttcagggccataaagcctaaatagcccacacgttccccttaaataagacatcacgatg

SEQ ID NO: 123 - DNA, 16571 bp, Homo sapiens mitochondrial
  3109: "n" refers to a nucleotide at position 3107 of the Cambridge Reference Sequence (CRS, Anderson et al. 1981 Nature 290:457-465), later determined to be absent from the human mtDNA sequence according to the revised CRS (rCRS, Andrews et al. 1999 Nature Genetics 23:147); "n" therefore represents a single nucleotide deletion at a position corresponding to nucleotide 3107 of SEQ ID NO:1 as provided herein.
gatcacaggtctatcaccctattaaccactcacgggagctctccatgcatttggtattttcgtctggggggtgtgcacgcgatagcattgcgagacgctggagccggagcaccctatgtcgcagtatctgtctttgattcctgcctcattccattatttatcgcacctacgttcaatattacaggcgaacatacttactaaagtgtgttaattaattaatgcttgtaggacataataataacaattgaatgtctgcacagccgctttccacacagacatcataacaaaaaattttcaccaaaccccccctcccccccgcttctggccacagcacttaaacacatctctgccaaaccccaaaaacaaagaaccctaacaccagcctaaccagatttcaaattttatcttttggcggtatgcacttttaacagtcaccccccaactaacacattattttcccctcccactcccatactactaatctcatcaacacaacccccgcccatcctacccagcacacacacaccgctgctaaccccataccccgaaccaaccaaaccccaaagacaccccccacagtttatgtagcttacctcctcaaagcaatacactgaaaatgtttagacgggctcacatcaccccataaacaaataggtttggtcctagcctttctattagctcttagtaagattacacatgcaagcatccccgttccagtgagttcaccctctaaatcaccacgatcaaaagggacaagcatcaagcacgcagcaatgcagctcaaaacgcttagcctagccacacccccacgggaaacagcagtgattaacctttagcaataaacgaaagtttaactaagctatactaaccccagggttggtcaatttcgtgccagccaccgcggtcacacgattaacccaagtcaatagaagccggcgtaaagagtgttttagatcaccccctccccaataaagctaaaactcacctgagttgtaaaaaactccagttgacacaaaatagactacgaaagtggctttaacatatctgaacacacaatagctaagacccaaactgggattagataccccactatgcttagccctaaacctcaacagttaaatcaacaaaactgctcgccagaacactacgagccacagcttaaaactcaaaggacctggcggtgcttcatatccctctagaggagcctgttctgtaatcgataaaccccgatcaacctcaccacctcttgctcagcctatataccgccatcttcagcaaaccctgatgaaggctacaaagtaagcgcaagtacccacgtaaagacgttaggtcaaggtgtagcccatgaggtggcaagaaatgggctacattttctaccccagaaaactacgatagcccttatgaaacttaagggtcgaaggtggatttagcagtaaactgagagtagagtgcttagttgaacagggccctgaagcgcgtacacaccgcccgtcaccctcctcaagtatacttcaaaggacatttaactaaaacccctacgcatttatatagaggagacaagtcgtaacatggtaagtgtactggaaagtgcacttggacgaaccagagtgtagcttaacacaaagcacccaacttacacttaggagatttcaacttaacttgaccgctctgagctaaacctagccccaaacccactccaccttactaccagacaaccttaaccaaaccatttacccaaataaagtataggcgatagaaattgaaacctggcgcaatagatatagtaccgcaagggaaagatgaaaaattataaccaagcataatatagcaaggactaacccctataccttctgcataatgaattaactagaaataactttgcaaggagagccaaagctaagacccccgaaaccagacgagctacctaagaacagctaaaagagcacacccgtctatgtagcaaaatagtgggaagatttataggtagaggcgacaaacctaccgagcctggtgatagctggttgtccaagatagaatcttagttcaactttaaatttgcccacagaaccctctaaatccccttgtaaatttaactgttagtccaaagaggaacagctctttggacactaggaaaaaaccttgtagagagagtaaaaaatttaacacccatagtaggcctaaaagcagccaccaattaagaaagcgttcaagctcaacacccactacctaaaaaatcccaaacatataactgaactcctcacacccaattggaccaatctatcaccctatagaagaactaatgttagtataagtaacatgaaaacattctcctccgcataagcctgcgtcagattaaaacactgaactgacaattaacagcccaatatctacaatcaaccaacaagtcattattaccctcactgtcaacccaacacaggcatgctcataaggaaaggttaaaaaaagtaaaaggaactcggcaaatcttaccccgcctgtttaccaaaaacatcacctctagcatcaccagtattagaggcaccgcctgcccagtgacacatgtttaacggccgcggtaccctaaccgtgcaaaggtagcataatcacttgttccttaaatagggacctgtatgaatggctccacgagggttcagctgtctcttacttttaaccagtgaaattgacctgcccgtgaagaggcgggcatgacacagcaagacgagaagaccctatggagctttaatttattaatgcaaacagtacctaacaaacccacaggtcctaaactaccaaacctgcattaaaaatttcggttggggcgacctcggagcagaacccaacctccgagcagtacatgctaagacttcaccagtcaaagcgaactactatactcaattgatccaataacttgaccaacggaacaagttaccctagggataacagcgcaatcctattctagagtccatatcaacaatagggtttacgacctcgatgttggatcaggacatcccgatggtgcagccgctattaaaggttcgtttgttcaacgattaaagtcctacgtgatctgagttcagaccggagtaatccaggtcggtttctatctacnttcaaattcctccctgtacgaaaggacaagagaaataaggcctacttcacaaagcgccttcccccgtaaatgatatcatctcaacttagtattatacccacacccacccaagaacagggtttgttaagatggcagagcccggtaatcgcataaaacttaaaactttacagtcagaggttcaattcctcttcttaacaacatacccatggccaacctcctactcctcattgtacccattctaatcgcaatggcattcctaatgcttaccgaacgaaaaattctaggctatatacaactacgcaaaggccccaacgttgtaggcccctacgggctactacaacccttcgctgacgccataaaactcttcaccaaagagcccctaaaacccgccacatctaccatcaccctctacatcaccgccccgaccttagctctcaccatcgctcttctactatgaacccccctccccatacccaaccccctggtcaacctcaacctaggcctcctatttattctagccacctctagcctagccgtttactcaatcctctgatcagggtgagcatcaaactcaaactacgccctgatcggcgcactgcgagcagtagcccaaacaatctcatatgaagtcaccctagccatcattctactatcaacattactaataagtggctcctttaacctctccacccttatcacaacacaagaacacctctgattactcctgccatcatgacccttggccataatatgatttatctccacactagcagagaccaaccgaacccccttcgaccttgccgaaggggagtccgaactagtctcaggcttcaacatcgaatacgccgcaggccccttcgccctattcttcatagccgaatacacaaacattattataataaacaccctcaccactacaatcttcctaggaacaacatatgacgcactctcccctgaactctacacaacatattttgtcaccaagaccctacttctaacctccctgttcttatgaattcgaacagcatacccccgattccgctacgaccaactcatacacctcctatgaaaaaacttcctaccactcaccctagcattacttatatgacatgtctccatacccattacaatctccagcattccccctcaaacctaagaaatatgtctgataaaagagttactttgatagagtaaataataggagcttaaacccccttatttctaggactatgagaatcgaacccatccctgagaatccaaaattctccgtgccacctatcacaccccatcctaaagtaaggtcagctaaataagctatcgggcccataccccgaaaatgttggttatacccttcccgtactaattaatcccctggcccaacccgtcatctactctaccatctttgcaggcacactcatcacagcgctaagctcgcactgattttttacctgagtaggcctagaaataaacatgctagcttttattccagttctaaccaaaaaaataaaccctcgttccacagaagctgccatcaagtatttcctcacgcaagcaaccgcatccataatccttctaatagctatcctcttcaacaatatactctccggacaatgaaccataaccaatactaccaatcaatactcatcattaataatcataatggctatagcaataaaactaggaatagccccctttcacttctgagtcccagaggttacccaaggcacccctctgacatccggcctgcttcttctcacatgacaaaaactagcccccatctcaatcatataccaaatctctccctcactaaacgtaagccttctcctcactctctcaatcttatccatcatagcaggcagttgaggtggattaaaccaaacccagctacgcaaaatcttagcatactcctcaattacccacataggatgaataatagcagttctaccgtacaaccctaacataaccattcttaatttaactatttatattatcctaactactaccgcattcctactactcaacttaaactccagcaccacgaccctactactatctcgcacctgaaacaagctaacatgactaacacccttaattccatccaccctcctctccctaggaggcctgcccccgctaaccggctttttgcccaaatgggccattatcgaagaattcacaaaaaacaatagcctcatcatccccaccatcatagccaccatcaccctccttaacctctacttctacctacgcctaatctactccacctcaatcacactactccccatatctaacaacgtaaaaataaaatgacagtttgaacatacaaaacccaccccattcctccccacactcatcgcccttaccacgctactcctacctatctccccttttatactaataatcttatagaaatttaggttaaatacagaccaagagccttcaaagccctcagtaagttgcaatacttaatttctgtaacagctaaggactgcaaaaccccactctgcatcaactgaacgcaaatcagctactttaattaagctaagcccttactagaccaatgggacttaaacccacaaacacttagttaacagctaagcaccctaatcaactggcttcaatctacttctcccgccgccgggaaaaaaggcgggagaagccccggcaggtttgaagctgcttcttcgaatttgcaattcaatatgaaaatcacctcggagctggtaaaaagaggcctaacccctgtctttagatttacagtccaatgcttcactcagccattttacctcacccccactgatgttcgccgaccgttgactattctctacaaaccacaaagacattggaacactatacctattattcggcgcatgagctggagtcctaggcacagctctaagcctccttattcgagccgagctgggccagccaggcaaccttctaggtaacgaccacatctacaacgttatcgtcacagcccatgcatttgtaataatcttcttcatagtaatacccatcataatcggaggctttggcaactgactagttcccctaataatcggtgcccccgatatggcgtttccccgcataaacaacataagcttctgactcttacctccctctctcctactcctgctcgcatctgctatagtggaggccggagcaggaacaggttgaacagtctaccctcccttagcagggaactactcccaccctggagcctccgtagacctaaccatcttctccttacacctagcaggtgtctcctctatcttaggggccatcaatttcatcacaacaattatcaatataaaaccccctgccataacccaataccaaacgcccctcttcgtctgatccgtcctaatcacagcagtcctacttctcctatctctcccagtcctagctgctggcatcactatactactaacagaccgcaacctcaacaccaccttcttcgaccccgccggaggaggagaccccattctataccaacacctattctgatttttcggtcaccctgaagtttatattcttatcctaccaggcttcggaataatctcccatattgtaacttactactccggaaaaaaagaaccatttggatacataggtatggtctgagctatgatatcaattggcttcctagggtttatcgtgtgagcacaccatatatttacagtaggaatagacgtagacacacgagcatatttcacctccgctaccataatcatcgctatccccaccggcgtcaaagtatttagctgactcgccacactccacggaagcaatatgaaatgatctgctgcagtgctctgagccctaggattcatctttcttttcaccgtaggtggcctgactggcattgtattagcaaactcatcactagacatcgtactacacgacacgtactacgttgtagctcacttccactatgtcctatcaataggagctgtatttgccatcataggaggcttcattcactgatttcccctattctcaggctacaccctagaccaaacctacgccaaaatccatttcactatcatattcatcggcgtaaatctaactttcttcccacaacactttctcggcctatccggaatgccccgacgttactcggactaccccgatgcatacaccacatgaaacatcctatcatctgtaggctcattcatttctctaacagcagtaatattaataattttcatgatttgagaagccttcgcttcgaagcgaaaagtcctaatagtagaagaaccctccataaacctggagtgactatatggatgccccccaccctaccacacattcgaagaacccgtatacataaaatctagacaaaaaaggaaggaatcgaaccccccaaagttggtttcaagccaaccccatggcctccatgactttttcaaaaaggtattagaaaaaccatttcataactttgtcaaagttaaattataggctaaatcctatatatcttaatggcacatgcagcgcaagtaggtctacaagacgctacttcccctatcatagaagagcttatcacctttcatgatcacgccctcataatcattttccttatctgcttcctagtcctgtatgcccttttcctaacactcacaacaaaactaactaatactaacatctcagacgctcaggaaatagaaaccgtctgaactatcctgcccgccatcatcctagtcctcatcgccctcccatccctacgcatcctttacataacagacgaggtcaacgatccctcccttaccatcaaatcaattggccaccaatggtactgaacctacgagtacaccgactacggcggactaatcttcaactcctacatacttcccccattattcctagaaccaggcgacctgcgactccttgacgttgacaatcgagtagtactcccgattgaagcccccattcgtataataattacatcacaagacgtcttgcactcatgagctgtccccacattaggcttaaaaacagatgcaattcccggacgtctaaaccaaaccactttcaccgctacacgaccgggggtatactacggtcaatgctctgaaatctgtggagcaaaccacagtttcatgcccatcgtcctagaattaattcccctaaaaatctttgaaatagggcccgtatttaccctatagcaccccctctaccccctctagagcccactgtaaagctaacttagcattaaccttttaagttaaagattaagagaaccaacacctctttacagtgaaatgccccaactaaatactaccgtatggcccaccataattacccccatactccttacactattcctcatcacccaactaaaaatattaaacacaaactaccacctacctccctcaccaaagcccataaaaataaaaaattataacaaaccctgagaaccaaaatgaacgaaaatctgttcgcttcattcattgcccccacaatcctaggcctacccgccgcagtactgatcattctatttccccctctattgatccccacctccaaatatctcatcaacaaccgactaatcaccacccaacaatgactaatcaaactaacctcaaaacaaatgataaccatacacaacactaaaggacgaacctgatctcttatactagtatccttaatcatttttattgccacaactaacctcctcggactcctgcctcactcatttacaccaaccacccaactatctataaacctagccatggccatccccttatgagcgggcgcagtgattataggctttcgctctaagattaaaaatgccctagcccacttcttaccacaaggcacacctacaccccttatccccatactagttattatcgaaaccatcagcctactcattcaaccaatagccctggccgtacgcctaaccgctaacattactgcaggccacctactcatgcacctaattggaagcgccaccctagcaatatcaaccattaaccttccctctacacttatcatcttcacaattctaattctactgactatcctagaaatcgctgtcgccttaatccaagcctacgttttcacacttctagtaagcctctacctgcacgacaacacataatgacccaccaatcacatgcctatcatatagtaaaacccagcccatgacccctaacaggggccctctcagccctcctaatgacctccggcctagccatgtgatttcacttccactccataacgctcctcatactaggcctactaaccaacacactaaccatataccaatgatggcgcgatgtaacacgagaaagcacataccaaggccaccacacaccacctgtccaaaaaggccttcgatacgggataatcctatttattacctcagaagtttttttcttcgcaggatttttctgagccttttaccactccagcctagcccctaccccccaattaggagggcactggcccccaacaggcatcaccccgctaaatcccctagaagtcccactcctaaacacatccgtattactcgcatcaggagtatcaatcacctgagctcaccatagtctaatagaaaacaaccgaaaccaaataattcaagcactgcttattacaattttactgggtctctattttaccctcctacaagcctcagagtacttcgagtctcccttcaccatttccgacggcatctacggctcaacattttttgtagccacaggcttccacggacttcacgtcattattggctcaactttcctcactatctgcttcatccgccaactaatatttcactttacatccaaacatcactttggcttcgaagccgccgcctgatactggcattttgtagatgtggtttgactatttctgtatgtctccatctattgatgagggtcttactcttttagtataaatagtaccgttaacttccaattaactagttttgacaacattcaaaaaagagtaataaacttcgccttaattttaataatcaacaccctcctagccttactactaataattattacattttgactaccacaactcaacggctacatagaaaaatccaccccttacgaatgcggcttcgaccctatatcccccgcccgcgtccctttctccataaaattcttcttagtagctattaccttcttattatttgatctagaaattgccctccttttacccctaccatgagccctacaaacaactaacctgccactaatagttatgtcatccctcttattaatcatcatcctagccctaagtctggcctatgagtgactacaaaaaggattagactgagccgaattggtatatagtttaaacaaaacgaatgatttcgactcattaaattatgataatcatatttaccaaatgcccctcatttacataaatattatactagcatttaccatctcacttctaggaatactagtatatcgctcacacctcatatcctccctactatgcctagaaggaataatactatcgctgttcattatagctactctcataaccctcaacacccactccctcttagccaatattgtgcctattgccatactagtctttgccgcctgcgaagcagcggtgggcctagccctactagtctcaatctccaacacatatggcctagactacgtacataacctaaacctactccaatgctaaaactaatcgtcccaacaattatattactaccactgacatgactttccaaaaaacacataatttgaatcaacacaaccacccacagcctaattattagcatcatccctctactattttttaaccaaatcaacaacaacctatttagctgttccccaaccttttcctccgaccccctaacaacccccctcctaatactaactacctgactcctacccctcacaatcatggcaagccaacgccacttatccagtgaaccactatcacgaaaaaaactctacctctctatactaatctccctacaaatctccttaattataacattcacagccacagaactaatcatattttatatcttcttcgaaaccacacttatccccaccttggctatcatcacccgatgaggcaaccagccagaacgcctgaacgcaggcacatacttcctattctacaccctagtaggctcccttcccctactcatcgcactgatttacactcacaacaccctaggctcactaaacattctactactcactctcactgcccaagaactatcaaactcctgagccaacaacttaatatgactagcttacacaatagcttttatagtaaagatacctctttacggactccacttatgactccctaaagcccatgtcgaagcccccatcgctgggtcaatagtacttgccgcagtactcttaaaactaggcggctatggtataatacgcctcacactcattctcaaccccctgacaaaacacatagcctaccccttccttgtactatccctatgaggcataattataacaagctccatctgcctacgacaaacagacctaaaatcgctcattgcatactcttcaatcagccacatagccctcgtagtaacagccattctcatccaaaccccctgaagcttcaccggcgcagtcattctcataatcgcccacggacttacatcctcattactattctgcctagcaaactcaaactacgaacgcactcacagtcgcatcataatcctctctcaaggacttcaaactctactcccactaatagctttttgatgacttctagcaagcctcgctaacctcgccttaccccccactattaacctactgggagaactctctgtgctagtaaccacgttctcctgatcaaatatcactctcctacttacaggactcaacatactagtcacagccctatactccctctacatatttaccacaacacaatggggctcactcacccaccacattaacaacataaaaccctcattcacacgagaaaacaccctcatgttcatacacctatcccccattctcctcctatccctcaaccccgacatcattaccgggttttcctcttgtaaatatagtttaaccaaaacatcagattgtgaatctgacaacagaggcttacgaccccttatttaccgagaaagctcacaagaactgctaactcatgcccccatgtctaacaacatggctttctcaacttttaaaggataacagctatccattggtcttaggccccaaaaattttggtgcaactccaaataaaagtaataaccatgcacactactataaccaccctaaccctgacttccctaattccccccatccttaccaccctcgttaaccctaacaaaaaaaactcatacccccattatgtaaaatccattgtcgcatccacctttattatcagtctcttccccacaacaatattcatgtgcctagaccaagaagttattatctcgaactgacactgagccacaacccaaacaacccagctctccctaagcttcaaactagactacttctccataatattcatccctgtggcattgttcgttacatggtccatcatagaattctcactgtgatatataaactcagacccaaacattaatcagttcttcaaatatctactcatcttcctaattaccatactaatcttagttaccgctaacaacctattccaactgttcatcggctgagagggcgtaggaattatatccttcttgctcatcagttgatgatacgcccgagcagatgccaacacagcagccattcaagcaatcctatacaaccgtatcggcgatatcggtttcatcctcgccttagcatgatttatcctacactccaactcatgagacccacaacaaatagcccttctaaacgctaatccaagcctcaccccactactaggcctcctcctagcagcagcaggcaaatcagcccaattaggtctccacccctgactcccctcagccatagaaggccccaccccagtctcagccctactccactcaagcactatagttgtagcaggaatcttcttactcatccgcttccaccccctagcagaaaatagcccactaatccaaactctaacactatgcttaggcgctatcaccactctgttcgcagcagtctgcgcccttacacaaaatgacatcaaaaaaatcgtagccttctccacttcaagtcaactaggactcataatagttacaatcggcatcaaccaaccacacctagcattcctgcacatctgtacccacgccttcttcaaagccatactatttatgtgctccgggtccatcatccacaaccttaacaatgaacaagatattcgaaaaataggaggactactcaaaaccatacctctcacttcaacctccctcaccattggcagcctagcattagcaggaatacctttcctcacaggtttctactccaaagaccacatcatcgaaaccgcaaacatatcatacacaaacgcctgagccctatctattactctcatcgctacctccctgacaagcgcctatagcactcgaataattcttctcaccctaacaggtcaacctcgcttccccacccttactaacattaacgaaaataaccccaccctactaaaccccattaaacgcctgacagccggaagcctattcgcaggatttctcattactaacaacatttcccccgcatcccccttccaaacaacaatccccctctacctaaaactcacagccctcgctgtcactttcctaggacttctaacagccctagacctcaactacctaaccaacaaacttaaaataaaatccccactatgcacattttatttctccaacatactcggattctaccctagcatcacacaccgcacaatcccctatctaggccttcttacgagccaaaacctgcccctactcctcctagacctaacctgactagaaaagctattacctaaaacaatttcacagcaccaaatctccacctccatcatcacctcaacccaaaaaggcataattaaactttacttcctctctttcttcttcccactcatcctaaccctactcctaatcacataacctattcccccgagcaatctcaattacaatatatacaccaacaaacaatgttcaaccagtaactactactaatcaacgcccataatcatacaaagcccccgcaccaataggatcctcccgaatcaaccctgacccctctccttcataaattattcagcttcctacactattaaagtttaccacaaccaccaccccatcatactctttcacccacagcaccaatcctacctccatcgctaaccccactaaaacactcaccaagacctcaacccctgacccccatgcctcaggatactcctcaatagccatcgctgtagtatatccaaagacaaccatcattccccctaaataaattaaaaaaactattaaacccatataacctcccccaaaattcagaataataacacacccgaccacaccactaacaatcaatactaaacccccataaataggagaaggcttagaagaaaaccccacaaaccccattactaaacccacactcaacagaaacaaagcatacatcattattctcgcacggactacaaccacgaccaatgatatgaaaaaccatcgttgtatttcaactacaagaacaccaatgaccccaatacgcaaaattaaccccctaataaaattaattaaccactcattcatcgacctccccaccccatccaacatctccgcatgatgaaacttcggctcactccttggcgcctgcctgatcctccaaatcaccacaggactattcctagccatgcactactcaccagacgcctcaaccgccttttcatcaatcgcccacatcactcgagacgtaaattatggctgaatcatccgctaccttcacgccaatggcgcctcaatattctttatctgcctcttcctacacatcgggcgaggcctatattacggatcatttctctactcagaaacctgaaacatcggcattatcctcctgcttgcaactatagcaacagccttcataggctatgtcctcccgtgaggccaaatatcattctgaggggccacagtaattacaaacttactatccgccatcccatacattgggacagacctagttcaatgaatctgaggaggctactcagtaaacagtcccaccctcacacgattctttacctttcacttcatcttgcccttcattattgcagccctagcagcactccacctcctattcttgcacgaaacgggatcaaacaaccccctaggaatcacctcccattccgataaaatcaccttccacccttactacacaatcaaagacgccctcggcttacttctcttcattctctccttaatgacattaacactattctcaccagacctcctaggcgacccagacaattataccctagccaaccccttaaacacccctccccacatcaagcccgaatgatatttcctattcgcctacacaattctccgatccgtccctaacaaactaggaggcgtccttgccctattactatccatcctcatcctagcaataatccccatcctccatatatccaaacaacaaagcataatatttcgcccactaagccaatcactttattgactcctagccgcagacctcctcattctaacctgaatcggaggacaaccagtaagctacccttttaccatcattggacaagtagcatccatactatacttcacaacaatcctaatcctaataccaactatctccctaattgaaaacaaaatactcaaatgggcctgtccttgtagtataaactaatacaccagtcttgtaaaccggagatgaaaacctttttccaaggacaaatcagagaaaaagtctttaactccaccattagcacccaaagctaagattctaatttaaactattctctgttctttcatggggaagcagatttgggtaccacccaagtattgacttacccatcaacaaccgctatgtatttcgtacattactgccagccaccatgaatattgcacggtaccataaatacttgaccacctgtagtacataaaaacccaatccacatcaaaaccccctccctatgcttacaagcaagtacagcaatcaaccctcaactatcacacatcaactgcaactccaaagccacccctcacccactaggatatcaacaaacctacccacccttaacagtacatagtacataaagccatttaccgtacatagcacattacagtcaaatcccttctcgtccccatggatgacccccctcagataggggtcccttgaccaccatcctccgtgaaatcaatatcccgcacaagagtgctactctcctcgctccgggcccataacacttgggggtagctaaagtgaactgtatccgacatctggttcctacttcagggtcataaagcctaaatagcccacacgttccccttaaataagacatcacgatg

SEQ ID NO: 124 - DNA, 16570 bp, Homo sapiens mitochondrial
  3108: "n" refers to a nucleotide at position 3107 of the Cambridge Reference Sequence (CRS, Anderson et al. 1981 Nature 290:457-465), later determined to be absent from the human mtDNA sequence according to the revised CRS (rCRS, Andrews et al. 1999 Nature Genetics 23:147); "n" therefore represents a single nucleotide deletion at a position corresponding to nucleotide 3107 of SEQ ID NO:1 as provided herein.
gatcacaggtctatcaccctattaaccactcacgggagctctccatgcatttggtattttcgtctggggggtgtgcacgcgatagcattgcgagacgctggagccggagcaccctatgtcgcagtatctgtctttgattcctgcctcattctattatttatcgcacctacgttcaatattacaggcgaacatacttactaaagtgtgttaattaattaatgcttgtaggacataataataacaattgaatgtctgcacagccgctttccacacagacatcataacaaaaaatttccaccaaaccccccctccccccggttctggccacagcacttaaacacatctctgccaaaccccaaaaacaaagaaccctaacaccagcctaaccagatttcaaattttatcttttggcggtatgcacttttaacagtcaccccccaactaacacattattttcccctcccactcccatactactaatctcatcaatacaacccccgcccatcctacccagcacacacacaccgctgctaaccccataccccgaaccaaccaaaccccaaagacaccccccacagtttatgtagcttacctcctcaaagcaatacactgaaaatgtttagacgggctcacatcaccccataaacaaataggtttggtcctagcctttctattagctcttagtaagattacacatgcaagcatccccgttccagtgagttcaccctctaaatcaccacgatcaaaagggacaagcatcaagcacgcagcaatgcagctcaaaacgcttagcctagccacacccccacgggaaacagcagtgattaacctttagcaataaacgaaagtttaactaagctatactaaccccagggttggtcaatttcgtgccagccaccgcggtcacacgattaacccaagtcaatagaagccggcgtaaagagtgttttagatcaccccctccccaataaagctaaaactcacctgagttgtaaaaaactccagttgacacaaaatagactacgaaagtggctttaacatatctgaacacacaatagctaagacccaaactgggattagataccccactatgcttagccctaaacctcaacagttaaatcaacaaaactgctcgccagaacactacgagccacagcttaaaactcaaaggacctggcggtgcttcatatccctctagaggagcctgttctgtaatcgataaaccccgatcaacctcaccacctcttgctcagcctatataccgccatcttcagcaaaccctgatgaaggctacaaagtaagcgcaagtacccacgtaaagacgttaggtcaaggtgtagcccatgaggtggcaagaaatgggctacattttctaccccagaaaactacgatagcccttatgaaacttaagggtcgaaggtggatttagcagtaaactgagagtagagtgcttagttgaacagggccctgaagcgcgtacacaccgcccgtcaccctcctcaagtatacttcaaaggacatttaactaaaacccctacgcatttatatagaggagacaagtcgtaacatggtaagtgtactggaaagtgcacttggacgaaccagagtgtagcttaacacaaagcacccaacttacacttaggagatttcaacttaacttgaccgctctgagctaaacctagccccaaacccactccaccttactaccagacaaccttagccaaaccatttacccaaataaagtataggcgatagaaattgaaacctggcgcaatagatatagtaccgcaagggaaagatgaaaaattataaccaagcataatatagcaaggactaacccctataccttctgcataatgaattaactagaaataactttgcaaggagagccaaagctaagacccccgaaaccagacgagctacctaagaacagctaaaagagcacacccgtctatgtagcaaaatagtgggaagatttataggtagaggcgacaaacctaccgagcctggtgatagctggttgtccaagatagaatcttagttcaactttaaatttgcccacagaaccctctaaatccccttgtaaatttaactgttagtccaaagaggaacagctctttggacactaggaaaaaaccttgtagagagagtaaaaaatttaacacccatagtaggcctaaaagcagccaccaattaagaaagcgttcaagctcaacacccactacctaaaaaatcccaaacatataactgaactcctcacacccaattggaccaatctatcaccctatagaagaactaatgttagtataagtaacatgaaaacattctcctccgcataagcctgcgtcagattaaaacactgaactgacaattaacagcccaatatctacaatcaaccaacaagtcattattaccctcactgtcaacccaacacaggcatgctcataaggaaaggttaaaaaaagtaaaaggaactcggcaaatcttaccccgcctgtttaccaaaaacatcacctctagcatcaccagtattagaggcaccgcctgcccagtgacacatgtttaacggccgcggtaccctaaccgtgcaaaggtagcataatcacttgttccttaaatagggacctgtatgaatggctccacgagggttcagctgtctcttacttttaaccagtgaaattgacctgcccgtgaagaggcgggcatgacacagcaagacgagaagaccctatggagctttaatttattaatgcaaacagtacctaacaaacccacaggtcctaaactaccaaacctgcattaaaaatttcggttggggcgacctcggagcagaacccaacctccgagcagtacatgctaagacttcaccagtcaaagcgaactactatactcaattgatccaataacttgaccaacggaacaagttaccctagggataacagcgcaatcctattctagagtccatatcaacaatagggtttacgacctcgatgttggatcaggacatcccgatggtgcagccgctattaaaggttcgtttgttcaacgattaaagtcctacgtgatctgagttcagaccggagtaatccaggtcggtttctatctacnttcaaattcctccctgtacgaaaggacaagagaaataaggcctacttcacaaagcgccttcccccgtaaatgatatcatctcaacttagcattatacccacacccacccaagaacagggtttgttaagatggcagagcccggtaatcgcataaaacttaaaactttacagtcagaggttcaattcctcttcttaacaacatacccatggccaacctcctactcctcattgtacccattctaatcgcaatggcattcctaatgcttaccgaacgaaaaattctaggctatatacaactacgcaaaggccccaacgttgtaggcccctacgggctactacaacccttcgctgacgccataaaactcttcaccaaagagcccctaaaacccgccacatctaccatcaccctctacatcaccgccccgaccttagctctcaccatcgctcttctactatgaacccccctccccatacccaaccccctggtcaacctcaacctaggcctcctatttattctagccacctctagcctagccgtttactcaatcctctgatcagggtgagcatcaaactcaaactacgccctgatcggcgcactgcgagcagtagcccaaacaatctcatatgaagtcaccctagccatcattctactatcaacattactaataagtggctcctttaacctctccacccttatcacaacacaagaacacctctgattactcctgccatcatgacccttggccataatatgatttatctccacactagcagagaccaaccgaacccccttcgaccttgccgaaggggagtccgaactagtctcaggcttcaacatcgaatacgccgcaggccccttcgccctattcttcatagccgaatacacaaacattattataataaacaccctcaccactacaatcttcctaggaacaacatatgacgcactctcccctgaactctacacaacatattttgtcaccaagaccctacttctaacctccctgttcttatgaattcgaacagcatacccccgattccgctacgaccaactcatacacctcctatgaaaaaacttcctaccactcaccctagcattacttatatgatatgtctccatacccattacaatctccagcattccccctcaaacctaagaaatatgtctgataaaagagttactttgatagagtaaataataggagcttaaacccccttatttctaggactatgagaatcgaacccatccctgagaatccaaaattctccgtgccacctatcacaccccatcctaaagtaaggtcagctaaataagctatcgggcccataccccgaaaatgttggttatacccttcccgtactaattaatcccctggcccaacccgtcatctactctaccatctttgcaggcacactcatcacagcgctaagctcgcactgattttttacctgagtaggcctagaaataaacatgctagcttttattccagttctaaccaaaaaaataaaccctcgttccacagaagctgccatcaagtatttcctcacgcaagcaaccgcatccataatccttctaatagctatcctcttcaacaatatactctccggacaatgaaccataaccaatactaccaatcaatactcatcattaataatcataatggctatagcaataaaactaggaatagccccctttcacttctgagtcccagaggttacccaaggcacccctctgacatccggcctgcttcttctcacatgacaaaaactagcccccatctcaatcatataccaaatctctccctcactaaacgtaagccttctcctcactctctcaatcttatccatcatagcaggcagttgaggtggattaaaccaaacccagctacgcaaaatcttagcatactcctcaattacccacataggatgaataatagcagttctaccgtacaaccctaacataaccattcttaatttaactatttatattatcctaactactaccgcattcctactactcaacttaaactccagcaccacgaccctactactatctcgcacctgaaacaagctaacatgactaacacccttaattccatccaccctcctctccctaggaggcctgcccccgctaaccggctttttgcccaaatgggccattatcgaagaattcacaaaaaacaatagcctcatcatccccaccatcatagccaccatcaccctccttaacctctacttctacctacgcctaatctactccacctcaatcacactactccccatatctaacaacgtaaaaataaaatgacagtttgaacatacaaaacccaccccattcctccccacactcatcgcccttaccacgctactcctacctatctccccttttatactaataatcttatagaaatttaggttaaatacagaccaagagccttcaaagccctcagtaagttgcaatacttaatttctgtaacagctaaggactgcaaaaccccactctgcatcaactgaacgcaaatcagccactttaattaagctaagcccttgctagaccaatgggacttaaacccacaaacacttagttaacagctaagcaccctaatcaactggcttcaatctacttctcccgccgccgggaaaaaaggcgggagaagccccggcaggtttgaagctgcttcttcgaatttgcaattcaatatgaaaatcacctcggagctggtaaaaagaggcctaacccctgtctttagatttacagtccaatgcttcactcagccattttacctcacccccactgatgttcgccgaccgttgactattctctacaaaccacaaagacattggaacactatacctattattcggcgcatgagctggagtcctaggcacagctctaagcctccttattcgagccgagctgggccagccaggcaaccttctaggtaacgaccacatctacaacgttatcgtcacagcccatgcatttgtaataatcttcttcatagtaatacccatcataatcggaggctttggcaactgactagttcccctaataatcggtgcccccgatatggcgtttccccgcataaacaacataagcttctgactcttacctccctctctcctactcctgctcgcatctgctatagtggaggccggagcaggaacaggttgaacagtctaccctcccttagcagggaactactcccaccctggagcctccgtagacctaaccatcttctccttacacctagcaggtgtctcctctatcttaggggccatcaatttcatcacaacaattatcaatataaaaccccctgccataacccaataccaaacgcccctcttcgtctgatccgtcctaatcacagcagtcctacttctcctatctctcccagtcctagctgctggcatcactatactactaacagaccgcaacctcaacaccaccttcttcgaccccgccggaggaggagaccccattctataccaacacctattctgatttttcggtcaccctgaagtttatattcttatcctaccaggcttcggaataatctcccatattgtaacttactactccggaaaaaaagaaccatttggatacataggtatggtctgagctatgatatcaattggcttcctagggtttatcgtgtgagcacaccatatatttacagtaggaatagacgtagacacacgagcatatttcacctccgctaccataatcatcgctatccccaccggcgtcaaagtatttagctgactcgccacactccacggaagcaatatgaaatgatctgctgcagtgctctgagccctaggattcatctttcttttcaccgtaggtggcctgactggcattgtattagcaaactcatcactagacatcgtactacacgacacgtactacgttgtagctcacttccactatgtcctatcaataggagctgtatttgccatcataggaggcttcattcactgatttcccctattctcaggctacaccctagaccaaacctacgccaaaatccatttcactatcatattcatcggcgtaaatctaactttcttcccacaacactttctcggcctatccggaatgccccgacgttactcggactaccccgatgcatacaccacatgaaacatcctatcatctgtaggctcattcatttctctaacagcagtaatattaataattttcatgatttgagaagccttcgcttcgaagcgaaaagtcctaatagtagaagaaccctccataaacctggagtggctatatggatgccccccaccctaccacacattcgaagaacccgtatacataaaatctagacaaaaaaggaaggaatcgaaccccccaaagctggtttcaagccaaccccatggcctccatgactttttcaaaaaggtattagaaaaaccatttcataactttgtcaaagttaaattataggctaaatcctatatatcttaatggcacatgcagcgcaagtaggtctacaagacgctacttcccctatcatagaagagcttatcacctttcatgatcacgccctcataatcattttccttatctgcttcctagtcctgtatgcccttttcctaacactcacaacaaaactaactaatactaacatctcagacgctcaggaaatggaaaccgtctgaactatcctgcccgccatcatcctagtcctcatcgccctcccatccctacgcatcctttacataacagacgaggtcaacgatccctcccttaccatcaaatcaattggccaccaatggtactgaacctacgagtacaccgactacggcggactaatcttcaactcctacatacttcccccattattcctagaaccaggcgacctgcgactccttgacgttgacaatcgagtagtactcccgattgaagcccccattcgtataataattacatcacaagacgtcttgcactcatgagctgtccccacattaggcttaaaaacagatgcaattcccggacgtctaaaccaaaccactttcaccgctacacgaccgggggtatactacggtcaatgctctgaaatctgtggagcaaaccacagtttcatgcccatcgtcctagaattaattcccctaaaaatctttgaaatagggcccgtatttaccctatagcaccccctctaccccctctagagcccactgtaaagctaacttagcattaaccttttaagttaaagattaagagaaccaacacctctttacagtgaaatgccccaactaaatactaccgtatggcccaccataattacccccatactccttacactattcctcatcacccaactaaaaatattaaacacaaactaccacctacctccctcaccaaagcccataaaaataaaaaattataacaaaccctgagaaccaaaatgaacgaaaatctgttcgcttcattcattgcccccacaatcctaggcctacccgccgcagtactgatcattctatttccccctctattgatccccacctccaaatatctcatcaacaaccgactaatcaccacccaacaatgactaatcaaactaacctcaaaacaaatgataaccatacacaacactaaaggacgaacctgatctcttatactagtatccttaatcatttttattgccacaactaacctcctcggactcctgcctcactcatttacaccaaccacccaactatctataaacctagccatggccatccccttatgagcgggcgcagtgattataggctttcgctctaagattaaaaatgccctagcccacttcttaccacaaggcacacctacaccccttatccccatactagttattatcgaaaccatcagcctactcattcaaccaatagccctggccgtacgcctaaccgctaacattactgcaggccacctactcatgcacctaattggaagcgccaccctagcaatatcaaccattaaccttccctctacacttatcatcttcacaattctaattctactgactatcctagaaatcgctgtcgccttaatccaagcctacgttttcacacttctagtaagcctctacctgcacgacaacacataatgacccaccaatcacatgcctatcatatagtaaaacccagcccatgacccctaacaggggccctctcagccctcctaatgacctccggcctagccatgtgatttcacttccactccataacgctcctcatactaggcctactaaccaacacactaaccatataccaatgatggcgcgatgtaacacgagaaagcacataccaaggccaccacacaccacctgtccaaaaaggccttcgatacgggataatcctatttattacctcagaaatttttttcttcgcaggatttttctgagccttttaccactccagcctagcccctaccccccaattaggagggcactggcccccaacaggcatcaccccgctaaatcccctagaagtcccactcctaaacacatccgtattactcgcatcaggagtatcaatcacctgagctcaccatagtctaatagaaaacaaccgaaaccaaataattcaagcactgcttattacaattttactgggtctctattttaccctcctacaagcctcagagtacttcgagtctcccttcaccatttccgacggcatctacggctcaacattttttgtagccacaggcttccacggacttcacgtcattattggctcaactttcctcactatctgcttcatccgccaactaatatttcactttacatccaaacatcactttggcttcgaagccgccgcctgatactggcattttgtagatgtggtttgactatttctgtatgtctccatctattgatgagggtcttactcttttagtataaatagtaccgttaacttccaattaactagttttgacaacattcaaaaaagagtaataaacttcgccttaattttaataatcaacaccctcctagccttactactaataattattacattttgactaccacaactcaacggctacatagaaaaatccaccccttacgagtgcggcttcgaccctatatcccccgcccgcgtccctttctccataaaattcttcttagtagctattaccttcttattatttgatctagaaattgccctccttttacccctaccatgagccctacaaacaactaacctgccactaatagttatgtcatccctcttattaatcatcatcctagccctaagtctggcctatgagtgactacaaaaaggattagactgaaccgaattggtatatagtttaaacaaaacgaatgatttcgactcattaaattatgataatcatatttaccaaatgcccctcatttacataaatattatactagcatttaccatctcacttctaggaatactagtatatcgctcacacctcatatcctccctactatgcctagaaggaataatactatcgctgttcattatagctactctcataaccctcaacacccactccctcttagccaatattgtgcctattgccatactagtctttgccgcctgcgaagcagcggtgggcctagccctactagtctcaatctccaacacatatggcctagactacgtacataacctaaacctactccaatgctaaaactaatcgtcccaacaattatattactaccactgacatgactttccaaaaaacacataatttgaatcaacacaaccacccacagcctaattattagcatcatccctctactattttttaaccaaatcaacaacaacctatttagctgttccccaaccttctcctccgaccccctaacaacccccctcctaatactaactacctgactcctacccctcacaatcatggcaagccaacgccacttatccagtgaaccactatcacgaaaaaaactctacctctctatactaatctccctacaaatctccttaattataacattcacagccacagaactaatcatattttatatcttcttcgaaaccacacttatccccaccttggctatcatcacccgatgaggcaaccagccagaacgcctgaacgcaggcacatacttcctattctacaccctagtaggctcccttcccctactcatcgcactaatttacactcacaacaccctaggctcactaaacattctactactcactctcactgcccaagaactatcaaactcctgagccaacaacttaatatgactagcttacacaatagcttttatagtaaagatacctctttacggactccacttatgactccctaaagcccatgtcgaagcccccatcgctgggtcaatagtacttgccgcagtactcttgaaactaggcggctatggtataatacgcctcacactcattctcaaccccctgacaaaacacatagcctaccccttccttgtactatccctatgaggcataattataacaagctccatctgcctacgacaaacagacctaaaatcgctcattgcatactcttcaatcagccacatagccctcgtagtaacagccattctcatccaaaccccctgaagcttcaccggcgcagtcattctcataatcgcccacggacttacatcctcattactattctgcctagcaaactcaaactacgaacgcactcacagtcgcatcataatcctctctcaaggacttcaaactctactcccactaatagctttttgatgacttctagcaagcctcgctaacctcgccttaccccccactattaacctactgggagaactctctgtgctagtaaccacgttctcctgatcaaatatcactctcctacttacaggactcaacatactagtcacagccctatactccctctacatatttaccacaacacaatggggctcactcacccaccacattaacaacataaaaccctcattcacacgagaaaacaccctcatgttcatacacctatcccccattctcctcctatccctcaaccccgacatcattaccgggttttcctcttgtaaatatagtttaaccaaaacatcagattgtgaatctgacaacagaggcttacgaccccttatttaccgagaaagctcacaagaactgctaactcatgcccccatgtctaacaacatggctttctcaacttttaaaggataacagctatccattggtcttaggccccaagaattttggtgcaactccaaataaaagtaataaccatgcacactactataaccaccctaaccctaacttccctaattccccccatccttaccaccctcgttaaccctaacaaaaaaaactcatacccccattatgtaaaatccattgtcgcatccacctttattatcagtctcttccccacaacaatattcatgtgcctagaccaagaagttattatctcgaactgacactgagccacaacccaaacaacccagctctccctaagcttcaaactagactacttctccataatattcatccctgtagcattattcgttacatggtccatcatagaattctcactgtgatatataaactcagacccaaacattaatcagttcttcaaatatctactcatcttcctaattaccatactaatcttagttaccgctaacaacctattccaactgttcatcggctgagagggcgtaggaattatatccttcttgctcatcagttgatgatacgcccgagcagatgccaacacagcagccattcaagcaatcctatacaaccgtatcggcgatatcggtttcatcctcgccttagcatgatttatcctacactccaactcatgagacccacaacaaatagcccttctaaacgctaatccaagcctcaccccactactaggcctcctcctagcagcagcaggcaaatcagcccaattaggtctccacccctgactcccctcagccatagaaggccccaccccagtctcagccctactccactcaagcactatagttgtagcaggaatcttcttactcatccgcttccaccccctagcagaaaatagcccactaatccaaactctaacactatgcttaggcgctatcaccactctgttcgcagcagtctgcgcccttacacaaaatgacatcaaaaaaatcgtagccttctccacttcaagtcaactaggactcataatagttacaatcggcatcaaccaaccacacctagcattcctgcacatctgtacccacgccttcttcaaagccatactatttatgtgctccgggtccatcatccacaaccttaacaatgaacaagatattcgaaaaataggaggactactcaaaaccatacctctcacttcaacctccctcaccattggcagcctagcattagcaggaatacctttcctcacaggtttctactccaaagaccacatcatcgaaaccgcaaacatatcatacacaaacgcctgagccctatctattactctcatcgctacctccctgacaagcgcctatagcactcgaataatccttctcaccctaacaggtcaacctcgcttccccacccttactaacattaacgaaaataaccccaccctactaaaccccattaaacgcctggcagccggaagcctattcgcaggatttctcattactaacaacatttcccccgcatcccccttccaaacaacaatccccctctacctaaaactcacagccctcgctgtcactttcctaggacttctaacagccctagacctcaactacctaaccaacaaacttaaaataaaatccccactatgcacattttatttctccaacatactcggattctaccctagcatcacacaccgcacaatcccctatctaggccttcttacgagccaaaacctgcccctactcctcctagacctaacctgactagaaaagctattacctaaaacaatttcacagcaccaaatctccacctccatcatcacctcaacccaaaaaggcataattaaactttacttcctctctttcttcttcccactcatcctaaccctactcctaatcacataacctattcccccgagcaatctcaattacaatatacacaccaacaaacaatgttcaaccagtaactactactaatcaacgcccataatcatacaaagcccccgcaccaataggatcctcccgaatcaaccctgacccctctccttcataaattattcagcttcctacactattaaagtttaccacaaccaccaccccatcatactctttcacccacagcaccaatcctacctccatcgctaaccccactaaaacactcaccaagacctcaacccctgacccccatgcctcaggatactcctcaatagccatcgctgtagtatatccaaagacaaccatcattccccctaaataaattaaaaaaactattaaacccatataacctcccccaaaattcagaataataacacacccgaccacaccgctaacaatcaatactaaacccccataaataggagaaggcttagaagaaaaccccacaaaccccattactaaacccacactcaacagaaacaaagcatacatcattattctcgcacggactacaaccacgaccaatgatatgaaaaaccatcgttgtatttcaactacaagaacaccaatgaccccaatacgcaaaattaaccccctaataaaattaattaaccactcattcatcgacctccccaccccatccaacatctccgcatgatgaaacttcggctcactccttggcgcctgcctgatcctccaaatcaccacaggactattcctagccatgcactactcaccagacgcctcaaccgccttttcatcaatcgcccacatcactcgagacgtaaattatggctgaatcatccgctaccttcacgccaatggcgcctcaatattctttatctgcctcttcctacacatcgggcgaggcctatattacggatcatttctctactcagaaacctgaaacatcggcattatcctcctgcttgcaactatagcaacagccttcataggctatgtcctcccgtgaggccaaatatcattctgaggggccacagtaattacaaacttactatccgccatcccatacattgggacagacctagttcaatgaatctgaggaggctactcagtagacagtcccaccctcacacgattctttacctttcacttcatcttgcccttcattattgcagccctagcagcactccacctcctattcttgcacgaaacgggatcaaacaaccccctaggaatcacctcccattccgataaaatcaccttccacccttactacacaatcaaagacgccctcggcttacttctcttccttctctccttaatgacattaacactattctcaccagacctcctaggcgacccagacaattataccctagccaaccccttaaacacccctccccacatcaagcccgaatgatatttcctattcgcctacacaattctccgatccgtccctaacaaactaggaggcgtccttgccctattactatccatcctcatcctagcaataatccccatcctccatatatccaaacaacaaagcataatatttcgcccactaagccaatcactttattgactcctagccgcagacctcctcattctaacctgaatcggaggacaaccagtaagctacccttttaccatcattggacaagtagcatccgtactatacttcacaacaatcctaatcctaataccaactatctccctaattgaaaacaaaatactcaaatgggcctgtccttgtagtacaaactaatacaccagtcttgtaaaccggagatgaaaacctttttccaaggacaaatcagagaaaaagtctttaactccaccattagcacccaaagctaagattctaatttaaactattctctgttctttcatggggaagcagatttgggtaccacccaagtattgactcacccatcaacaaccgctatgtatttcgtacattactgccagccaccatgaatattgtacggtaccataaatacttgaccacctgtagtacataaaaacccaatccacatcaaaaccccccccccatgcttacaagcaagtacagcaatcaaccctcaactatcacacatcaactgcaactccaaagccacccctcacccattaggataccaacaaacctacccacccttaacagtacatagtacataaagccatttaccgtacatagcacattacagtcaaatcccttctcgtccccatggatgacccccctcagataggggtcccttgaccaccatcctccgtgaaatcaatatcccgcacaagagtgctactctcctcgctccgggcccataacacttgggggtagctaaagtgaactgtatccgacatctggttcctacttcagggtcataaagcctaaatagcccacacgttccccttaaataagacatcacgatg

SEQ ID NO: 125 - DNA, 16571 bp, Homo sapiens mitochondrial
  3109: "n" refers to a nucleotide at position 3107 of the Cambridge Reference Sequence (CRS, Anderson et al. 1981 Nature 290:457-465), later determined to be absent from the human mtDNA sequence according to the revised CRS (rCRS, Andrews et al. 1999 Nature Genetics 23:147); "n" therefore represents a single nucleotide deletion at a position corresponding to nucleotide 3107 of SEQ ID NO:1 as provided herein.
gatcacaggtctatcaccctattaaccactcacgggagctctccatgcatttggtattttcgtctggggggtgtgcacgcgatagcattgcgagacgctggagccggagcaccctatgtcgcagtatctgtctttgattcctgcctcatcctattatttatcgcacctacgttcaatattacaggcgaacatacttactaaagtgtgttaattaattaatgcttgtaggacataataataacaattgaatgtctgcacagccgctttccacacagacatcataacaaaaaatttccaccaaaccccccctcccccccgcttctggccacagcacttaaacacatctctgccaaaccccaaaaacaaagaaccctaacaccagcctaaccagatttcaaattttatcttttggcggtatgcacttttaacagtcaccccccaactaacacattattttcccctcccactcccatactactaatctcatcaatacaacccccgcccatcctacccagcacacacacaccgctgctaaccccataccccgaaccaaccaaaccccaaagacaccccccacagtttatgtagcttacctcctcaaagcaatacactgaaaatgtttagacgggctcacatcaccccataaacaaataggtttggtcctagcctttctattagctcttagtaagattacacatgcaagcatccccgttccagtgagttcaccctctaaatcaccacgatcaaaagggacaagcatcaagcacgcagcaatgcagctcaaaacgcttagcctagccacacccccacgggaaacagcagtgattaacctttagcaataaacgaaagtttaactaagctatactaaccccagggttggtcaatttcgtgccagccaccgcggtcacacgattaacccaagtcaatagaagccggcgtaaagagtgttttagatcaccccctccccaataaagctaaaactcacctgagttgtaaaaaactccagttgacacaaaatagactacgaaagtggctttaacatatctgaacacacaatagctaagacccaaactgggattagataccccactatgcttagccctaaacctcaacagttaaatcaacaaaactgctcgccagaacactacgagccacagcttaaaactcaaaggacctggcggtgcttcatatccctctagaggagcctgttctgtaatcgataaaccccgatcaacctcaccacctcttgctcagcctatataccgccatcttcagcaaaccctgatgaaggctacaaagtaagcgcaagtacccacgtaaagacgttaggtcaaggtgtagcccatgaggtggcaagaaatgggctacattttctaccccagaaaactacgatagcccttatgaaacttaagggtcgaaggtggatttagcagtaaactgagagtagagtgcttagttgaacagggccctgaagcgcgtacacaccgcccgtcaccctcctcaagtatacttcaaaggacatttaactaaaacccctacgcatttatatagaggagacaagtcgtaacatggtaagtgtactggaaagtgcacttggacgaaccagagtgtagcttaacacaaagcacccaacttacacttaggagatttcaacttaacttgaccgctctgagctaaacctagccccaaacccactccaccctactaccagacaaccttagccaaaccatttacccaaataaagtataggcgatagaaattgaaacctggcgcaatagatatagtaccgcaagggaaagatgaaaaattataaccaagcataatatagcaaggactaacccctataccttctgcataatgaattaactagaaataactttgcaaggagagccaaagctaagacccccgaaaccagacgagctacctaagaacagctaaaagagcacacccgtctatgtagcaaaatagtgggaagatttataggtagaggcgacaaacctaccgagcctggtgatagctggttgtccaagatagaatcttagttcaactttaaatttgcccacagaaccctctaaatccccttgtaaatttaactgttagtccaaagaggaacagctctttggacactaggaaaaaaccttgtagagagagtaaaaaatttaacacccatagtaggcctaaaagcagccaccaattaagaaagcgttcaagctcaacacccactacctaaaaaatcccaaacatataactgaactcctcacacccaattggaccaatctatcaccctatagaagaactaatgttagtataagtaacatgaaaacattctcctccgcataagcctgcgtcagattaaaacactgaactgacaattaacagcccaatatctacaatcaaccaacaagtcattattaccctcactgtcaacccaacacaggcatgctcataaggaaaggttaaaaaaagtaaaaggaactcggcaaatcttaccccgcctgtttaccaaaaacatcacctctagcatcaccagtattagaggcaccgcctgcccagtgacacatgtttaacggccgcggtaccctaaccgtgcaaaggtagcataatcacttgttccttaaatagggacctgtatgaatggctccacgagggttcagctgtctcttacttttaaccagtgaaattgacctgcccgtgaagaggcgggcatgacacagcaagacgagaagaccctatggagctttaatttattaatgcaaacagtacctaacaaacccacaggtcctaaactaccaaacctgcattaaaaatttcggttggggcgacctcggagcagaacccaacctccgagcagtacatgctaagacttcaccagtcaaagcgaactactatactcaattgatccaataacttgaccaacggaacaagttaccctagggataacagcgcaatcctattctagagtccatatcaacaatagggtttacgacctcgatgttggatcaggacatcccgatggtgcagccgctattaaaggttcgtttgttcaacgattaaagtcctacgtgatctgagttcagaccggagtaatccaggtcggtttctatctacnttcaaattcctccctgtacgaaaggacaagagaaataaggcctacttcacaaagcgccttcccccgtaaatgatatcatctcaacttagcattatacccacacccacccaagaacagggtttgttaagatggcagagcccggtaatcgcataaaacttaaaactttacagtcagaggttcaattcctcttcttaacaacatacccatggccaacctcctactcctcattgtacccattctaatcgcaatggcattcctaatgcttaccgaacgaaaaattctaggctatatacaactacgcaaaggccccaacgttgtaggcccctacgggctactacaacccttcgctgacgccataaaactcttcaccaaagagcccctaaaacccgccacatctaccatcaccctctacatcaccgccccgaccttagctctcaccatcgctcttctactatgaacccccctccccatacccaaccccctggtcaacctcaacctaggcctcctatttattctagccacctctagcctagccgtttactcaatcctctgatcagggtgagcatcaaactcaaactacgccctgatcggcgcactgcgagcagtagcccaaacaatctcatatgaagtcaccctagccatcattctactatcaacattactaataagtggctcctttaacctctccacccttatcacaacacaagaacacctctgattactcctgccatcatgacccttggccataatatgatttatctccacactagcagagaccaaccgaacccccttcgaccttgccgaaggggagtccgaactagtctcaggcttcaacatcgaatacgccgcaggccccttcgccctattcttcatagccgaatacacaaacattattataataaacaccctcaccactacaatcttcctaggaacaacatatgacgcactctcccctgaactctacacaacatattttgtcaccaagaccctacttctaacctccctgttcttatgaattcgaacagcatacccccgattccgctacgaccaactcatacacctcctatgaaaaaacttcctaccactcaccctagcattacttatatgatatgtctccatacccattacaatctccagcattccccctcaaacctaagaaatatgtctgataaaagagttactttgatagagtaaataataggagcttaaacccccttatttctaggactatgagaatcgaacccatccctgagaatccaaaattctccgtgccacctatcacaccccatcctaaagtaaggtcagctaaataagctatcgggcccataccccgaaaatgttggttatacccttcccgtactaattaatcccctggcccaacccgtcatctactctaccatctttgcaggcacactcatcacagcgctaagctcgcactgattttttacctgagtaggcctagaaataaacatgctagcttttattccagttctaaccaaaaaaataaaccctcgttccacagaagctgccatcaagtatttcctcacgcaagcaaccgcatccataatccttctaatagctatcctcttcaacaatatactctccggacaatgaaccataaccaatactaccaatcaatactcatcattaataatcataatggctatagcaataaaactaggaatagccccctttcacttctgagtcccagaggttacccaaggcacccctctgacatccggcctgcttcttctcacatgacaaaaactagcccccatctcaatcatataccaaatctcttcctcactaaacgtaagccttctcctcactctctcaatcttatccatcatagcaggcagttgaggtggattaaaccaaacccagctacgcaaaatcttagcatactcctcaattacccacataggatgaataatagcagttctaccgtacaaccctaacataaccattcttaatttaactatttatattatcctaactactaccgcattcctactactcaacttaaactccagcaccacgaccctactactatctcgcacctgaaacaagctaacatgactaacacccttaattccatccaccctcctctccctaggaggcctgcccccgctaaccggctttttgcccaaatgggccattatcgaagaattcacaaaaaacaatagcctcatcatccccaccatcatagccgccatcaccctccttaacctctacttctacctacgcctaatctactccacctcaatcacactactccccatatctaacaacgtaaaaataaaatgacagtttgaacatacaaaacccaccccattcctccccacactcatcgcccttaccacgctactcctacctatctccccttttatactaataatcttatagaaatttaggttaaatacagaccaagagccttcaaagccctcagtaagttgcaatacttaatttctgtaacagctaaggactgcaaaaccccactctgcatcaactgaacgcaaatcagccactttaattaagctaagcccttactagaccaatgggacttaaacccacaaacacttagttaacagctaagcaccctaatcaactggcttcaatctacttctcccgccgccgggaaaaaaggcgggagaagccccggcaggtttgaagctgcttcttcgaatttgcaattcaatatgaaaatcacctcggagctggtaaaaagaggcctaacccctgtctttagatttacagtccaatgcttcactcagccattttacctcacccccactgatgttcgccgaccgttgactattctctacaaaccacaaagacattggaacactatacctattattcggcgcatgagctggagtcctaggcacagctctaagcctccttattcgagccgagctgggccagccaggcaaccttctaggtaacgaccacatctacaacgttatcgtcacagcccatgcatttgtaataatcttcttcatagtaatacccatcataatcggaggctttggcaactgactagttcccctaataatcggtgcccccgatatggcgtttccccgcataaacaacataagcttctgactcttacctccctctctcctactcctgctcgcatctgctatagtggaggccggagcaggaacaggttgaacagtctaccctcccttagcagggaactactcccaccctggagcctccgtagacctaaccatcttctccttacacctagcaggtgtctcctctatcttaggggccatcaatttcatcacaacaattatcaatataaaaccccctgccataacccaataccaaacgcccctcttcgtctgatccgtcctaatcacagcagtcctacttctcctatctctcccagtcctagctgctggcatcactatactactaacagaccgcaacctcaacaccaccttcttcgaccccgccggaggaggagaccccattctataccaacacctattctgatttttcggtcaccctgaggtttatattcttatcctaccaggcttcggaataatctcccatattgtaacttactactccggaaaaaaagaaccatttggatacataggcatggtctgagctatgatatcaattggcttcctagggtttatcgtgtgagcacaccatatatttacagtaggaatagacgtagacacacgagcatatttcacctccgctaccataatcatcgctatccccaccggcgtcaaagtatttagctgactcgccacactccacggaagcaatatgaaatgatctgctgcagtgctctgagccctaggattcatctttcttttcaccgtaggtggcctgactggcattgtattagcaaactcatcactagacatcgtactacacgacacgtactacgttgtagctcacttccactatgtcctatcaataggagctgtatttgccatcataggaggcttcattcactgatttcccctattctcaggctacaccctagaccaaacctacgccaaaatccatttcactatcatattcatcggcgtaaatctaactttcttcccacaacactttctcggcctatccggaatgccccgacgttactcggactaccccgatgcatacaccacatgaaacatcctatcatctgtaggctcattcatttctctaacagcagtaatattaataattttcatgatttgagaagccttcgcttcgaagcgaaaagtcctaatagtagaagaaccctccataaacctggagtgactatatggatgccccccaccctaccacacattcgaagaacccgtatacataaaatctagacaaaaaaggaaggaatcgaaccccccaaagctggtttcaagccaaccccatggcctccatgactttttcaaaaaggtattagaaaaaccatttcataactttgtcaaagttaaattataggctaaatcctatatatcttaatggcacatgcagcgcaagtaggtctacaagacgctacttcccctatcatagaagagcttatcacctttcatgatcacgccctcataatcattttccttatctgcttcctagtcctgtatgcccttttcctaacactcacaacaaaactaactaatactaacatctcagacgctcaggaaatagaaaccgtctgaactatcctgcccgccatcatcctagtcctcatcgccctcccatccctacgcatcctttacataacagacgaggtcaacgatccctcccttaccatcaaatcaattggccaccaatggtactgaacctacgagtacaccgactacggcggactaatcttcaactcctacatacttcccccattattcctagaaccaggcgacctgcgactccttgacgttgacaatcgagtagtactcccgattgaagcccccattcgtataataattacatcacaagacgtcttgcactcatgagctgtccccacattaggcttaaaaacagatgcaattcccggacgtctaaaccaaaccactttcaccgctacacgaccgggggtatactacggtcaatgctctgaaatctgtggagcaaaccacagtttcatgcccatcgtcctagaattaattcccctaaaaatctttgaaatagggcccgtatttaccctatagcaccccctctaccccctctagagcccactgtaaagctaacttagcattaaccttttaagttaaagattaagagaaccaacacctctttacagtgaaatgccccaactaaatactaccgtatggcccaccataattacccccatactccttacactattcctcatcacccaactaaaaatattaaacacaaactaccacctacctccctcaccaaagcccataaaaataaaaaattataacaaaccctgagaaccaaaatgaacgaaaatctgttcgcttcattcattgcccccacaatcctaggcctacccgccgcagtactgatcattctatttccccctctattgatccccacctccaaatatctcatcaacaaccgactaatcaccacccaacaatgactaatcaaactaacctcaaaacaaatgataaccatacacaacactaaaggacgaacctgatctcttatactagtatccttaatcatttttattgccacaactaacctcctcggactcctgcctcactcatttacaccaaccacccaactatctataaacctagccatggccatccccttatgagcgggcgcagtgattataggctttcgctctaagattaaaaatgccctagcccacttcttaccacaaggcacacctacaccccttatccccatactagttattatcgaaaccatcagcctactcattcaaccaatagccctggccgtacgcctaaccgctaacattactgcaggccacctactcatgcacctaattggaagcgccaccctagcaatatcaaccattaaccttccctctacacttatcatcttcacaattctaattctactgactatcctagaaatcgctgtcgccttaatccaagcctacgttttcacacttctagtaagcctctacctgcacgacaacacataatgacccaccaatcacatgcctatcatatagtaaaacccagcccatgacccctaacaggggccctctcagccctcctaatgacctccggcctagccatgtgatttcacttccactccataacgctcctcatactaggcctactaaccaacacactaaccatataccaatgatggcgcgatgtaacacgagaaagcacataccaaggccaccacacaccacctgtccaaaaaggccttcgatacgggataatcctatttattacctcagaaatttttttcttcgcaggatttttctgagccttttaccactccagcctagcccctaccccccaattaggagggcactggcccccaacaggcatcaccccgctaaatcccctagaagtcccactcctaaacacatccgtattactcgcatcaggagtatcaatcacctgagctcaccatagtctaatagaaaacaaccgaaaccaaataattcaagcactgcttattacaattttactgggtctctattttaccctcctacaagcctcagagtacttcgagtctcccttcaccatttccgacggcatctacggctcaacattttttgtagccacaggcttccacggacttcacgtcattattggctcaactttcctcactatctgcttcatccgccaactaatatttcactttacatccaaacatcactttggcttcgaagccgccgcctgatactggcattttgtagatgtggtttgactatttctgtatgtctccatctattgatgagggtcttactcttttagtataaatagtaccgttaacttccaattaactagttttgacaacattcaaaaaagagtaataaacttcgccttaattttaataatcaacaccctcctagccttactactaataattattacattttgactaccacaactcaacggctacatagaaaaatccaccccttacgagtgcggcttcgaccctatatcccccgcccgcgtccctttctccataaaattcttcttagtagctattaccttcttattatttgatctagaaattgccctccttttacccctaccatgagccctacaaacaactaacctgccactaatagttatgtcatccctcttattaatcatcatcctagccctaagtctggcctatgagtgactacaaaaaggattagactgaaccgaattggtatatagtttaaacaaaacgaatgatttcgactcattaaattatgataatcatatttaccaaatgcccctcatttacataaatattatactagcatttaccatctcacttctaggaatactagtatatcgctcacacctcatatcctccctactatgcctagaaggaataatactatcgctgttcattatagctactctcataaccctcaacacccactccctcttagccaatattgtgcctattgccatactagtctttgccgcctgcgaagcagcggtgggcctagccctactagtctcaatctccaacacatatggcctagactacgtacataacctaaacctactccaatgctaaaactaatcgtcccaacaattatattactaccactgacatgactttccaaaaaacacataatttgaatcaacacaaccacccacagcctaattattagcatcatccctctactattttttaaccaaatcaacaacaacctatttagctgttccccaaccttttcctccgaccccctaacaacccccctcctaatactaactacctgactcctacccctcacaatcatggcaagccaacgccacttatccagtgaaccactatcacgaaaaaaactctacctctctatactaatctccctacaaatctccttaattataacattcacagccacagaactaatcatattttatatcttcttcgaaaccacacttatccccaccttggctatcatcacccgatgaggcaaccagccagaacgcctgaacgcaggcacatacttcctattctacaccctagtaggctcccttcccctactcatcgcactaatttacactcacaacaccctaggctcactaaacattctactactcactctcactgcccaagaactatcaaactcctgagccaacaacttaatatgactagcttacacaatagcttttatagtaaagatacctctttacggactccacttatgactccctaaagcccatgtcgaagcccccatcgctgggtcaatagtacttgccgcagtactcttgaaactaggcggctatggtataatacgcctcacactcattctcaaccccctgacaaaacacatagcctaccccttccttgtactatccctatgaggcataattataacaagctccatctgcctacgacaaacagacctaaaatcgctcattgcatactcttcaatcagccacatagccctcgtagtaacagccattctcatccaaaccccctgaagcttcaccggcgcagtcattctcataatcgcccacggacttacatcctcattactattctgcctagcaaactcaaactacgaacgcactcacagtcgcatcataatcctctctcaaggacttcaaactctactcccactaatagctttttgatgacttctagcaagcctcgctaacctcgccttaccccccactattaacctactgggagaactctctgtgctagtaaccacgttctcctgatcaaatatcactctcctacttacaggactcaacatactagtcacagccctatactccctctacatatttaccacaacacaatggggctcactcacccaccacattaacaacataaaaccctcattcacacgagaaaacactctcatgttcatacacctatcccccattctcctcctatccctcaaccccgacatcattaccgggttttcctcttgtaaatatagtttaaccaaaacatcagattgtgaatctgacaacagaggcttacgaccccttatttaccgagaaagctcacaagaactgctaactcatgcccccatgtctaacaacatggctttctcaacttttaaaggataacagctatccattggtcttaggccccaagaattttggtgcaactccaaataaaagtaataaccatgtacactactataaccaccctaaccctaacttccctaattccccccatccttaccaccctcgttaaccctaacaaaaaaaactcatacccccattatgtaaaatccattgtcgcatccacctttattatcagtctcttccccacaacaatattcatgtgcctagaccaagaagttattatctcgaactgacactgagccacaacccaaacaacccagctctccctaagcttcaaactagactacttctccataatattcatccctgtagcattgttcgttacatggtccatcatagaattctcactgtgatatataaactcagacccaaacattaatcagttcttcaaatatctactcatcttcctaattaccatactaatcttagttaccgctaacaacctattccaactgttcatcggctgagagggcgtaggaattatatccttcttgctcatcagttgatgatacgcccgagcagatgccaacacagcagccattcaagcaatcctatacaaccgtatcggcgatatcggtttcatcctcgccttagcatgatttatcctacactccaactcatgagacccacaacaaatagcccttctaaacgctaatccaagcctcaccccactactaggcctcctcctagcagcagcaggcaaatcagcccaattaggtctccacccctgactcccctcagccatagaaggccccaccccagtctcagccctactccactcaagcactatagttgtagcaggaatcttcttactcatccgcttccaccccctagcagaaaatagcccactaatccaaactctaacactatgcttaggcgctatcaccactctgttcgcagcagtctgcgcccttacacaaaatgacatcaaaaaaatcgtagccttctccacttcaagtcaactaggactcataatagttacaatcggcatcaaccaaccacacctagcattcctgcacatctgtacccacgccttcttcaaagccatactatttatgtgctccgggtccatcatccacaaccttaacaatgaacaagatattcgaaaaataggaggactactcaaaaccatacctctcacttcaacctccctcaccattggcagcctagcattagcaggaatacctttcctcacaggtttctactccaaagaccacatcatcgaaaccgcaaacatatcatacacaaacgcctgagccctatctattactctcatcgctacctccctgacaagcgcctatagcactcgaataatccttctcaccctaacaggtcaacctcgcttccccacccttactaacattaacgaaaataaccccaccctactaaaccccattaaacgcctggcagccggaagcctattcgcaggatttctcattactaacaacatttcccccgcatcccccttccaaacaacaatccccctctacctaaaactcacagccctcgctgtcactttcctaggacttctaacagccctagacctcaactacctaaccaacaaacttaaaataaaatccccactatgcacattttatttctccaacatactcggattctaccctagcatcacacaccgcacaatcccctatctaggccttcttacgagccaaaacctgcccctactcctcctagacctaacctgactagaaaagctattacctaaaacaatttcacagcaccaaatctccacctccatcatcacctcaacccaaaaaggcataattaaactttacttcctctctttcttcttcccactcatcctaaccctactcctaatcacataacctattcccccgagcaatctcaattacaatatatacaccaacaaacaatgttcaaccagtaactactactaatcaacgcccataatcatacaaagcccccgcaccaataggatcctcccgaatcaaccctgacccctctccttcataaattattcagcttcctacactattaaagtttaccacaaccaccaccccatcatactctttcacccacagcaccaatcctacctccatcgctaaccccactaaaacactcaccaagacctcaacccctgacccccatgcctcaggatactcctcaatagccatcgctgtagtatatccaaagacaaccatcattccccctaaataaattaaaaaaactattaaacccatataacctcccccaaaattcagaataataacacacccgaccacaccgctaacaatcaatactaaacccccataaataggagaaggcttagaagaaaaccccacaaaccccattactaaacccacactcaacagaaacaaagcatacatcattattctcgcacggactacaaccacgaccaatgatatgaaaaaccatcgttgtatttcaactacaagaacaccaatgaccccaatacgcaaaattaaccccctaataaaattaattaaccgctcattcatcgacctccccaccccatccaacatctccgcatgatgaaacttcggctcactccttggcgcctgcctgatcctccaaatcaccacaggactattcctagccatgcactactcaccagacgcctcaaccgccttttcatcaatcgcccacatcactcgagacgtaaattatggctgaatcatccgctaccttcacgccaatggcgcctcaatattctttatctgcctcttcctacacatcgggcgaggcctatattacggatcatttctctactcagaaacctgaaacatcggcattatcctcctgcttgcaactatagcaacagccttcataggctatgtcctcccgtgaggccaaatatcattctgaggggccacagtaattacaaacttactatccgccatcccatacattggggcagacctagttcaatgaatctgaggaggctactcagtagacagtcccaccctcacacgattctttacctttcacttcatcttgcccttcattattgcagccctagcagcactccacctcctattcttgcacgaaacgggatcaaacaaccccctaggaatcacctcccattccgataaaatcaccttccacccttactacacaatcaaagacgccctcggcttacttctcttccttctctccttaatgacattaacactattctcaccagacctcctaggcgacccagacaattataccctagccaaccccttaaacacccctccccacatcaagcccgaatgatatttcctattcgcctacacaattctccgatccgtccctaacaaactaggaggcgtccttgccctattactatccatcctcatcctagcaataatccccatcctccatatatccaaacaacaaagcataatatttcgcccactaagccaatcactttattgactcctagccgcagacctcctcattctaacctgaatcggaggacaaccagtaagctacccttttaccatcattggacaagtagcatccgtactatacttcacaacaatcctaatcctaataccaactatctccctaattgaaaacaaaatactcaaatgggcctgtccttgtagtataaactaatacaccagtcttgtaaaccggagatgaaaacctttttccaaggacaaatcagagaaaaagtctttaactccaccattagcacccaaagctaagattctaatttaaactattctctgttctttcatggggaagcagatttgggtaccacccaagtattgactcacccatcaacaaccgctatgtatttcgtacattactgccagccaccatgaatattgtacggtaccataaatacttgaccacctgtagtacataaaaacccaatccacatcaaaaccccctccccatgcttacaagcaagtacagcaatcaaccctcaactatcacacatcaactgcaactccaaagtcacccctcacccattaggataccaacaaacctacccacccttaacagtacatagtacataaagccatttaccgtacatagcacattacagtcaaatcccttctcgtccccatggatgacccccctcagataggggtcccttggccaccatcctccgtgaaatcaatatcccgcacaagagtgctactctcctcgctccgggcccataacacttgggggtagctaaagtgaactgtatccgacatctggttcctacttcagggtcataaagcctaaatagcccacacgttccccttaaataagacatcacgatg

SEQ ID NO: 126 - DNA, 16570 bp, Homo sapiens mitochondrial
  3108: "n" refers to a nucleotide at position 3107 of the Cambridge Reference Sequence (CRS, Anderson et al. 1981 Nature 290:457-465), later determined to be absent from the human mtDNA sequence according to the revised CRS (rCRS, Andrews et al. 1999 Nature Genetics 23:147); "n" therefore represents a single nucleotide deletion at a position corresponding to nucleotide 3107 of SEQ ID NO:1 as provided herein.
gatcacaggtctatcaccctattaaccactcacgggagctctccatgcatttggtattttcgtctggggggtgtgcacgcgatagcattgcgagacgctggagccggagcaccctatgtcgcagtatctgtctttgattcctgcctcatcctattatttatcgcacctacgttcaatattacaggcgaacatacttactaaagtgtgttaattaattaatgcttgtaagacataataataacaattgaatgtctgcacagccgctttccacacagacatcataacaaaaaattttcaccaaaccccccctcccccgccttctggccacagcacttaaacacatctctgccaaaccccaaaaacaaagaaccctaacaccagcctaaccagatttcaaattttatcttttggcggtatgcacttttaacagtcaccccccaactaacacattattttcccctctcactcccatactactaatctcatcaacacaacccccgcccatcctacccagcacacacacaccgctgctaaccccataccccgaaccaaccaaaccccaaagacaccccccacagtttatgtagcttacctcctcaaagcaatacactgaaaatgtttagacgggctcacatcaccccataaacaaataggtttggtcctagcctttctattagctcttagtaagattacacatgcaagcatccccgttccagtgagttcaccctctaaatcaccacgatcaaaagggacaagcatcaagcacgcagcaatgcagctcaaaacgcttagcctagccacacccccacgggaaacagcagtgattaacctttagcaataaacgaaagtttaactaagctatactaaccccagggttggtcaatttcgtgccagccaccgcggtcacacgattaacccaagtcaatagaagccggcgtaaagagtgttttagatcaccccctccccaataaagctaaaactcacctgagttgtaaaaaactccagttgacacaaaatagactacgaaagtggctttaacatatctgaacacacaatagctaagacccaaactgggattagataccccactatgcttagccctaaacctcaacagttaaatcaacaaaactgctcgccagaacactacgagccacagcttaaaactcaaaggacctggcggtgcttcatatccctctagaggagcctgttctgtaatcgataaaccccgatcaacctcaccacctcttgctcagcctatataccgccatcttcagcaaaccctgatgaaggctacaaagtaagcgcaagtacccacgtaaagacgttaggtcaaggtgtagcccatgaggtggcaagaaatgggctacattttctaccccagaaaactacgatagcccttatgaaacttaagggtcgaaggtggatttagcagtaaactgagagtagagtgcttagttgaacagggccctgaagcgcgtacacaccgcccgtcaccctcctcaagtatacttcaaaggacatttaactaaaacccctacgcatttatatagaggagacaagtcgtaacatggtaagtgtactggaaagtgcacttggacgaaccagagtgtagcttaacacaaagcacccaacttacacttaggagatttcaacttaacttgaccgctctgagctaaacctagccccaaacccactccaccttactaccagacaaccttagccaaaccatttacccaaataaagtataggcgatagaaattgaaacctggcgcaatagatatagtaccgcaagggaaagatgaaaaattataaccaagcataatatagcaaggactaacccctataccttctgcataatgaattaactagaaataactttgcaaggagagccaaagctaagacccccgaaaccagacgagctacctaagaacagctaaaagagcacacccgtctatgtagcaaaatagtgggaagatttataggtagaggcgacaaacctaccgagcctggtgatagctggttgtccaagatagaatcttagttcaactttaaatttgcccacagaaccctctaaatccccttgtaaatttaactgttagtccaaagaggaacagctctttggacactaggaaaaaaccttgtagagagagtaaaaaatttaacacccatagtaggcctaaaagcagccaccaattaagaaagcgttcaagctcaacacccactacctaaaaaatcccaaacatataactgaactcctcacacccaattggaccaatctatcaccctatagaagaactaatgttagtataagtaacatgaaaacattctcctccgcataagcctgcgtcagattaaaacactgaactgacaattaacagcccaatatctacaatcaaccaacaagtcattattaccctcactgtcaacccaacacaggcatgctcataaggaaaggttaaaaaaagtaaaaggaactcggcaaatcttaccccgcctgtttaccaaaaacatcacctctagcatcaccagtattagaggcaccgcctgcccagtgacacatgtttaacggccgcggtaccctaaccgtgcaaaggtagcataatcacttgttccttaaatagggacctgtatgaatggctccacgagggttcagctgtctcttacttttaaccagtgaaattgacctgcccgtgaagaggcgggcataacacagcaagacgagaagaccctatggagctttaatttattaatgcaaacagtacctaacaaacccacaggtcctaaactaccaaacctgcattaaaaatttcggttggggcgacctcggagcagaacccaacctccgagcagtacatgctaagacttcaccagtcaaagcgaactactatactcaattgatccaataacttgaccaacggaacaagttaccctagggataacagcgcaatcctattctagagtccatatcaacaatagggtttacgacctcgatgttggatcaggacatcccaatggtgcagccgctattaaaggttcgtttgttcaacgattaaagtcctacgtgatctgagttcagaccggagtaatccaggtcggtttctatctacnttcaaattcctccctgtacgaaaggacaagagaaataaggcctacttcacaaagcgccttcccccgtaaatgatatcatctcaacttagtattatacccacacccacccaagaacagggtttgttaagatggcagagcccggtaatcgcataaaacttaaaactttacagtcagaggttcaattcctcttcttaacaacatacccatggccaacctcctactcctcattgtacccattctaatcgcaatggcattcctaatgcttaccgaacgaaaaattctaggctatatacaactacgcaaaggccccaacgttgtaggcccctacgggctactacaacccttcgctgacgccataaaactcttcaccaaagagcccctaaaacccgccacatctaccatcaccctctacatcaccgccccgaccttagctctcaccatcgctcttctactatgaacccccctccccatacccaaccccctggtcaacctcaacctaggcctcctatttattctagccacctctagcctagccgtttactcaatcctctgatcagggtgagcatcaaactcaaactacgccctgatcggcgcactgcgagcagtagcccaaacaatctcatatgaagtcaccctagccatcattctactatcaacattactaataagtggctcctttaacctctccacccttatcacaacacaagaacacctctgattactcctgccatcatgacccttggccataatatgatttatctccacactagcagagaccaaccgaacccccttcgaccttgccgaaggggagtccgaactagtctcaggcttcaacatcgaatacgccgcaggccccttcgccctattcttcatagccgaatacacaaacattattataataaacaccctcaccactacaatcttcctaggaacaacatatgacgcactctcccctgaactctacacaacatattttgtcaccaagaccctacttctaacctccctgttcttatgaattcgaacagcatacccccgattccgctacgaccaactcatacacctcctatgaaaaaacttcctaccactcaccctagcattacttatatgacatgtctccatacccattacaatctccagcattccccctcaaacctaagaaatatgtctgataaaagagttactttgatagagtaaataataggagcttaaacccccttatttctaggactatgagaatcgaacccatccctgagaatccaaaattctccgtgccacctatcacaccccatcctaaagtaaggtcagctaaataagctatcgggcccataccccgaaaatgttggttatacccttcccgtactaattaatcccctggcccaacccgtcatctactctaccatctttgcaggcacactcatcacagcgctaagctcgcactgattttttacctgagtaggcctagaaataaacatgctagcttttattccagttctaaccaaaaaaataaaccctcgttccacagaagctgccatcaagtatttcctcacgcaagcaaccgcatccataatccttctaatagctatcctcttcaacaatatactctccggacaatgaaccataaccaatactaccaatcaatactcatcattaataatcataatggctatagcaataaaactaggaatagccccctttcacttctgagtcccagaggttacccaaggcacccctctgacatccggcctgcttcttctcacatgacaaaaactagcccccatctcaatcatataccaaatctctccctcactaaacgtaagccttctcctcactctctcaatcttatccatcatagcaggcagttgaggtggattaaaccaaacccagctacgcaaaatcttagcatactcctcaattacccacataggatgaataatagcagttctaccgtacaaccctaacataaccattcttaatttaactatttatattatcctaactactaccgcattcctactactcaacttaaactccagcaccacgaccctactactatctcgcacctgaaacaagctaacatgactaacacccttaattccatccaccctcctctccctaggaggcctgcccccgctaaccggctttttgcccaaatgggccattatcgaagaattcacaaaaaacaatagcctcatcatccccaccatcatagccaccatcaccctccttaacctctacttctacctacgcctaatctactccacctcaatcacactactccccatatctaacaacgtaaaaataaaatgacagtttgaacatacaaaacccaccccattcctccccacactcatcgcccttaccacgctactcctacctatctccccttttatactaataatcttatagaaatttaggttaaatacagaccaagagccttcaaagccctcagtaagttgcaatacttaatttctgtaacagctaaggactgcaaaaccccactctgcatcaactgaacgcaaatcagccactttaattaagctaagcccttactagaccaatgggacttaaacccacaaacacttagttaacagctaagcaccctaatcaactggcttcaatctacttctcccgccgccgggaaaaaaggcgggagaagccccggcaggtttgaagctgcttcttcgaatttgcaattcaatatgaaaatcacctcggagctggtaaaaagaggcctaacccctgtctttagatttacagtccaatgcttcactcagccattttacctcacccccactgatgttcgccgaccgttgactattctctacaaaccacaaagacattggaacactatacctattattcggcgcatgagctggagtcctaggcacagctctaagcctccttattcgagccgagctgggccagccaggcaaccttctaggtaacgaccacatctacaacgttatcgtcacagcccatgcatttgtaataatcttcttcatagtaatacccatcataatcggaggctttggcaactgactagttcccctaataatcggtgcccccgatatggcgtttccccgcataaacaacataagcttctgactcttacctccctctctcctactcctgctcgcatctgctatagtggaggccggagcaggaacaggttgaacagtctaccctcccttagcagggaactactcccaccctggagcctccgtagacctaaccatcttctccttacacctagcaggtgtctcctctatcttaggggccatcaatttcatcacaacaattatcaatataaaaccccctgccataacccaataccaaacgcccctcttcgtctgatccgtcctaatcacagcagtcctacttctcctatctctcccagtcctagctgctggcatcactatactactaacagaccgcaacctcaacaccaccttcttcgaccccgccggaggaggagaccccattctataccaacacctattctgatttttcggtcaccctgaagtttatattcttatcctaccaggcttcggaataatctcccatattgtaacttactactccggaaaaaaagaaccatttggatacataggtatggtctgagctatgatatcaattggcttcctagggtttatcgtgtgagcacaccatatatttacagtaggaatagacgtagacacacgagcatatttcacctccgctaccataatcatcgctatccccaccggcgtcaaagtatttagctgactcgccacactccacggaagcaatatgaaatgatctgctgcagtgctctgagccctaggattcatctttcttttcaccgtaggtggcctgactggcattgtattagcaaactcatcattagacatcgtactacacgacacgtactacgttgtagctcacttccactatgtcctatcaataggagctgtatttgccatcataggaggcttcattcactgatttcccctattctcaggctacaccctagaccaaacctacgccaaaatccatttcactatcatattcatcggcgtaaatctaactttcttcccacaacactttctcggcctatccggaatgccccgacgttactcggactaccccgatgcatacaccacatgaaacatcctatcatctgtaggctcattcatttctctaacagcagtaatattaataattttcatgatttgagaagccttcgcttcgaagcgaaaagtcctaatagtagaagaaccctccataaacctggagtgactatatggatgccccccaccctaccacacattcgaagaacccgtatacataaaatctagacaaaaaaggaaggaatcgaaccccccaaagctggtttcaagccaaccccatggcctccatgactttttcaaaaaggtattagaaaaaccatttcataactttgtcaaagttaaattataggctaaatcctatatatcttaatggcacatgcagcgcaagtaggtctacaagacgctacttcccctatcatagaagagcttatcacctttcatgatcacgccctcataatcattttccttatctgcttcctagtcctgtatgcccttttcctaacactcacaacaaaactaactaatactaacatctcagacgctcaggaaatagaaaccgtctgaactatcctgcccgccatcatcctagtcctcatcgccctcccatccctacgcatcctttacataacagacgaggtcaacgatccctcccttaccatcaaatcaattggccaccaatggtactgaacctacgagtacaccgactacggcggactaatcttcaactcctacatacttcccccattattcctagaaccaggcgacctgcgactccttgacgttgacaatcgagtagtactcccgattgaagcccccattcgtataataattacatcacaagacgtcttgcactcatgagctgtccccacattaggcttaaaaacagatgcaattcccggacgtctaaaccaaaccactttcaccgctacacgaccgggggtatactacggtcaatgctctgaaatctgtggagcaaaccacagtttcatgcccatcgtcctagaattaattcccctaaaaatctttgaaatagggcccgtatttaccctatagcaccccctctaccccctctagagcccactgtaaagctaacttagcattaaccttttaagttaaagattaagagaaccaacacctctttacagtgaaatgccccaactaaatactaccgtatggcccaccataattacccccatactccttacactattcctcatcacccaactaaaaatattaaacacaaactaccacctacctccctcaccaaagcccataaaaataaaaaattataacaaaccctgagaaccaaaatgaacgaaaatctgttcgcttcattcattgcccccacaatcctaggcctacccgccgcagtactgatcattctatttccccctctattgatccccacctccaaatatctcatcaacaaccgactaatcaccacccaacaatgactaatcaaactaacctcaaaacaaatgataaccatacacaacactaaaggacgaacctgatctcttatactagtatccttaatcatttttattgccacaactaacctcctcggactcctgcctcactcatttacaccaaccacccaactatctataaacctagccatggccatccccttatgagcgggcgcagtgattataggctttcgctctaagattaaaaatgccctagcccacttcttaccacaaggcacacctacaccccttatccccatactagttattatcgaaaccatcagcctactcattcaaccaatagccctggccgtacgcctaaccgctaacattactgcaggccacctactcatgcacctaattggaagcgccaccctagcaatatcaaccattaaccttccctctacacttatcatcttcacaattctaattctactgactatcctagaaatcgctgtcgccttaatccaagcctacgttttcacacttctagtaagcctctacctgcacgacaacacataatgacccaccaatcacatgcctatcatatagtaaaacccagcccatgacccctaacaggggccctctcagccctcctaatgacctccggcctagccatgtgatttcacttccactccataacgctcctcatactaggcctactaaccaacacactaaccatataccaatgatggcgcgatgtaacacgagaaagcacataccaaggccaccacacaccacctgtccaaaaaggccttcgatacgggataatcctatttattacctcagaagtttttttcttcgcaggatttttctgagccttttaccactccagcctagcccctaccccccaattaggagggcactggcccccaacaggcatcaccccgctaaatcccctagaagtcccactcctaaacacatccgtattactcgcatcaggagtatcaatcacctgagctcaccatagtctaatagaaaacaaccgaaaccaaataattcaagcactgcttattacaattttactgggtctctattttaccctcctacaagcctcagagtacttcgagtctcccttcaccatttccgacggcatctacggctcaacattttttgtagccacaggcttccacggacttcacgtcattattggctcaactttcctcactatctgcttcatccgccaactaatatttcactttacatccaaacatcactttggcttcgaagccgccgcctgatactggcattttgtagatgtggtttgactatttctgtatgtctccatctattgatgagggtcttactcttttagtataaatagtaccgttaacttccaattaactagttttgacaacattcaaaaaagagtaataaacttcgccttaattttaataatcaacaccctcctagccttactactaataattattacattttgactaccacaactcaacggctacatagaaaaatccaccccttacgagtgcggcttcgaccctatatcccccgcccgcgtccctttctccataaaattcttcttagtagctattaccttcttattatttgatctagaaattgccctccttttacccctaccatgagccctacaaacaactaacctgccactaatagttatgtcatccctcttattaatcatcatcctagccctaagtctggcctatgagtgactacaaaaaggattagactgagccgaattggtatatagtttaaacaaaacgaatgatttcgactcattaaattatgataatcatatttaccaaatgcccctcatttacataaatattatactagcatttaccatctcacttctaggaatactagtatatcgctcacacctcatatcctccctactatgcctagaaggaataatactatcgctgttcattatagctactctcataaccctcaacacccactccctcttagccaatattgtgcctattgccatactagtctttgccgcctgcgaagcagcggtgggcctagccctactagtctcaatctccaacacatatggcctagactacgtacataacctaaacctactccaatgctaaaactaatcgtcccaacaattatattactaccactgacatgactttccaaaaaacacataatttgaatcaacacaaccacccacagcctaattattagcatcatccctctactattttttaaccaaatcaacaacaacctatttagctgttccccaaccttttcctccgaccccctaacaacccccctcctaatactaactacctgactcctacccctcacaatcatggcaagccaacgccacttatccagtgaaccactatcacgaaaaaaactctacctctctatactaatctccctacaaatctccttaattataacattcacagccacagaactaatcatattttatatcttcttcgaaaccacacttatccccaccttggctatcatcacccgatgaggcaaccagccagaacgcctgaacgcaggcacatacttcctattctacaccctagtaggctcccttcccctactcatcgcactgatttacactcacaacaccctaggctcactaaacattctactactcactctcactgcccaagaactatcaaactcctgagccaacaacttaatatgactagcttacacaatagcttttatagtaaagatacctctttacggactccacttatgactccctaaagcccatgtcgaagcccccatcgctgggtcaatagtacttgccgcagtactcttaaaactaggcggctatggtataatacgcctcacactcattctcaaccccctgacaaaacacatagcctaccccttccttgtactatccctatgaggcataattataacaagctccatctgcctacgacaaacagacctaaaatcgctcattgcatactcttcaatcagccacatagccctcgtagtaacagccattctcatccaaaccccctgaagcttcaccggcgcagtcattctcataatcgcccacggacttacatcctcattactattctgcctagcaaactcaaactacgaacgcactcacagtcgcatcataatcctctctcaaggacttcaaactctactcccactaatagctttttgatgacttctagcaagcctcgctaacctcgccttaccccccactattaacctactgggagaactctctgtgctagtaaccacgttctcctgatcaaatatcactctcctacttacaggactcaacatactagtcacagccctatactccctctacatatttaccacaacacaatggggctcactcacccaccacattaacaacataaaaccctcattcacacgagaaaacaccctcatgttcatacacctatcccccattctcctcctatccctcaaccccgacatcattaccgggttttcctcttgtaaatatagtttaaccaaaacatcagattgtgaatctgacaacagaggcttacgaccccttatttaccgagaaagctcacaagaactgctaactcatgcccccatgtctaacaacatggctttctcaacttttaaaggataacagctatccattggtcttaggccccaaaaattttggtgcaactccaaataaaagtaataaccatgcacactactataaccaccctaaccctgacttccctaattccccccatccttaccaccctcgttaaccctaacaaaaaaaactcatacccccattatgtaaaatccattgtcgcatccacctttattatcagtctcttccccacaacaatattcatgtgcctagaccaagaagttattatctcgaactgacactgagccacaacccaaacaacccagctctccctaagcttcaaactagactacttctccataatattcatccctgtggcattgttcgttacatggtccatcatagaattctcactgtgatatataaactcagacccaaacattaatcagttcttcaaatatctactcatcttcctaattaccatactaatcttagttaccgctaacaacctattccaactgttcatcggctgagagggcgtaggaattatatccttcttgctcatcagttgatgatacgcccgagcagatgccaacacagcagccattcaagcaatcctatacaaccgtatcggcgatatcggtttcatcctcgccttagcatgatttatcctacactccaactcatgagacccacaacaaatagcccttctaaacgctaatccaagcctcaccccactactaggcctcctcctagcagcagcaggcaaatcagcccaattaggtctccacccctgactcccctcagccatagaaggccccaccccagtctcagccctactccactcaagcactatagttgtagcaggaatcttcttactcatccgcttccaccccctagcagaaaatagcccactaatccaaactctaacactatgcttaggcgctatcaccactctgttcgcagcagtctgcgcccttacacaaaatgacatcaaaaaaatcgtagccttctccacttcaagtcaactaggactcataatagttacaatcggcatcaaccaaccacacctagcattcctgcacatctgtacccacgccttcttcaaagccatactatttatgtgctccgggtccatcatccacaaccttaacaatgaacaagatattcgaaaaataggaggactactcaaaaccatacctctcacttcaacctccctcaccattggcagcctagcattagcaggaatacctttcctcacaggtttctactccaaagaccacatcatcgaaaccgcaaacatatcatacacaaacgcctgagccctatctattactctcatcgctacctccctgacaagcgcctatagcactcgaataattcttctcaccctaacaggtcaacctcgcttccccacccttactaacattaacgaaaataaccccaccctactaaaccccattaaacgcctgacagccggaagcctattcgcaggatttctcattactaacaacatttcccccgcatcccccttccaaacaacaatccccctctacctaaaactcacagccctcgctgtcactttcctaggacttctaacagccctagacctcaactacctaaccaacaaacttaaaataaaatccccactatgcacattttatttctccaacatactcggattctaccctagcatcatacaccgcacaatcccctatctaggccttcttacgagccaaaacctgcccctactcctcctagacctaacctgactagaaaagctattacctaaaacaatttcacagcaccaaatctccacctccatcatcacctcaacccaaaaaggcataattaaactttacttcctctctttcttcttcccactcatcctaaccctactcctaatcacataacctattcccccgagcaatctcaattacaatatatacaccaacaaacaatgttcaaccagtaactactactaatcaacgcccataatcatacaaagcccccgcaccaataggatcctcccgaatcaaccctgacccctctccttcataaattattcagcttcctacactattaaagtttaccacaaccaccaccccatcatactctttcacccacagcaccaatcctacctccatcgctaaccccactaaaacactcaccaagacctcaacccctgacccccatgcctcaggatactcctcaatagccatcgctgtagtatatccaaagacaaccatcattccccctaaataaattaaaaaaactattaaacccatataacctcccccaaaattcagaataataacacacccgaccacaccgctaacaatcaatactaaacccccataaataggagaaggcttagaagaaaaccccacaaaccccattactaaacccacactcaacagaaacaaagcatacatcattattctcgcacggactacaaccacgaccaatgatatgaaaaaccatcgttgtatttcaactacaagaacaccaatgaccccaatacgcaaaattaaccccctaataaaattaattaaccactcactcatcgacctccccaccccatccaacatctccgcatgatgaaacttcggctcactccttggcgcctgcctgatcctccaaatcaccacaggactattcctagccatgcactactcaccagacgcctcaaccgccttttcatcaatcgcccacatcactcgagacgtaaattatggctgaatcatccgctaccttcacgccaatggcgcctcaatattctttatctgcctcttcctacacatcgggcgaggcctatattacggatcatttctctactcagaaacctgaaacatcggcattatcctcctgcttgcaactatagcaacagccttcataggctatgtcctcccgtgaggccaaatatcattctgaggggccacagtaattacaaacttactatccgccatcccatacattgggacagacctagttcaatgaatctgaggaggctactcagtagacagtcccaccctcacacgattctttacctttcacttcatcttgcccttcattattgcagccctagcagcactccacctcctattcttgcacgaaacgggatcaaacaaccccctaggaatcacctcccattccgataaaatcaccttccacccttactacacaatcaaagacgccctcggcttacttctcttcattctctccttaatgacattaacactattctcaccagacctcctaggcgacccagacaattataccctagccaaccccttaaacacccctccccacatcaagcccgaatgatatttcctattcgcctacacaattctccgatccgtccctaacaaactaggaggcgtccttgccctattactatccatcctcatcctagcaataatccccatcctccatatatccaaacaacaaagcataatatttcgcccactaagccaatcactttattgactcctagccgcagacctcctcattctaacctgaatcggaggacaaccagtaagctacccttttaccatcattggacaagtagcatccgtactatacttcacaacaatcctaatcctaataccaactatctccctaattgaaaacaaaatactcaaatgggcctgtccttgtagtataaactaatacaccagtcttgtaaaccggagatgaaaacctttttccaaggacaaatcagagaaaaagtctttaactccaccattagcacccaaagctaagattctaatttaaactattctctgttctttcatggggaagcagatttgggtaccacccaagtattgacttacccatcaacaaccgctatgtatttcgtacattactgccagccaccatgaatattgcacggtaccataaatacttgaccacctgtagtacgtaaaaacccaatccacatcaaaaccccctccccatgcttacaagcaagtacagcaatcaactctcaactatcacacatcaactgcaactccaaagccacccctcacccactaggataccaacaaacctacccacccttaacagtacatagtacataaagccatttaccgtacatagcacattacagtcaaatcccttctcgtccccatggatgacccccctcagataggggtcccttgaccaccatcctccgtgaaatcaatatcccgcacaagagtgctactctcctcgctccgggcccataacacttgggggtagctaaagtgaactgtatccgacatctggttcctacttcagggtcataaagcctaaatagcccacacgttccccttaaataagacatcacgatg

SEQ ID NO: 127 - DNA, 16570 bp, Homo sapiens mitochondrial
  3108: "n" refers to a nucleotide at position 3107 of the Cambridge Reference Sequence (CRS, Anderson et al. 1981 Nature 290:457-465), later determined to be absent from the human mtDNA sequence according to the revised CRS (rCRS, Andrews et al. 1999 Nature Genetics 23:147); "n" therefore represents a single nucleotide deletion at a position corresponding to nucleotide 3107 of SEQ ID NO:1 as provided herein.
gatcacaggtctatcaccctattaaccactcacgggagctctccatgcatttggtattttcgtctggggggtgtgcacgcgatagcattgcgagacgctggagccggagcaccctatgtcgcagtatctgtctttgattcctgcctcatcctattatttatcgcacctacgttcaatattacaggcgaacatacttactaaagtgtgttaattaattaatgcttgtaggacataataataacaattgaatgtctgcacagccgctttccacacagacatcataacaaaaaatttccaccaaaccccccctccccccccgcttctggccacagcacttaaacacatctctgccaaaccccaaaaacaaagaaccctaacaccagcctaaccagatttcaaattttatcttttggcggtatgcacttttaacagtcaccccccaactaacacattattttcccctcccactcccatactactaatctcatcaatacaacccccgcccatcctacccagcacacacaccgctgctaaccccataccccgaaccaaccaaaccccaaagacaccccccacagtttatgtagcttacctcctcaaagcaatacactgaaaatgtttagacgggctcacatcaccccataaacaaataggtttggtcctagcctttctattagctcttagtaagattacacatgcaagcatccccgttccagtgagttcaccctctaaatcaccacgatcaaaagggacaagcatcaagcacgcagcaatgcagctcaaaacgcttagcctagccacacccccacgggaaacagcagtgattaacctttagcaataaacgaaagtttaactaagctatactaaccccagggttggtcaatttcgtgccagccaccgcggtcacacgattaacccaagtcaatagaagccggcgtaaagagtgttttagatcaccccctccccaataaagctaaaactcacctgagttgtaaaaaactccagttgacacaaaatagactacgaaagtggctttaacatatctgaacacacaatagctaagacccaaactgggattagataccccactatgcttagccctaaacctcaacagttaaatcaacaaaactgctcgccagaacactacgagccacagcttaaaactcaaaggacctggcggtgcttcatatccctctagaggagcctgttctgtaatcgataaaccccgatcaacctcaccacctcttgctcagcctatataccgccatcttcagcaaaccctgatgaaggctacaaagtaagcgcaagtacccacgtaaagacgttaggtcaaggtgtagcccatgaggtggcaagaaatgggctacattttctaccccagaaaactacgatagcccttatgaaacttaagggtcgaaggtggatttagcagtaaactgagagtagagtgcttagttgaacagggccctgaagcgcgtacacaccgcccgtcaccctcctcaagtatacttcaaaggacatttaactaaaacccctacgcatttatatagaggagacaagtcgtaacatggtaagtgtactggaaagtgcacttggacgaaccagagtgtagcttaacacaaagcacccaacttacacttaggagatttcaacttaacttgaccgctctgagctaaacctagccccaaacccactccaccttactaccagacaaccttagccaaaccatttacccaaataaagtataggcgatagaaattgaaacctggcgcaatagatatagtaccgcaagggaaagatgaaaaattataaccaagcataatatagcaaggactaacccctataccttctgcataatgaattaactagaaataactttgcaaggagagccaaagctaagacccccgaaaccagacgagctacctaagaacagctaaaagagcacacccgtctatgtagcaaaatagtgggaagatttataggtagaggcgacaaacctaccgagcctggtgatagctggttgtccaagatagaatcttagttcaactttaaatttgcccacagaaccctctaaatccccttgtaaatttaactgttagtccaaagaggaacagctctttggacactaggaaaaaaccttgtagagagagtaaaaaatttaacacccatagtaggcctaaaagcagccaccaattaagaaagcgttcaagctcaacacccactacctaaaaaatcccaaacatataactgaactcctcacacccaattggaccaatctatcaccctatagaagaactaatgttagtataagtaacatgaaaacattctcctccgcataagcctgcgtcagattaaaacactgaactgacaattaacagcccaatatctacaatcaaccaacaagtcattattaccctcactgtcaacccaacacaggcatgctcataaggaaaggttaaaaaaagtaaaaggaactcggcaaatcttaccccgcctgtttaccaaaaacatcacctctagcatcaccagtattagaggcaccgcctgcccagtgacacatgtttaacggccgcggtaccctaaccgtgcaaaggtagcataatcacttgttccttaaatagggacctgtatgaatggctccacgagggttcagctgtctcttacttttaaccagtgaaattgacctgcccgtgaagaggcgggcataacacagcaagacgagaagaccctatggagctttaatttattaatgcaaacagtacctaacaaacccacaggtcctaaactaccaaacctgcattaaaaatttcggttggggcgacctcggagcagaacccaacctccgagcagtacatgctaagacttcaccagtcaaagcgaactactatactcaattgatccaataacttgaccaacggaacaagttaccctagggataacagcgcaatcctattctagagtccatatcaacaatagggtttacgacctcgatgttggatcaggacatcccaatggtgcagccgctattaaaggttcgtttgttcaacgattaaagtcctacgtgatctgagttcagaccggagtaatccaggtcggtttctatctacnttcaaattcctccctgtacgaaaggacaagagaaataaggcctacttcacaaagcgccttcccccgtaaatgatatcatctcaacttagtattatacccacacccacccaagaacagggtttgttaagatggcagagcccggtaatcgcataaaacttaaaactttacagtcagaggttcaattcctcttcttaacaacatacccatggccaacctcctactcctcattgtacccattctaatcgcaatggcattcctaatgcttaccgaacgaaaaattctaggctatatacaactacgcaaaggccccaacgttgtaggcccctacgggctactacaacccttcgctgacgccataaaactcttcaccaaagagcccctaaaacccgccacatctaccatcaccctctacatcaccgccccgaccttagctctcaccatcgctcttctactatgaacccccctccccatacccaaccccctggtcaacctcaacctaggcctcctatttattctagccacctctagcctagccgtttactcaatcctctgatcagggtgagcatcaaactcaaactacgccctgatcggcgcactgcgagcagtagcccaaacaatctcatatgaagtcaccctagccatcattctactatcaacattactaataagtggctcctttaacctctccacccttatcacaacacaagaacacctctgattactcctgccatcatgacccttggccataatatgatttatctccacactagcagagaccaaccgaacccccttcgaccttgccgaaggggagtccgaactagtctcaggcttcaacatcgaatacgccgcaggccccttcgccctattcttcatagccgaatacacaaacattattataataaacaccctcaccactacaatcttcctaggaacaacatatgacgcactctcccctgaactctacacaacatattttgtcaccaagaccctacttctaacctccctgttcttatgaattcgaacagcatacccccgattccgctacgaccaactcatacacctcctatgaaaaaacttcctaccactcaccctagcattacttatatgatatgtctccatacccattacaatctccagcattccccctcaaacctaagaaatatgtctgataaaagagttactttgatagagtaaataataggagcttaaacccccttatttctaggactatgagaatcgaacccatccctgagaatccaaaattctccgtgccacctatcacaccccatcctaaagtaaggtcagctaaataagctatcgggcccataccccgaaaatgttggttatacccttcccgtactaattaatcccctggcccaacccgtcatctactctaccatctttgcaggcacactcatcacagcgctaagctcgcactgattttttacctgagtaggcctagaaataaacatgctagcttttattccagttctaaccaaaaaaataaaccctcgttccacagaagctgccatcaagtatttcctcacgcaagcaaccgcatccataatccttctaatagctatcctcttcaacaatatactctccggacaatgaaccataaccaatactaccaatcaatactcatcattaataatcataatggctatagcaataaaactaggaatagccccctttcacttctgagtcccagaggttacccaaggcacccctctgacatccggcctgcttcttctcacatgacaaaaactagcccccatctcaatcatataccaaatctctccctcactaaacgtaagccttctcctcactctctcaatcttatccatcatagcaggcagttgaggtggattaaaccaaacccagctacgcaaaatcttagcatactcctcaattacccacataggatgaataatagcagttctaccgtacaaccctaacataaccattcttaatttaactatttatattatcctaactactaccgcattcctactactcaacttaaactccagcaccacgaccctactactatctcgcacctgaaacaagctaacatgactaacacccttaattccatccaccctcctctccctaggaggcctgcccccgctaaccggctttttgcccaaatgggccattatcgaagaattcacaaaaaacaatagcctcatcatccccaccatcatagccaccatcaccctccttaacctctacttctacctacgcctaatctactccacctcaatcacactactccccatatctaacaacgtaaaaataaaatgacagtttgaacatacaaaacccaccccattcctccccacactcatcgcccttaccacgctactcctacctatctccccttttatactaataatcttatagaaatttaggttaaatacagaccaagagccttcaaagccctcagtaagttgcaatacttaatttctgtaacagctaaggactgcaaaaccccactctgcatcaactgaacgcaaatcagccactttaattaagctaagcccttactagaccaatgggacttaaacccacaaacacttagttaacagctaagcaccctaatcaactggcttcaatctacttctcccgccgccgggaaaaaaggcgggagaagccccggcaggtttgaagctgcttcttcgaatttgcaattcaatatgaaaatcacctcggagctggtaaaaagaggcctaacccctgtctttagatttacagtccaatgcttcactcagccattttacctcacccccactgatgttcgccgaccgttgactattctctacaaaccacaaagacattggaacactatacctattattcggcgcatgagctggagtcctaggcacagctctaagcctccttattcgagccgagctgggccagccaggcaaccttctaggtaacgaccacatctacaacgttatcgtcacagcccatgcatttgtaataatcttcttcatagtaatacccatcataatcggaggctttggcaactgactagttcccctaataatcggtgcccccgatatggcgtttccccgcataaacaacataagcttctgactcttacctccctctctcctactcctgctcgcatctgctatagtggaggccggagcaggaacaggttgaacagtctaccctcccttagcagggaactactcccaccctggagcctccgtagacctaaccatcttctccttacacctagcaggtgtctcctctatcttaggggccatcaatttcatcacaacaattatcaatataaaaccccctgccataacccaataccaaacgcccctcttcgtctgatccgtcctaatcacagcagtcctacttctcctatctctcccagtcctagctgctggcatcactatactactaacagaccgcaacctcaacaccaccttcttcgaccccgccggaggaggagaccccattctataccaacacctattctgatttttcggtcaccctgaagtttatattcttatcctaccaggcttcggaataatctcccatattgtaacttactactccggaaaaaaagaaccatttggatacataggtatggtctgagctatgatatcaattggcttcctagggtttatcgtgtgagcacaccatatatttacagtaggaatagacgtagacacacgagcatatttcacctccgctaccataatcatcgctatccccaccggcgtcaaagtatttagctgactcgccacactccacggaagcaatatgaaatgatctgctgcagtgctctgagccctaggattcatctttcttttcaccgtaggtggcctgactggcattgtattagcaaactcatcactagacatcgtactacacgacacgtactacgttgtagcccacttccactatgtcctatcaataggagctgtatttgccatcataggaggcttcattcactgatttcccctattctcaggctacaccctagaccaaacctacgccaaaatccatttcactatcatattcatcggcgtaaatctaactttcttcccacaacactttctcggcctatccggaatgccccgacgttactcggactaccccgatgcatacaccacatgaaacatcctatcatctgtaggctcattcatttctctaacagcagtaatattaataattttcatgatttgagaagccttcgcttcgaagcgaaaagtcctaatagtagaagaaccctccataaacctggagtgactatatggatgccccccaccctaccacacattcgaagaacccgtatacataaaatctagacaaaaaaggaaggaatcgaaccccccaaagctggtttcaagccaaccccatggcctccatgactttttcaaaaaggtattagaaaaaccatttcataactttgtcaaagttaaattataggctaaatcctatatatcttaatggcacatgcagcgcaagtaggtctacaagacgctacttcccctatcatagaagagcttatcacctttcatgatcacgccctcataatcattttccttatctgcttcctagtcctgtatgcccttttcctaacactcacaacaaaactaactaatactaacatctcagacgctcaggaaatagaaaccgtctgaactatcctgcccgccatcatcctagtcctcatcgccctcccatccctacgcatcctttacataacagacgaggtcaacgatccctcccttaccatcaaatcaattggccaccaatggtactgaacctacgagtacaccgactacggcggactaatcttcaactcctacatacttcccccattattcctagaaccaggcgacctgcgactccttgacgttgacaatcgagtagtactcccgattgaagcccccattcgtataataattacatcacaagacgtcttgcactcatgagctgtccccacattaggcttaaaaacagatgcaattcccggacgtctaaaccaaaccactttcaccgctacacgaccgggggtatactacggtcaatgctctgaaatctgtggagcaaaccacagtttcatgcccatcgtcctagaattaattcccctaaaaatctttgaaatagggcccgtatttaccctatagcaccccctctaccccctctagagcccactgtaaagctaacttagcattaaccttttaagttaaagattaagagaaccaacacctctttacagtgaaatgccccaactaaatactaccgtatggcccaccataattacccccatactccttacactattcctcatcacccaactaaaaatattaaacacaaactaccacctacctccctcaccaaagcccataaaaataaaaaattataacaaaccctgagaaccaaaatgaacgaaaatctgttcgcttcattcattgcccccacaatcctaggcctacccgccgcagtactgatcattctatttccccctctattgatccccacctccaaatatctcatcaacaaccgactaatcaccacccaacaatgactaatcaaactaacctcaaaacaaatgataaccatacacaacactaaaggacgaacctgatctcttatactagtatccttaatcatttttattgccacaactaacctcctcggactcctgcctcactcatttacaccaaccacccaactatctataaacctagccatggccatccccttatgagcgggcgcagtgattataggctttcgctctaagattaaaaatgccctagcccacttcttaccacaaggcacacctacaccccttatccccatactagttattatcgaaaccatcagcctactcattcaaccaatagccctggccgtacgcctaaccgctaacattactgcaggccacctactcatgcacctaattggaagcgccgccctagcaatatcaaccattaaccttccctctacacttatcatcttcacaattctaattctactgactatcctagaaatcgctgtcgccttaatccaagcctacgttttcacacttctagtaagcctctacctgcacgacaacacataatgacccaccaatcacatgcctatcatatagtaaaacccagcccatgacccctaacaggggccctctcagccctcctaatgacctccggcctagccatgtgatttcacttccactccataacgctcctcatactaggcctactaaccaacacactaaccatataccaatgatggcgcgatgtaacacgagaaagcacataccaaggccaccacacaccacctgtccaaaaaggccttcgatacgggataatcctatttattacctcagaagtttttttcttcgcaggatttttctgagccttttaccactccagcctagcccctaccccccaattaggagggcactggcccccaacaggcatcaccccgctaaatcccctagaagtcccactcctaaacacatccgtattactcgcatcaggagtatcaatcacctgagctcaccatagtctaatagaaaacaaccgaaaccaaataattcaagcactgcttattacaattttactgggtctctattttaccctcctacaagcctcagagtacttcgagtctcccttcaccatttccgacggcatctacggctcaacattttttgtagccacaggcttccacggacttcacgtcattattggctcaactttcctcactatctgcttcatccgccaactaatatttcactttacatccaaacatcactttggcttcgaagccgccgcctgatactggcattttgtagatgtggtttgactatttctgtatgtctccatctattgatgagggtcttactcttttagtataaatagtaccgttaacttccaattaactagttttgacaacattcaaaaaagagtaataaacttcgccttaattttaataatcaacaccctcctagccttactactaataattattacattttgactaccacaactcaacggctacatagaaaaatccaccccttacgagtgcggcttcgaccctatatcccccgcccgcgtccctttctccataaaattcttcttagtagctattaccttcttattatttgatctagaaattgccctccttttacccctaccatgagccctacaaacaactaacctgccactaatagttatgtcatccctcttattaatcatcatcctagccctaagtctggcctatgagtgactacaaaaaggattagactgaaccgaattggtatatagtttaaacaaaacgaatgatttcgactcattaaattatgataatcatatttaccaaatgcccctcatttacataaatattatactagcatttaccatctcacttctaggaatactagtatatcgctcacacctcatatcctccctactatgcctagaaggaataatactatcgctgttcattatagctactctcataaccctcaacacccactccctcttagccaatattgtgcctattgccatactagtctttgccgcctgcgaagcagcggtgggcctagccctactagtctcaatctccaacacatatggcctagactacgtacataacctaaacctactccaatgctaaaactaatcgtcccaacaattatattactaccactgacatgactttccaaaaaacacataatttgaatcaacacaaccacccacagcctaattattagcatcatccctctactattttttaaccaaatcaacaacaacctatttagctgttccccaaccttttcctccgaccccctaacaacccccctcctaatactaactacctgactcctacccctcacaatcatggcaagccaacgccacttatccagtgaaccactatcacgaaaaaaactctacctctctatactaatctccctacaaatctccttaattataacattcacagccacagaactaatcatattttatatcttcttcgaaaccacacttatccccaccttggctatcatcacccgatgaggcaaccagccagaacgcctgaacgcaggcacatacttcctattctacaccctagtaggctcccttcccctactcatcgcactaatttacactcacaacaccctaggctcactaaacattctactactcactctcactgcccaagaactatcaaactcctgagccaacaacttaatatgactagcttacacaatagcttttatagtaaagatacctctttacggactccacttatgactccctaaagcccatgtcgaagcccccatcgctgggtcaatagtacttgccgcagtactcttaaaactaggcggctatggtataatacgcctcacactcattctcaaccccctgacaaaacacatagcctaccccttccttgtactatccctatgaggcataattataacaagctccatctgcctacgacaaacagacctaaaatcgctcattgcatactcttcaatcagccacatagccctcgtagtaacagccattctcatccaaaccccctgaagcttcaccggcgcagtcattctcataatcgcccacgggcttacatcctcattactattctgcctagcaaactcaaactacgaacgcactcacagtcgcatcataatcctctctcaaggacttcaaactctactcccactaatagctttttgatgacttctagcaagcctcgctaacctcgccttaccccccactattaacctactgggagaactctctgtgctagtaaccacgttctcctgatcaaatatcactctcctacttacaggactcaacatactagtcacagccctatactccctctacatatttaccacaacacaatggggctcactcacccaccacattaacaacataaaaccctcattcacacgagaaaacaccctcatgttcatacacctatcccccattctcctcctatccctcaaccccgacatcattaccgggttttcctcttgtaaatatagtttaaccaaaacatcagattgtgaatctgacaacagaggcttacgaccccttatttaccgagaaagctcacaagaactgctaactcatgcccccatgtctaacaacatggctttctcaacttttaaaggataacagctatccattggtcttaggccccaaaaattttggtgcaactccaaataaaagtaataaccatgcacactactataaccaccctaaccctgacttccctaattccccccatccttaccaccctcgttaaccctaacaaaaaaaactcatacccccattatgtaaaatccattgtcgcatccacctttattatcagtctcttccccacaacaatattcatgtgcctagaccaagaagttattatctcgaactgacactgagccacaacccaaacaacccagctctccctaagcttcaaactagactacttctccataatattcatccctgtagcattgttcgttacatggtccatcatagaattctcactgtgatatataaactcagacccaaacattaatcagttcttcaaatatctactcatcttcctaattaccatactaatcttagttaccgctaacaacctattccaactgttcatcggctgagagggcgtaggaattatatccttcttgctcatcagttgatgatacgcccgagcagatgccaacacagcagccattcaagcaatcctatacaaccgtatcggcgatatcggtttcatcctcgccttagcatgatttatcctacactccaactcatgagacccacaacaaatagcccttctaaacgctaatccaagcctcaccccactactaggcctcctcctagcagcagcaggcaaatcagcccaattaggtctccacccctgactcccctcagccatagaaggccccaccccagtctcagccctactccactcaagcactatagttgtagcaggaatcttcttactcatccgcttccaccccctagcagaaaatagcccactaatccaaactctaacactatgcttaggcgctatcaccactctgttcgcagcagtctgcgcccttacacaaaatgacatcaaaaaaatcgtagccttctccacttcaagtcaactaggactcataatagttacaatcggcatcaaccaaccacacctagcattcctgcacatctgtacccacgccttcttcaaagccatactatttatgtgctccgggtccatcatccacaaccttaacaatgaacaagatattcgaaaaataggaggactactcaaaaccatacctctcacttcaacctccctcaccattggcagcctagcattagcaggaatacctttcctcacaggtttctactccaaagaccacatcatcgaaaccgcaaacatatcatacacaaacgcctgagccctatctattactctcatcgctacctccctgacaagcgcctatagcactcgaataattcttctcaccctaacaggtcaacctcgcttccccacccttactaacattaacgaaaataaccccaccctactaaaccccattaaacgcctggcagccggaagcctattcgcaggatttctcattactaacaacatttcccccgcatcccccttccaaacaacaatccccctctacctaaaactcacagccctcgctgtcactttcctaggacttctaacagccctagacctcaactacctaaccaacaaacttaaaataaaatccccactatgcacattttatttctccaacatactcggattctaccctagcatcacacaccgcacaatcccctatctaggccttcttacgagccaaaacctgcccctactcctcctagacctaacctgactagaaaagctattacctaaaacaatttcacagcaccaaatctccacctccatcatcacctcaacccaaaaaggcataattaaactttacttcctctctttcttcttcccactcatcctaaccctactcctaatcacataacctattcccccgagcaatctcaattacaatatatacaccaacaaacaatgttcaaccagtaactactactaatcaacgcccataatcatacaaagcccccgcaccaataggatcctcccgaatcaaccctgacccctctccttcataaattattcagcttcctacactattaaagtttaccacaaccaccaccccatcatactctttcacccacagcaccaatcctacctccatcgctaaccccactaaaacactcaccaagacctcaacccctgacccccatgcctcaggatactcctcaatagccatcgctgtagtatatccaaagacaaccatcattccccctaaataaattaaaaaaactattaaacccatataacctcccccaaaattcagaataataacacacccgaccacaccgctaacaatcaatactaaacccccataaataggagaaggcttagaagaaaaccccacaaaccccattactaaacccacactcaacagaaacaaagcatacatcattattctcgcacggactacaaccacgaccaatgatatgaaaaaccatcgttgtatttcaactacaagaacaccaatgaccccaatacgcaaaactaaccccctaataaaattaattaaccactcattcatcgacctccccaccccatccaacatctccgcatgatgaaacttcggctcactccttggcgcctgcctgatcctccaaatcaccacaggactattcctagccatgcactactcaccagacgcctcaaccgccttttcatcaatcgcccacatcactcgagacgtaaattatggctgaatcatccgctaccttcacgccaatggcgcctcaatattctttatctgcctcttcctacacatcgggcgaggcctatattacggatcatttctctactcagaaacctgaaacatcggcattatcctcctgcttgcaactatagcaacagccttcataggctatgtcctcccgtgaggccaaatatcattctgaggggccacagtaattacaaacttactatccgccatcccatacattgggacagacctagttcaatgaatctgaggaggctactcagtagacagtcccaccctcacacgattctttacctttcacttcatcttgcccttcattattgcagccctagcagcactccacctcctattcttgcacgaaacgggatcaaacaaccccctaggaatcacctcccattccgataaaatcaccttccacccttactacacaatcaaagacgccctcggcttacttctcttccttctctccttaatgacattaacactattctcaccagacctcctaggcgacccagacaattataccctagccaaccccttaaacacccctccccacatcaagcccgaatgatatttcctattcgcctacacaattctccgatccgtccctaacaaactaggaggcgtccttgccctattactatccatcctcatcctagcaataatccccatcctccatatatccaaacaacaaagcataatatttcgcccactaagccaatcactttattgactcctagccgcagacctcctcattctaacctgaatcggaggacaaccagtaagctacccttttaccatcattggacaagtagcatccgtactatacttcacaacaatcctaatcctaataccaactatctccctaattgaaaacaaaatactcaaatgggcctgtccttgtagtataaactaatacaccagtcttgtaaaccggagatgaaaacctttttccaaggacaaatcagagaaaaagtctttaactccaccattagcacccaaagctaagattctaatttaaactattctctgttctttcatggggaagcagatttgggtgccacccaagtattgactcacccatcaacaaccgctatgtatttcgtacattactgccagccaccatgaatattgtacggtaccataaatacttgaccacctgtagtacatgaaaacccaatccacatcaaaaccccctccccatgcttacaagcaagtacagcaatcaaccctcaactatcacacatcaactgcaactccaaagccacccctcacccactaggataccaacaaacctacccacccttaacagtacatagtacataaagccatttaccgtacatagcacattacagtcaaatcccttctcgtccccatggatgacccccctcagataggggtcccttgaccaccatcctccgtgaaatcaatatcccgcacaagagtgctactctcctcgctccgggcccataatacttgggggtagctaaagtgaactgtatccgacatctggttcctacttcagggccataaagcctaaatagcccacacgttccccttaaataagacatcacgatg

SEQ ID NO: 128 - DNA, 16571 bp, Homo sapiens mitochondrial
  3109: "n" refers to a nucleotide at position 3107 of the Cambridge Reference Sequence (CRS, Anderson et al. 1981 Nature 290:457-465), later determined to be absent from the human mtDNA sequence according to the revised CRS (rCRS, Andrews et al. 1999 Nature Genetics 23:147); "n" therefore represents a single nucleotide deletion at a position corresponding to nucleotide 3107 of SEQ ID NO:1 as provided herein.
gatcacaggtctatcaccctattaaccactcacgggagctctccatgcatttggtattttcgtctggggggtatgcacgcgatagcattgcgagacgctggagccggagcaccctatgtcgcagtatctgtctttgattcctgcctcatcctattatttatcgcacctacgttcaatattacaggcgaacatacttactaaagtgtgttaattaattaatgcttgtaggacataataataacaattgaatgtctgcacagccgctttccacacagacatcataacaaaaaatttccaccaaaccccccctcccccccgcttctggccacagcacttaaacacatctctgccaaaccccaaaaacaaagaaccctaacaccagcctaaccagatttcaaattttatcttttggcggtatgcacttttaacagtcaccccccaactaacacattattttcccctcccactcccatactactaatctcatcaatacaacccccgcccatcctacccagcacacacacaccgctgctaaccccataccccgaaccaaccaaaccccaaagacaccccccacagtttatgtagcttacctcctcaaagcaatacactgaaaatgtttagacgggctcacatcaccccataaacaaataggtttggtcctagcctttctattagctcttagtaagattacacatgcaagcatccccgttccagtgagttcaccctctaaatcaccacgatcaaaaaggacaagcatcaagcacgcagcaatgcagctcaaaacgcttagcctagccacacccccacgggaaacagcagtgattaacctttagcaataaacgaaagtttaactaagctatactaaccccagggttggtcaatttcgtgccagccaccgcggtcacacgattaacccaagtcaatagaagccggcgtaaagagtgttttagatcaccccctccccaataaagctaaaactcacctgagttgtaaaaaactccagttgacacaaaatagactacgaaagtggctttaacatatctgaacacacaatagctaagacccaaactgggattagataccccactatgcttagccctaaacctcaacagttaaatcaacaaaactgctcgccagaacactacgagccacagcttaaaactcaaaggacctggcggtgcttcatatccctctagaggagcctgttctgtaatcgataaaccccgatcaacctcaccacctcttgctcagcctatataccgccatcttcagcaaaccctgatgaaggctacaaagtaagcgcaagtacccacgtaaagacgttaggtcaaggtgtagcccatgaggtggcaagaaatgggctacattttctaccccagaaaactacgatagcccttatgaaacttaagggtcgaaggtggatttagcagtaaactgagagtagagtgcttagttgaacagggccctgaagcgcgtacacaccgcccgtcaccctcctcaagtatacttcaaaggacatttaactaaaacccctacgcatttatatagaggagacaagtcgtaacatggtaagtgtactggaaagtgcacttggacgaaccagagtgtagcttaacacaaagcacccaacttacacttaggagatttcaacttaacttgaccgctctgagctaaacctagccccaaacccactccaccttactaccagacaaccttagccaaaccatttacccaaataaagtataggcgatagaaattgaaacctggcgcaatagatatagtaccgcaagggaaagatgaaaaattataaccaagcataatatagcaaggactaacccctataccttctgcataatgaattaactagaaataactttgcaaggagagccaaagctaagacccccgaaaccagacgagctacctaagaacagctaaaagagcacacccgtctatgtagcaaaatagtgggaagatttataggtagaggcgacaaacctaccgagcctggtgatagctggttgtccaagatagaatcttagttcaactttaaatttgcccacagaaccctctaaatccccttgtaaatttaactgttagtccaaagaggaacagctctttggacactaggaaaaaaccttgtagagagagtaaaaaatttaacacccatagtaggcctaaaagcagccaccaattaagaaagcgttcaagctcaacacccactacctaaaaaatcccaaacatataactgaactcctcacacccaattggaccaatctatcaccctatagaagaactaatgttagtataagtaacatgaaaacattctcctccgcataagcctgcgtcagattaaaacactgaactgacaattaacagcccaatatctacaatcaaccaacaagtcattattaccctcactgtcaacccaacacaggcatgctcataaggaaaggttaaaaaaagtaaaaggaactcggcaaatcttaccccgcctgtttaccaaaaacatcacctctagcatcaccagtattagaggcaccgcctgcccagtgacacatgtttaacggccgcggtaccctaaccgtgcaaaggtagcataatcacttgttccttaaatagggacctgtatgaatggctccacgagggttcagctgtctcttacttttaaccagtgaaattgacctgcccgtgaagaggcgggcataacacagcaagacgagaagaccctatggagctttaatttattaatgcaaacagtacctaacaaacccacaggtcctaaactaccaaacctgcattaaaaatttcggttggggcgacctcggagcagaacccaacctccgagcagtacatgctaagacttcaccagtcaaagcgaactactatactcaattgatccaataacttgaccaacggaacaagttaccctagggataacagcgcaatcctattctagagtccatatcaacaatagggtttacgacctcgatgttggatcaggacatcccgatggtgcagccgctattaaaggttcgtttgttcaacgattaaagtcctacgtgatctgagttcagaccggagtaatccaggtcggtttctatctacnttcaaattcctccctgtacgaaaggacaagagaaataaggcctacttcacaaagcgccttcccccgtaaatgatatcatctcaacttagtattatacccacacccacccaagaacagggtttgttaagatggcagagcccggtaatcgcataaaacttaaaactttacagtcagaggttcaattcctcttcttaacaacatacccatggccaacctcctactcctcattgtacccattctaatcgcaatggcattcctaatgcttaccgaacgaaaaattctaggctatatacaactacgcaaaggccccaacgttgtaggcccctacgggctactacaacccttcgctgacgccataaaactcttcaccaaagagcccctaaaacccgccacatctaccatcaccctctacatcaccgccccgaccttagctctcaccatcgctcttctactatgaacccccctccccatacccaaccccctggtcaacctcaacctaggcctcctatttattctagccacctctagcctagccgtttactcaatcctctgatcagggtgagcatcaaactcaaactacgccctgatcggcgcactgcgagcagtagcccaaacaatctcatatgaagtcaccctagccatcattctactatcaacattactaataagtggctcctttaacctctccacccttatcacaacacaagaacacctctgattactcctgccatcatgacccttggccataatatgatttatctccacactagcagagaccaaccgaacccccttcgaccttgccgaaggggagtccgaactagtctcaggcttcaacatcgaatacgccgcaggccccttcgccctattcttcatagccgaatacacaaacattattataataaacaccctcaccactacaatcttcctaggaacaacatatgacgcactctcccctgaactctacacaacatattttgtcaccaagaccctacttctaacctccctgttcttatgaattcgaacagcatacccccgattccgctacgaccaactcatacacctcctatgaaaaaacttcctaccactcaccctagcattacttatatgatatgtctccatacccattacaatctccagcattccccctcaaacctaagaaatatgtctgataaaagagttactttgatagagtaaataataggagcttaaacccccttatttctaggactatgagaatcgaacccatccctgagaatccaaaattctccgtgccacctatcacaccccatcctaaagtaaggtcagctaaataagctatcgggcccataccccgaaaatgttggttatacccttcccgtactaattaatcccctggcccaacccgtcatctactctaccatctttgcaggcacactcatcacagcgctaagctcgcactgattttttacctgagtaggcctagaaataaacatgctagcttttattccagttctaaccaaaaaaataaaccctcgttccacagaagctgccatcaagtatttcctcacgcaagcaaccgcatccataatccttctaatagctatcctcttcaacaatatactctccggacaatgaaccataaccaatactaccaatcaatactcatcattaataatcataatggctatagcaataaaactaggaatagccccctttcacttctgagtcccagaggttacccaaggcacccctctgacatccggcctgcttcttctcacatgacaaaaactagcccccatctcaatcatataccaaatctctccctcactaaacgtaagccttctcctcactctctcaatcttatccatcatagcaggcagttgaggtggattaaaccaaacccagctacgcaaaatcttagcatactcctcaattacccacataggatgaataatagcagttctaccgtacaaccctaacataaccattcttaatttaactatttatattatcctaactactaccgcattcctactactcaacttaaactccagcaccacgaccctactactatctcgcacctgaaacaagctaacatgactaacacccttaattccatccaccctcctctccctaggaggcctgcccccgctaaccggctttttgcccaaatgggccattatcgaagaattcacaaaaaacaatagcctcatcatccccaccatcatagccaccatcaccctccttaacctctacttctacctacgcctaatctactccacctcaatcacactactccccatatctaacaacgtaaaaataaaatgacagtttgaacatacaaaacccaccccattcctccccacactcatcgcccttaccacgctactcctacctatctccccttttatactaataatcttatagaaatttaggttaaatacagaccaagagccttcaaagccctcagtaagttgcaatacttaatttctgtaacagctaaggactgcaaaaccccactctgcatcaactgaacgcaaatcagccactttaattaagctaagcccttactagaccaatgggacttaaacccacaaacacttagttaacagctaagcaccctaatcaactggcttcaatctacttctcccgccgccgggaaaaaaggcgggagaagccccggcaggtttgaagctgcttcttcgaatttgcaattcaatatgaaaatcacctcggagctggtaaaaagaggcctaacccctgtctttagatttacagtccaatgcttcactcagccattttacctcacccccactgatgttcgccgaccgttgactattctctacaaaccacaaagacattggaacactatacctattattcggcgcatgagctggagtcctaggcacagctctaagcctccttattcgagccgagctgggccagccaggcaaccttctaggtaacgaccacatctacaacgttatcgtcacagcccatgcatttgtaataatcttcttcatagtaatacccatcataatcggaggctttggcaactgactagttcccctaataatcggtgcccccgatatggcgtttccccgcataaacaacataagcttctgactcttacctccctctctcctactcctgctcgcatctgctatagtggaggccggagcaggaacaggttgaacagtctaccctcccttagcagggaactactcccaccctggagcctccgtagacctaaccatcttctccttacacctagcaggtgtctcctctatcttaggggccatcaatttcatcacaacaattatcaatataaaaccccctgccataacccaataccaaacgcccctcttcgtctgatccgtcctaatcacagcagtcctacttctcctatctctcccagtcctagctgctggcatcactatactactaacagaccgcaacctcaacaccaccttcttcgaccccgccggaggaggagaccccattctataccaacacctattctgatttttcggtcaccctgaagtttatattcttatcctaccaggcttcggaataatctcccatattgtaacttactactccggaaaaaaagaaccatttggatacataggtatggtctgagctatgatatcaattggcttcctagggtttatcgtgtgagcacaccatatatttacagtaggaatagacgtagacacacgagcatatttcacctccgctaccataatcatcgctatccccaccggcgtcaaagtatttagctgactcgccacactccacggaagcaatatgaaatgatctgctgcagtgctctgagccctaggattcatctttcttttcaccgtaggtggcctgactggcattgtattagcaaactcatcactagacatcgtactacacgacacgtactacgttgtagcccacttccactatgtcctatcaataggagctgtatttgccatcataggaggcttcattcactgatttcccctattctcaggctacaccctagaccaaacctacgccaaaatccatttcactatcatattcatcggcgtaaatctaactttcttcccacaacactttctcggcctatccggaatgccccgacgttactcggactaccccgatgcatacaccacatgaaacatcctatcatctgtaggctcattcatttctctaacagcagtaatattaataattttcatgatttgagaagccttcgcttcgaagcgaaaagtcctaatagtagaagaaccctccataaacctggagtgactatatggatgccccccaccctaccacacattcgaagaacccgtatacataaaatctagacaaaaaaggaaggaatcgaaccccccaaagctggtttcaagccaaccccatggcctccatgactttttcaaaaaggtattagaaaaaccatttcataactttgtcaaagttaaattataggctaaatcctatatatcttaatggcacatgcagcgcaagtaggtctacaagacgctacttcccctatcatagaagagcttatcacctttcatgatcacgccctcataatcattttccttatctgcttcctagtcctgtatgcccttttcctaacactcacaacaaaactaactaatactaacatctcagacgctcaggaaatagaaaccgtctgaactatcctgcccgccatcatcctagtcctcatcgccctcccatccctacgcatcctttacataacagacgaggtcaacgatccctcccttaccatcaaatcaattggccaccaatggtactgaacctacgagtacaccgactacggcggactaatcttcaactcctacatacttcccccattattcctagaaccaggcgacctgcgactccttgacgttgacaatcgagtagtactcccgattgaagcccccattcgtataataattacatcacaagacgtcttgcactcatgagctgtccccacattaggcttaaaaacagatgcaattcccggacgtctaaaccaaaccactttcaccgctacacgaccgggggtatactacggtcaatgctctgaaatctgtggagcaaaccacagtttcatgcccatcgtcctagaattaattcccctaaaaatctttgaaatagggcccgtatttaccctatagcaccccctctaccccctctagagcccactgtaaagctaacttagcattaaccttttaagttaaagattaagagaaccaacacctctttacagtgaaatgccccaactaaatactaccgtatggcccaccataattacccccatactccttacactattcctcatcacccaactaaaaatattaaacacaaactaccacctacctccctcaccaaagcccataaaaataaaaaattataacaaaccctgagaaccaaaatgaacgaaaatctgttcgcttcattcattgcccccacaatcctaggcctacccgccgcagtactgatcattctatttccccctctattgatccccacctccaaatatctcatcaacaaccgactaatcaccacccaacaatgactaatcaaactaacctcaaaacaaatgataaccatacacaacactaaaggacgaacctgatctcttatactagtatccttaatcatttttattgccacaactaacctcctcggactcctgcctcactcatttacaccaaccacccaactatctataaacctagccatggccatccccttatgagcgggcgcagtgattataggctttcgctctaagattaaaaatgccctagcccacttcttaccacaaggcacacctacaccccttatccccatactagttattatcgaaaccatcagcctactcattcaaccaatagccctggccgtacgcctaaccgctaacattactgcaggccacctactcatgcacctaattggaagcgccaccctagcaatatcaaccattaaccttccctctacacttatcatcttcacaattctaattctactgactatcctagaaatcgctgtcgccttaatccaagcctacgttttcacacttctagtaagcctctacctgcacgacaacacataatgacccaccaatcacatgcctatcatatagtaaaacccagcccatgacccctaacaggggccctctcagccctcctaatgacctccggcctagccatgtgatttcacttccactccataacgctcctcatactaggcctactaaccaacacactaaccatataccaatgatggcgcgatgtaacacgagaaagcacataccaaggccaccacacaccacctgtccaaaaaggccttcgatacgggataatcctatttattacctcagaagtttttttcttcgcaggatttttctgagccttttaccactccagcctagcccctaccccccaattaggagggcactggcccccaacaggcatcaccccgctaaatcccctagaagtcccactcctaaacacatccgtattactcgcatcaggagtatcaatcacctgagctcaccatagtctaatagaaaacaaccgaaaccaaataattcaagcactgcttattacaattttactgggtctctattttaccctcctacaagcctcagagtacttcgagtctcccttcaccatttccgacggcatctacggctcaacattttttgtagccacaggcttccacggacttcacgtcattattggctcaactttcctcactatctgcttcatccgccaactaatatttcactttacatccaaacatcactttggcttcgaagccgccgcctgatactggcattttgtagatgtggtttgactatttctgtatgtctccatctattgatgagggtcttactcttttagtataaatagtaccgttaacttccaattaactagttttgacaacattcaaaaaagagtaataaacttcgccttaattttaataatcaacaccctcctagccttactactaataattattacattttgactaccacaactcaacggctacatagaaaaatccaccccttacgagtgcggcttcgaccctatatcccccgcccgcgtccctttctccataaaattcttcttagtagctattaccttcttattatttgatctagaaattgccctccttttacccctaccatgagccctacaaacaactaacctgccactaatagttatgtcatccctcttattaatcatcatcctagccctaagtctggcctatgagtgactacaaaaaggattagactgaaccgaattggtatatagtttaaacaaaacgaatgatttcgactcattaaattatgataatcatatttaccaaatgcccctcatttacataaatattatactagcatttaccatctcacttctaggaatactagtatatcgctcacacctcatatcctccctactatgcctagaaggaataatactatcgctgttcattatagctactctcataaccctcaacacccactccctcttagccaatattgtgcctattgccatactagtctttgccgcctgcgaagcagcggtgggcctagccctactagtctcaatctccaacacatatggcctagactacgtacataacctaaacctactccaatgctaaaactaatcgtcccaacaattatattactaccactgacatgactttccaaaaaacacataatttgaatcaacacaaccacccacagcctaattattagcatcatccctctactattttttaaccaaatcaacaacaacctatttagctgttccccaaccttttcctccgaccccctaacaacccccctcctaatactaactacctgactcctacccctcacaatcatggcaagccaacgccacttatccagtgaaccactatcacgaaaaaaactctacctctctatactaatctccctacaaatctccttaattataacattcacagccacagaactaatcatattttatatcttcttcgaaaccacacttatccccaccttggctatcatcacccgatgaggcaaccagccagaacgcctgaacgcaggcacatacttcctattctacaccctagtaggctcccttcccctactcatcgcactaatttacactcacaacaccctaggctcactaaacattctactactcactctcactgcccaagaactatcaaactcctgagccaacaacttaatatgactagcttacacaatagcttttatagtaaagatacctctttacggactccacttatgactccctaaagcccatgtcgaagcccccatcgctgggtcaatagtacttgccgcagtactcttaaaactaggcggctatggtataatacgcctcacactcattctcaaccccctgacaaaacacatagcctaccccttccttgtactatccctatgaggcataattataacaagctccatctgcctacgacaaacagacctaaaatcgctcattgcatactcttcaatcagccacatagccctcgtagtaacagccattctcatccaaaccccctgaagcttcaccggcgcagtcattctcataatcgcccacgggcttacatcctcattactattctgcctagcaaactcaaactacgaacgcactcacagtcgcatcataatcctctctcaaggacttcaaactctactcccactaatagctttttgatgacttctagcaagcctcgctaacctcgccttaccccccactattaacctactgggagaactctctgtgctagtaaccacgttctcctgatcaaatatcactctcctacttacaggactcaacatactagtcacagccctatactccctctacatatttaccacaacacaatggggctcactcacccaccacattaacaacataaaaccctcattcacacgagaaaacaccctcatgttcatacacctatcccccattctcctcctatccctcaaccccgacatcattaccgggttttcctcttgtaaatatagtttaaccaaaacatcagattgtgaatctgacaacagaggcttacgaccccttatttaccgagaaagctcacaagaactgctaactcatgcccccatgtctaacaacatggctttctcaacttttaaaggataacagctatccattggtcttaggccccaaaaattttggtgcaactccaaataaaagtaataaccatgcacactactatagccaccctaaccctgacttccctaattccccccatccttaccaccctcgttaaccctaacaaaaaaaactcatacccccattatgtaaaatccattgtcgcatccacctttattatcagtctcttccccacaacaatattcatgtgcctagaccaagaagttattatctcgaactgacactgagccacaacccaaacaacccagctctccctaagcttcaaactagactacttctccataatattcatccctgtagcattgttcgttacatggtccatcatagaattctcactgtgatatataaactcagacccaaacattaatcagttcttcaaatatctactcatcttcctaattaccatactaatcttagttaccgctaacaacctattccaactgttcatcggctgagagggcgtaggaattatatccttcttgctcatcagttgatgatacgcccgagcagatgccaacacagcagccattcaagcaatcctatacaaccgtatcggcgatatcggtttcatcctcgccttagcatgatttatcctacactccaactcatgagacccacaacaaatagcccttctaaacgctaatccaagcctcaccccactactaggcctcctcctagcagcagcaggcaaatcagcccaattaggtctccacccctgactcccctcagccatagaaggccccaccccagtctcagccctactccactcaagcactatagttgtagcaggaatcttcttactcatccgcttccaccccctagcagaaaatagcccactaatccaaactctaacactatgcttaggcgctatcaccactctgttcgcagcagtctgcgcccttacacaaaatgacatcaaaaaaatcgtagccttctccacttcaagtcaactaggactcataatagttacaatcggcatcaaccaaccacacctagcattcctgcacatctgtacccacgccttcttcaaagccatactatttatgtgctccgggtccatcatccacaaccttaacaatgaacaagatattcgaaaaataggaggactactcaaaaccatacctctcacttcaacctccctcaccattggcagcctagcattagcaggaatacctttcctcacaggtttctactccaaagaccacatcatcgaaaccgcaaacatatcatacacaaacgcctgagccctatctattactctcatcgctacctccctgacaagcgcctatagcactcgaataattcttctcaccctaacaggtcaacctcgcttccccacccttactaacattaacgaaaataaccccaccctactaaaccccattaaacgcctggcagccggaagcctattcgcaggatttctcattactaacaacatttcccccgcatcccccttccaaacaacaatccccctctacctaaaactcacagccctcgctgtcactttcctaggacttctaacagccctagacctcaactacctaaccaacaaacttaaaataaaatccccactatgcacattttatttctccaacatactcggattctaccctagcatcacacaccgcacaatcccctatctaggccttcttacgagccaaaacctgcccctactcctcctagacctaacctgactagaaaagctattacctaaaacaatttcacagcaccaaatctccacctccatcatcacctcaacccaaaaaggcataattaaactttacttcctctctttcttcttcccactcatcctaaccctactcctaatcacataacctattcccccgagcaatctcaattacaatatatacaccaacaaacaatgttcaaccagtaactactactaatcaacgcccataatcatacaaagcccccgcaccaataggatcctcccgaatcaaccctgacccctctccttcataaattattcagcttcctacactattaaagtttaccacaaccaccaccccatcatactctttcacccacagcaccaatcctacctccatcgctaaccccactaaaacactcaccaagacctcaacccctgacccccatgcctcaggatactcctcaatagccatcgctgtagtataaccaaagacaaccatcattccccctaaataaattaaaaaaactattaaacccatataacctcccccaaaattcagaataataacacacccgaccacaccgctaacaatcaatactaaacccccataaataggagaaggcttagaagaaaaccccacaaaccccattactaaacccacactcaacagaaacaaagcatacatcattattctcgcacggactacaaccacgaccaatgatatgaaaaaccatcgttgtatttcaactacaagaacaccaatgaccccaatacgcaaaactaaccccctaataaaattaattaaccactcattcatcgacctccccaccccatccaacatctccgcatgatgaaacttcggctcactccttggcgcctgcctgatcctccaaatcaccacaggactattcctagccatgcactactcaccagacgcctcaaccgccttttcatcaatcgcccacatcactcgagacgtaaattatggctgaatcatccgctaccttcacgccaatggcgcctcaatattctttatctgcctcttcctacacatcgggcgaggcctatattacggatcatttctctactcagaaacctgaaacatcggcattatcctcctgcttgcaactatagcaacagccttcataggctatgtcctcccgtgaggccaaatatcattctgaggggccacagtaattacaaacttactatccgccatcccatacattgggacagacctagttcaatgaatctgaggaggctactcagtagacagtcccaccctcacacgattctttacctttcacttcatcttgcccttcattattgcagccctagcagcactccacctcctattcttgcacgaaacgggatcaaacaaccccctaggaatcacctcccattccgataaaatcaccttccacccttactacacaatcaaagacgccctcggcttacttctcttccttctctccttaatgacattaacactattctcaccagacctcctaggcgacccagacaattataccctagccaaccccttaaacacccctccccacatcaagcccgaatgatatttcctattcgcctacacaattctccgatccgtccctaacaaactaggaggcgtccttgccctattactatccatcctcatcctagcaataatccccatcctccatatatccaaacaacaaagcataatatttcgcccactaagccaatcactttattgactcctagccgcagacctcctcattctaacctgaatcggaggacaaccagtaagctacccttttaccatcattggacaagtagcatccgtactatacttcacaacaatcctaatcctaataccaactatctccctaattgaaaacaaaatactcaaatgggcctgtccttgtagtataaactaatacaccagtcttgtaaaccggagatgaaaacctttttccaaggacaaatcagagaaaaagtctttaactccaccattagcacccaaagctaagattctaatttaaactattctctgttctttcatggggaagcagatttgggtaccacccaagtattgactcacccatcaacaaccgctatgtatctcgtacattactgccagccaccatgaatattgtacggtaccataaatacttgaccacctgtagtacataaaaacccaatccacatcaaaaccccctccccatgcttacaagcaagtacagcaatcaaccctcaactatcacacatcaactgcaactccaaagccacccctcacccactaggataccaacaaacctacccacccttaacagtacatagtacataaagccatttaccgtacatagcacattacagtcaaatcccttctcgtccccatggatgacccccctcagataggggtcccttgaccaccatcctccgtgaaatcaatatcccgcacaagagtgctactctcctcgctccgggcccataacacttgggggtagctaaagtgaactgtatccgacatctggttcctacttcagggccataaagcctaaatagcccacacgttccccttaaataagacatcacgatg

SEQ ID NO: 129 - DNA, 16568 bp, Homo sapiens mitochondrial
  3106: "n" refers to a nucleotide at position 3107 of the Cambridge Reference Sequence (CRS, Anderson et al. 1981 Nature 290:457-465), later determined to be absent from the human mtDNA sequence according to the revised CRS (rCRS, Andrews et al. 1999 Nature Genetics 23:147); "n" therefore represents a single nucleotide deletion at a position corresponding to nucleotide 3107 of SEQ ID NO:1 as provided herein.
gatcacaggtctatcaccctattaaccactcacgggagctctccatgcatttggtattttcgtctggggggtatgcacgcgatagcattgcgagacgctggagccggagcaccctatgtcgcagtatctgtctttgattcctgcctcatcctattatttatcgcacctacgttcaatattacaggcgaacatacttactaaagtgtgttaattaattaatgcttgtaggacataataataacaattgaatgtctgcacagccgctttccacacagacatcataacaaaaaatttccaccaaaccccccctcccccgccttctggccacagcacttaaacacatctctgccaaaccccaaaaacaaagaaccctaacaccagcctaaccagatttcaaattttatcttttggcggtatgcacttttaacagtcaccccccaactaacacattattttcccctcccactcccatactactaatctcatcaatacaacccccgcccatcctacccagcacacacaccgctgctaaccccataccccgaaccaaccaaaccccaaagacaccccccacagtttatgtagcttacctcctcaaagcaatacactgaaaatgtttagacgggctcacatcaccccataaacaaataggtttggtcctagcctttctattagctcttagtaagattacacatgcaagcatccccgttccagtgagttcaccctctaaatcaccacgatcaaaagggacaagcatcaagcacgcagcaatgcagctcaaaacgcttagcctagccacacccccacgggaaacagcagtgattaacctttagcaataaacgaaagtttaactaagctatactaaccccagggttggtcaatttcgtgccagccaccgcggtcacacgattaacccaagtcaatagaagccggcgtaaagagtgttttagatcaccccctccccaataaagctaaaactcacctgagttgtaaaaaactccagttgacacaaaatagactacgaaagtggctttaacatatctgaacacacaatagctaagacccaaactgggattagataccccactatgcttagccctaaacctcaacagttaaatcaacaaaactgctcgccagaacactacgagccacagcttaaaactcaaaggacctggcggtgcttcatatccctctagaggagcctgttctgtaatcgataaaccccgatcaacctcaccacctcttgctcagcctatataccgccatcttcagcaaaccctgatgaaggctacaaagtaagcgcaagtacccacgtaaagacgttaggtcaaggtgtagcccatgaggtggcaagaaatgggctacattttctaccccagaaaactacgatagcccttatgaaacttaagggtcgaaggtggatttagcagtaaactgagagtagagtgcttagttgaacagggccctgaagcgcgtacacaccgcccgtcaccctcctcaagtatacttcaaaggacatttaactaaaacccctacgcatttatatagaggagacaagtcgtaacatggtaagtgtactggaaagtgcacttggacgaaccagagtgtagcttaacacaaagcacccaacttacacttaggagatttcaacttaacttgaccgctctgagctaaacctagccccaaacccactccaccttactaccagacaaccttagccaaaccatttacccaaataaagtataggcgatagaaattgaaacctggcgcaatagatatagtaccgcaagggaaagatgaaaaattataaccaagcataatatagcaaggactaacccctataccttctgcataatgaattaactagaaataactttgcaaggagagccaaagctaagacccccgaaaccagacgagctacctaagaacagctaaaagagcacacccgtctatgtagcaaaatagtgggaagatttataggtagaggcgacaaacctaccgagcctggtgatagctggttgtccaagatagaatcttagttcaactttaaatttgcccacagaaccctctaaatccccttgtaaatttaactgttagtccaaagaggaacagctctttggacactaggaaaaaaccttgtagagagagtaaaaaatttaacacccatagtaggcctaaaagcagccaccaattaagaaagcgttcaagctcaacacccactacctaaaaaatcccaaacatataactgaactcctcacacccaattggaccaatctatcaccctatagaagaactaatgttagtataagtaacatgaaaacattctcctccgcataagcctgcgtcagattaaaacactgaactgacaattaacagcccaatatctacaatcaaccaacaagtcattattaccctcactgtcaacccaacacaggcatgctcataaggaaaggttaaaaaaagtaaaaggaactcggcaaatcttaccccgcctgtttaccaaaaacatcacctctagcatcaccagtattagaggcaccgcctgcccagtgacacatgtttaacggccgcggtaccctaaccgtgcaaaggtagcataatcacttgttccttaaatagggacctgtatgaatggctccacgagggttcagctgtctcttacttttaaccagtgaaattgacctgcccgtgaagaggcgggcataacacagcaagacgagaagaccctatggagctttaatttattaatgcaaacagtacctaacaaacccacaggtcctaaactaccaaacctgcattaaaaatttcggttggggcgacctcggagcagaacccaacctccgagcagtacatgctaagacttcaccagtcaaagcgaactactatactcaattgatccaataacttgaccaacggaacaagttaccctagggataacagcgcaatcctattctagagtccatatcaacaatagggtttacgacctcgatgttggatcaggacatcccaatggtgcagccgctattaaaggttcgtttgttcaacgattaaagtcctacgtgatctgagttcagaccggagtaatccaggtcggtttctatctacnttcaaattcctccctgtacgaaaggacaagagaaataaggcctacttcacaaagcgccttcccccgtaaatgatatcatctcaacttagtattatacccacacccacccaagaacagggtttgttaagatggcagagcccggtaatcgcataaaacttaaaactttacagtcagaggttcaattcctcttcttaacaacatacccatggccaacctcctactcctcattgtacccattctaatcgcaatggcattcctaatgcttaccgaacgaaaaattctaggctatatacaactacgcaaaggccccaacgttgtaggcccctacgggctactacaacccttcgctgacgccataaaactcttcaccaaagagcccctaaaacccgccacatctaccatcaccctctacatcaccgccccgaccttagctctcaccatcgctcttctactatgaacccccctccccatacccaaccccctggtcaacctcaacctaggcctcctatttattctagccacctctagcctagccgtttactcaatcctctgatcagggtgagcatcaaactcaaactacgccctgatcggcgcactgcgagcagtagcccaaacaatctcatatgaagtcaccctagccatcattctactatcaacattactaataagtggctcctttaacctctccgcccttatcacaacacaagaacacctctgattactcctgccatcatgacccttggccataatatgatttatctccacactagcagagaccaaccgaacccccttcgaccttgccgaaggggagtccgaactagtctcaggcttcaacatcgaatacgccgcaggccccttcgccctattcttcatagccgaatacacaaacattattataataaacaccctcaccactacaatcttcctaggaacaacatatgacgcactctcccctgaactctacacaacatattttgtcaccaagaccctacttctaacctccctgttcttatgaattcgaacagcatacccccgattccgctacgaccaactcatacacctcctatgaaaaaacttcctaccactcaccctagcattacttatatgatatgtctccatacccattacaatctccagcattccccctcaaacctaagaaatatgtctgataaaagagttactttgatagagtaaataataggagcttaaacccccttatttctaggactatgagaatcgaacccatccctgagaatccaaaattctccgtgccacctatcacaccccatcctaaagtaaggtcagctaaataagctatcgggcccataccccgaaaatgttggttatacccttcccgtactaattaatcccctggcccaacccgtcatctactctaccatctttgcaggcacactcatcacagcgctaagctcgcactgattttttacctgagtaggcctagaaataaacatgctagcttttattccagttctaaccaaaaaaataaaccctcgttccacagaagctgccatcaagtatttcctcacgcaagcaaccgcatccataatccttctaatagctatcctcttcaacaatatactctccggacaatgaaccataaccaatactaccaatcaatactcatcattaataatcataatggctatagcaataaaactaggaatagccccctttcacttctgagtcccagaggttacccaaggcacccctctgacatccggcctgcttcttctcacatgacaaaaactagcccccatctcaatcatataccaaatctctccctcactaaacgtaagccttctcctcactctctcaatcttatccatcatagcaggcagttgaggtggattaaaccaaacccagctacgcaaaatcttagcatactcctcaattacccacataggatgaataatagcagttctaccgtacaaccctaacataaccattcttaatttaactatttatattatcctaactactaccgcattcctactactcaacttaaactccagcaccacgaccctactactatctcgcacctgaaacaagctaacatgactaacacccttaattccatccaccctcctctccctaggaggcctgcccccgctaaccggctttttgcccaaatgggccattatcgaagaattcacaaaaaacaatagcctcatcatccccaccatcatagccaccatcaccctccttaacctctacttctacctacgcctaatctactccacctcaatcacactactccccatatctaacaacgtaaaaataaaatgacagtttgaacatacaaaacccaccccattcctccccacactcatcgcccttaccacgctactcctacctatctccccttttatactaataatcttatagaaatttaggttaaatacagaccaagagccttcaaagccctcagtaagttgcaatacttaatttctgtaacagctaaggactgcaaaaccccactctgcatcaactgaacgcaaatcagccactttaattaagctaagcccttactagaccaatgggacttaaacccacaaacacttagttaacagctaagcaccctaatcaactggcttcaatctacttctcccgccgccgggaaaaaaggcgggagaagccccggcaggtttgaagctgcttcttcgaatttgcaattcaatatgaaaatcacctcggagctggtaaaaagaggcctaacccctgtctttagatttacagtccaatgcttcactcagccattttacctcacccccactgatgttcgccgaccgttgactattctctacaaaccacaaagacattggaacactatacctattattcggcgcatgagctggagtcctaggcacagctctaagcctccttattcgagccgagctgggccagccaggcaaccttctaggtaacgaccacatctacaacgttatcgtcacagcccatgcatttgtaataatcttcttcatagtaatacccatcataatcggaggctttggcaactgactagttcccctaataatcggtgcccccgatatggcatttccccgcataaacaacataagcttctgactcttacctccctctctcctactcctgctcgcatctgctatagtggaggccggagcaggaacaggttgaacagtctaccctcccttagcagggaactactcccaccctggagcctccgtagacctaaccatcttctccttacacctagcaggtgtctcctctatcttaggggccatcaatttcatcacaacaattatcaatataaaaccccctgccataacccaataccaaacgcccctcttcgtctgatccgtcctaatcacagcagtcctacttctcctatctctcccagtcctagctgctggcatcactatactactaacagaccgcaacctcaacaccaccttcttcgaccccgccggaggaggagaccccattctataccaacacctattctgatttttcggtcaccctgaagtttatattcttatcctaccaggcttcggaataatctcccatattgtaacttactactccggaaaaaaagaaccatttggatacataggtatggtctgagctatgatatcaattggcttcctagggtttatcgtgtgagcacaccatatatttacagtaggaatagacgtagacacacgagcatatttcacctccgctaccataatcatcgctatccccaccggcgtcaaagtatttagctgactcgccacactccacggaagcaatatgaaatgatctgctgcagtgctctgagccctaggattcatctttcttttcaccgtaggtggcctgactggcattgtattagcaaactcatcactagacatcgtactacacgacacgtactacgttgtagcccacttccactatgtcctatcaataggagctgtatttgccatcataggaggcttcattcactgatttcccctattctcaggctacaccctagaccaaacctacgccaaaatccatttcactatcatattcatcggcgtaaatctaactttcttcccacaacactttctcggcctatccggaatgccccgacgttactcggactaccccgatgcatacaccacatgaaacatcctatcatctgtaggctcattcatttctctaacagcagtaatattaataattttcatgatttgagaagccttcgcttcgaagcgaaaagtcctaatagtagaagaaccctccataaacctggagtgactatatggatgccccccaccctaccacacattcgaagaacccgtatacataaaatctagacaaaaaaggaaggaatcgaaccccccaaagctggtttcaagccaaccccatggcctccatgactttttcaaaaaggtattagaaaaaccatttcataactttgtcaaagttaaattataggctaaatcctatatatcttaatggcacatgcagcgcaagtaggtctacaagacgctacttcccctatcatagaagagcttatcacctttcatgatcacgccctcataatcattttccttatctgcttcctagtcctgtatgcccttttcctaacactcacaacaaaactaactaatactaacatctcagacgctcaggaaatagaaaccgtctgaactatcctgcccgccatcatcctagtcctcatcgccctcccatccctacgcatcctttacataacagacgaggtcaacgatccctcccttaccatcaaatcaattggccaccaatggtactgaacctacgagtacaccgactacggcggactaatcttcaactcctacatacttcccccattattcctagaaccaggcgacctgcgactccttgacgttgacaatcgagtagtactcccgattgaagcccccattcgtataataattacatcacaagacgtcttgcactcatgagctgtccccacattaggcttaaaaacagatgcaattcccggacgtctaaaccaaaccactttcaccgctacacgaccgggggtatactacggtcaatgctctgaaatctgtggagcaaaccacagtttcatgcccatcgtcctagaattaattcccctaaaaatctttgaaatagggcccgtatttaccctatagcaccccctctaccccctctagagcccactgtaaagctaacttagcattaaccttttaagttaaagattaagagaaccaacacctctttacagtgaaatgccccaactaaatactaccgtatggcccaccataattacccccatactccttacactattcctcatcacccaactaaaaatattaaacacaaactaccacctacctccctcaccaaagcccataaaaataaaaaattataacaaaccctgagaaccaaaatgaacgaaaatctgttcgcttcattcattgcccccacaatcctaggcctacccgccgcagtactgatcattctatttccccctctattgatccccacctccaaatatctcatcaacaaccgactaatcaccacccaacaatgactaatcaaactaacctcaaaacaaatgataaccatacacaacactaaaggacgaacctgatctcttatactagtatccttaatcatttttattgccacaactaacctcctcggactcctgcctcactcatttacaccaaccacccaactatctataaacctagccatggccatccccttatgagcgggcgcagtgattataggctttcgctctaagattaaaaatgccctagcccacttcttaccacaaggcacacctacaccccttatccccatactagttattatcgaaaccatcagcctactcattcaaccaatagccctggccgtacgcctaaccgctaacattactgcaggccacctactcatgcacctaattggaagcgccaccctagcaatatcaaccattaaccttccctctacacttatcatcttcacaattctaattctactgactatcctagaaatcgctgtcgccttaatccaagcctacgttttcacacttctagtaagcctctacctgcacgacaacacataatgacccaccaatcacatgcctatcatatagtaaaacccagcccatgacccctaacaggggccctctcagccctcctaatgacctccggcctagccatgtgatttcacttccactccataacgctcctcatactaggcctactaaccaacacactaaccatataccaatgatggcgcgatgtaacacgagaaagcacataccaaggccaccacacaccacctgtccaaaaaggccttcgatacgggataatcctatttattacctcagaagtttttttcttcgcaggatttttctgagccttttaccactccagcctagcccctaccccccaattaggagggcactggcccccaacaggcatcaccccgctaaatcccctagaagtcccactcctaaacacatccgtattactcgcatcaggagtatcaatcacctgagctcaccatagtctaatagaaaacaaccgaaaccaaataattcaagcactgcttattacaattttactgggtctctattttaccctcctacaagcctcagagtacttcgagtctcccttcaccatttccgacggcatctacggctcaacattttttgtagccacaggcttccacggacttcacgtcattattggctcaactttcctcactatctgcttcatccgccaactaatatttcactttacatccaaacatcactttggcttcgaagccgccgcctgatactggcattttgtagatgtggtttgactatttctgtatgtctccatctattgatgagggtcttactcttttagtataaatagtaccgttaacttccaattaactagttttgacaacattcaaaaaagagtaataaacttcgccttaattttaataatcaacaccctcctagccttactactaataattattacattttgactaccacaactcaacggctacatagaaaaatccaccccttacgagtgcggcttcgaccctatatcccccgcccgcgtccctttctccataaaattcttcttagtagctattaccttcttattatttgatctagaaattgccctccttttacccctaccatgagccctacaaacaactaacctgccactaatagttatgtcatccctcttattaatcatcatcctagccctaagtctggcctatgagtgactacaaaaaggattagactgaaccgaattggtatatagtttaaacaaaacgaatgatttcgactcattaaattatgataatcatatttaccaaatgcccctcatttacataaatattatactagcatttaccatctcacttctaggaatactagtatatcgctcacacctcatatcctccctactatgcctagaaggaataatactatcgctgttcattatagctactctcataaccctcaacacccactccctcttagccaatattgtgcctattgccatactagtctttgccgcctgcgaagcagcggtgggcctagccctactagtctcaatctccaacacatatggcctagactacgtacataacctaaacctactccaatgctaaaactaatcgtcccaacaattatattactaccactgacatgactttccaaaaaacacataatttgaatcaacacaaccacccacagcctaattattagcatcatccctctactattttttaaccaaatcaacaacaacctatttagctgttccccaaccttttcctccgaccccctaacaacccccctcctaatactaactacctgactcctacccctcacaatcatggcaagccaacgccacttatccagtgaaccactatcacgaaaaaaactctacctctctatactaatctccctacaaatctccttaattataacattcacagccacagaactaatcatattttatatcttcttcgaaaccacacttatccccaccttggctatcatcacccgatgaggcaaccagccagaacgcctgaacgcaggcacatacttcctattctacaccctagtaggctcccttcccctactcatcgcactaatttacactcacaacaccctaggctcactaaacattctactactcactctcactgcccaagaactatcaaactcctgagccaacaacttaatatgactagcttacacaatagcttttatagtaaagatacctctttacggactccacttatgactccctaaagcccatgtcgaagcccccatcgctgggtcaatagtacttgccgcagtactcttaaaactaggcggctatggtataatacgcctcacactcattctcaaccccctgacaaaacacatagcctaccccttccttgtactatccctatgaggcataattataacaagctccatctgcctacgacaaacagacctaaaatcgctcattgcatactcttcaatcagccacatagccctcgtagtaacagccattctcatccaaaccccctgaagcttcaccggcgcagtcattctcataatcgcccacgggcttacatcctcattactattctgcctagcaaactcaaactacgaacgcactcacagtcgcatcataatcctctctcaaggacttcaaactctactcccactaatagctttttgatgacttctagcaagcctcgctaacctcgccttaccccccactattaacctactgggagaactctctgtgctagtaaccacgttctcctgatcaaatatcactctcctacttacaggactcaacatactagtcacagccctatactccctctacatatttaccacaacacaatggggctcactcacccaccacattaacaacataaaaccctcattcacacgagaaaacaccctcatgttcatacacctatcccccattctcctcctatccctcaaccccgacatcattaccgggttttcctcttgtaaatatagtttaaccaaaacatcagattgtgaatctgacaacagaggcttacgaccccttatttaccgagaaagctcacaagaactgctaactcatgcccccatgtctaacaacatggctttctcaacttttaaaggataacagctatccattggtcttaggccccaaaaattttggtgcaactccaaataaaagtaataaccatgcacactactataaccaccctaaccctgacttccctaattccccccatccttaccaccctcgttaaccctaacaaaaaaaactcatacccccattatgtaaaatccattgtcgcatccacctttattatcagtctcttccccacaacaatattcatgtgcctagaccaagaagttattatctcgaactgacactgagccacaacccaaacaacccagctctccctaagcttcaaactagactacttctccataatattcatccctgtagcattgttcgttacatggtccatcatagaattctcactgtgatatataaactcagacccaaacattaatcagttcttcaaatatctactcatcttcctaattaccatactaatcttagttaccgctaacaacctattccaactgttcatcggctgagagggcgtaggaattatatccttcttgctcatcagttgatgatacgcccgagcagatgccaacacagcagccattcaagcaatcctatacaaccgtatcggcgatatcggtttcatcctcgccttagcatgatttatcctacactccaactcatgagacccacaacaaatagcccttctaaacgctaatccaagcctcaccccactactaggcctcctcctagcagcagcaggcaaatcagcccaattaggtctccacccctgactcccctcagccatagaaggccccaccccagtctcagccctactccactcaagcactatagttgtagcaggaatcttcttactcatccgcttccaccccctagcagaaaatagcccactaatccaaactctaacactatgcttaggcgctatcaccactctgttcgcagcagtctgcgcccttacacaaaatgacatcaaaaaaatcgtagccttctccacttcaagtcaactaggactcataatagttacaatcggcatcaaccaaccacacctagcattcctgcacatctgtacccacgccttcttcaaagccatactatttatgtgctccgggtccatcatccacaaccttaacaatgaacaagatattcgaaaaataggaggactactcaaaaccatacctctcacttcaacctccctcaccattggcagcctagcattagcaggaatacctttcctcacaggtttctactccaaagaccacatcatcgaaaccgcaaacatatcatacacaaacgcctgagccctatctattactctcatcgctacctccctgacaagcgcctatagcactcgaataattcttctcaccctaacaggtcaacctcgcttccccacccttactaacattaacgaaaataaccccaccctactaaaccccattaaacgcctggcagccggaagcctattcgcaggatttctcattactaacaacatttcccccgcatcccccttccaaacaacaatccccctctacctaaaactcacagccctcgctgtcactttcctaggacttctaacagccctagacctcaactacctaaccaacaaacttaaaataaaatccccactatgcacattttatttctccaacatactcggattctaccctagcatcacacaccgcacaatcccctatctaggccttcttacgagccaaaacctgcccctactcctcctagacctaacctgactagaaaagctattacctaaaacaatttcacagcaccaaatctccacctccatcatcacctcaacccaaaaaggcataattaaactttacttcctctctttcttcttcccactcatcctaaccctactcctaatcacataacctattcccccgagcaatctcaattacaatatatacaccaacaaacaatgttcaaccagttactactactaatcaacgcccataatcatacaaagcccccgcaccaataggatcctcccgaatcaaccctgacccctctccttcataaattattcagcttcctacactattaaagtttaccacaaccaccaccccatcatactctttcacccacagcaccaatcctacctccatcgctaaccccactaaaacactcaccaagacctcaacccctgacccccatgcctcaggatactcctcaatagccatcgctgtagtatatccaaagacaaccatcattccccctaaataaattaaaaaaactattaaacccatataacctcccccaaaattcagaataataacacacccgaccacaccgctaacaatcaatactaaacccccataaataggagaaggcttagaagaaaaccccacaaaccccattactaaacccacactcaacagaaacaaagcatacatcattattctcgcacggactacaaccacgaccaatgatatgaaaaaccatcgttgtatttcaactacaagaacaccaatgaccccaatacgcaaaactaaccccctaataaaattaattaaccactcattcatcgacctccccaccccatccaacatctccgcatgatgaaacttcggctcactccttggcgcctgcctgatcctccaaatcaccacaggactattcctagccatgcactactcaccagacgcctcaaccgccttttcatcaatcgcccacatcactcgagacgtaaattatggctgaatcatccgctaccttcacgccaatggcgcctcaatattctttatctgcctcttcctacacatcgggcgaggcctatattacggatcatttctctactcagaaacctgaaacatcggcattatcctcctgcttgcaactatagcaacagccttcataggctatgtcctcccgtgaggccaaatatcattctgaggggccacagtaattacaaacttactatccgccatcccatacattgggacagacctagttcaatgaatctgaggaggctactcagtagacagtcccaccctcacacgattctttacctttcacttcatcttgcccttcattattgcagccctagcagcactccacctcctattcttgcacgaaacgggatcaaacaaccccctaggaatcacctcccattccgataaaatcaccttccacccttactacacaatcaaagacgccctcggcttacttctcttccttctctccttaatgacattaacactattctcaccagacctcctaggcgacccagacaattataccctagccaaccccttaaacacccctccccacatcaagcccgaatgatatttcctattcgcctacacaattctccgatccgtccctaacaaactaggaggcgtccttgccctattactatccatcctcatcctagcaataatccccatcctccatatatccaaacaacaaagcataatatttcgcccactaagccaatcactttattgactcctagccgcagacctcctcattctaacctgaatcggaggacaaccagtaagctacccttttaccatcattggacaagtagcatccgtactatacttcacaacaatcctaatcctaataccaactatctccctaattgaaaacaaaatactcaaatgggcctgtccttgtagtataaactaatacaccagtcttgtaaaccggagatgaaaacctttttccaaggacaaatcagagaaaaagtctttaactccaccattagcacccaaagctaagattctaatttaaactattctctgttctttcatggggaagcagatttgggtaccacccaagtattgactcacccatcaacaaccgctatgtatttcgtacattactgccagccaccatgaatattgtacggtaccataaatacttgaccacctgtagtacataaaaacccaatccacatcaaacccccccccccatgcttacaagcaagtacagcaatcaaccctcaactatcacacatcaactgcaactccaaagccacccctcacccactaggataccaacaaacctacccacccttaacagtacatagtacataaagccatttaccgtacatagcacattacagtcaaatcccctctcgcccccatggatgacccccctcagataggggtcccttgaccaccatcctccgtgaaatcaatatcccgcacaagagtgctactctcctcgctccgggcccataacacttgggggtagctaaagtgaactgtatccgacatctggttcctacttcagggccataaagcctaaatagcccacacgttccccttaaataagacatcacgatg

SEQ ID NO: 130 - DNA, 16570 bp, Homo sapiens mitochondrial
  3108: "n" refers to a nucleotide at position 3107 of the Cambridge Reference Sequence (CRS, Anderson et al. 1981 Nature 290:457-465), later determined to be absent from the human mtDNA sequence according to the revised CRS (rCRS, Andrews et al. 1999 Nature Genetics 23:147); "n" therefore represents a single nucleotide deletion at a position corresponding to nucleotide 3107 of SEQ ID NO:1 as provided herein.
gatcacaggtctatcaccctattaaccactcacgggagctctccatgcatttggtattttcgtctggggggtatgcacgcgatagcattgcgagacgctggagccggagcaccctatgtcgcagtatctgtctttgattcctgcctcatcctattatttatcgcacctacgttcaatattacaggcgaacatacttactaaagtgtgttaattaattaatgcttgtaggacataataacaacaattgaatgtctgcacagccgctttccacacagacatcataacaaaaaatttccaccaaaccccccctcccccgccttctggccacagcacttaaacacatctctgccaaaccccaaaaacaaagaaccctaacaccagcctaaccagatttcaaattttatcttttggcggtatgcacttttaacagtcaccccccaactaacacattattttcccctcccactcccatactactaatctcatcaatacaacccccgcccatcctacccagcacacacacaccgctgctaaccccataccccgaaccaaccaaaccccaaagacaccccccacagtttatgtagcttacctcctcaaagcaatacactgaaaatgtttagacgggctcacatcaccccataaacaaataggtttggtcctagcctttctattagctcttagtaagattacacatgcaagcatccccgttccagtgagttcaccctctaaatcaccacgatcaaaagggacaagcatcaagcacgcagcaatgcagctcaaaacgcttagcctagccacacccccacgggaaacagcagtgattaacctttagcaataaacgaaagtttaactaagctatactaaccccagggttggtcaatttcgtgccagccaccgcggtcacacgattaacccaagtcaatagaagccggcgtaaagagtgttttagatcaccccctccccaataaagctaaaactcacctgagttgtaaaaaactccagttgacacaaaatagactacgaaagtggctttaacatatctgaacacacaatagctaagacccaaactgggattagataccccactatgcttagccctaaacctcaacagttaaatcaacaaaactgctcgccagaacactacgagccacagcttaaaactcaaaggacctggcggtgcttcatatccctctagaggagcctgttctgtaatcgataaaccccgatcaacctcaccacctcttgctcagcctatataccgccatcttcagcaaaccctgatgaaggctacaaagtaagcgcaagtacccacgtaaagacgttaggtcaaggtgtagcccatgaggtggcaagaaatgggctacattttctaccccagaaaactacgatagcccttatgaaacttaagggtcgaaggtggatttagcagtaaactgagagtagagtgcttagttgaacagggccctgaagcgcgtacacaccgcccgtcaccctcctcaagtatacttcaaaggacatttaactaaaacccctacgcatttatatagaggagacaagtcgtaacatggtaagtgtactggaaagtgcacttggacgaaccagagtgtagcttaacacaaagcacccaacttacacttaggagatttcaacttaacttgaccgctctgagctaaacctagccccaaacccactccaccttactaccagacaaccttagccaaaccatttacccaaataaagtataggcgatagaaattgaaacctggcgcaatagatatagtaccgcaagggaaagatgaaaaattataaccaagcataatatagcaaggactaacccctataccttctgcataatgaattaactagaaataactttgcaaggagagccaaagctaagacccccgaaaccagacgagctacctaagaacagctaaaagagcacacccgtctatgtagcaaaatagtgggaagatttataggtagaggcgacaaacctaccgagcctggtgatagctggttgtccaagatagaatcttagttcaactttaaatttgcccacagaaccctctaaatccccttgtaaatttaactgttagtccaaagaggaacagctctttggacactaggaaaaaaccttgtagagagagtaaaaaatttaacacccatagtaggcctaaaagcagccaccaattaagaaagcgttcaagctcaacacccactacctaaaaaatcccaaacatataactgaactcctcacacccaattggaccaatctatcaccctatagaagaactaatgttagtataagtaacatgaaaacattctcctccgcataagcctgcgtcagattaaaacactgaactgacaattaacagcccaatatctacaatcaaccaacaagtcattattaccctcactgtcaacccaacacaggcatgctcataaggaaaggttaaaaaaagtaaaaggaactcggcaaatcttaccccgcctgtttaccaaaaacatcacctctagcatcaccagtattagaggcaccgcctgcccagtgacacatgtttaacggccgcggtaccctaaccgtgcaaaggtagcataatcacttgttccttaaatagggacctgtatgaatggctccacgagggttcagctgtctcttacttttaaccagtgaaattgacctgcccgtgaagaggcgggcataacacagcaagacgagaagaccctatggagctttaatttattaatgcaaacagtacctaacaaacccacaggtcctaaactaccaaacctgcattaaaaatttcggttggggcgacctcggagcagaacccaacctccgagcagtacatgctaagacttcaccagtcaaagcgaactactatactcaattgatccaataacttgaccaacggaacaagttaccctagggataacagcgcaatcctattctagagtccatatcaacaatagggtttacgacctcgatgttggatcaggacatcccgatggtgcagccgctattaaaggttcgtttgttcaacgattaaagtcctacgtgatctgagttcagaccggagtaatccaggtcggtttctatctacnttcaaattcctccctgtacgaaaggacaagagaaataaggcctacttcacaaagcgccttcccccgtaaatgatatcatctcaacttagtattatacccacacccacccaagaacagggtttgttaagatggcagagcccggtaatcgcataaaacttaaaactttacagtcagaggttcaattcctcttcttaacaacatacccatggccaacctcctactcctcattgtacccattctaatcgcaatggcattcctaatgcttaccgaacgaaaaattctaggctatatacaactacgcaaaggccccaacgttgtaggcccctacgggctactacaacccttcgctgacgccataaaactcttcaccaaagagcccctaaaacccgccacatctaccatcaccctctacatcaccgccccgaccttagctctcaccatcgctcttctactatgaacccccctccccatacccaaccccctggtcaacctcaacctaggcctcctatttattctagccacctctagcctagccgtttactcaatcctctgatcagggtgagcatcaaactcaaactacgccctgatcggcgcactgcgagcagtagcccaaacaatctcatatgaagtcaccctagccatcattctactatcaacattactaataagtggctcctttaacctctccacccttatcacaacacaagaacacctctgattactcctgccatcatgacccttggccataatatgatttatctccacactagcagagaccaaccgaacccccttcgaccttgccgaaggggagtccgaactagtctcaggcttcaacatcgaatacgccgcaggccccttcgccctattcttcatagccgaatacacaaacattattataataaacaccctcaccactacaatcttcctaggaacaacatatgacgcactctcccctgaactctacacaacatattttgtcaccaagaccctacttctaacctccctgttcttatgaattcgaacagcatacccccgattccgctacgaccaactcatacacctcctatgaaaaaacttcctaccactcaccctagcattacttatatgatatgtctccatacccattacaatctccagcattccccctcaaacctaagaaatatgtctgataaaagagttactttgatagagtaaataataggagcttaaacccccttatttctaggactatgagaatcgaacccatccctgagaatccaaaattctccgtgccacctatcacaccccatcctaaagtaaggtcagctaaataagctatcgggcccataccccgaaaatgttggttatacccttcccgtactaattaatcccctggcccaacccgtcatctactctaccatctttgcaggcacactcatcacagcgctaagctcgcactgattttttacctgagtaggcctagaaataaacatgctagcttttattccagttctaaccaaaaaaataaaccctcgttccacagaagctgccatcaagtatttcctcacgcaagcaaccgcatccataatccttctaatagctatcctcttcaacaatatactctccggacaatgaaccataaccaatactaccaatcaatactcatcattaataatcataatggctatagcaataaaactaggaatagccccctttcacttctgagtcccagaggttacccaaggcacccctctgacatccggcctgcttcttctcacatgacaaaaactagcccccatctcaatcatataccaaatctctccctcactaaacgtaagccttctcctcactctctcaatcttatccatcatagcaggcagttgaggtggattaaaccaaacccagctacgcaaaatcttagcatactcctcaattacccacataggatgaataatagcagttctaccgtacaaccctaacataaccattcttaatttaactatttatattatcctaactactaccgcattcctactactcaacttaaactccagcaccacgaccctactactatctcgcacctgaaacaagctaacatgactaacacccttaattccatccaccctcctctccctaggaggcctgcccccgctaaccggctttttgcccaaatgggccattatcgaagaattcacaaaaaacaatagcctcatcatccccaccatcatagccaccatcaccctccttaacctctacttctacctacgcctaatctactccacctcaatcacactactccccatatctaacaacgtaaaaataaaatgacagtttgaacatacaaaacccaccccattcctccccacactcatcgcccttaccacgctactcctacctatctccccttttatactaataatcttatagaaatttaggttaaatacagaccaagagccttcaaagccctcagtaagttgcaatacttaatttctgtaacagctaaggactgcaaaaccccactctgcatcaactgaacgcaaatcagccactttaattaagctaagcccttactagaccaatgggacttaaacccacaaacacttagttaacagctaagcaccctaatcaactggcttcaatctacttctcccgccgccgggaaaaaaggcgggagaagccccggcaggtttgaagctgcttcttcgaatttgcaattcaatatgaaaatcacctcggagctggtaaaaagaggcctaacccctgtctttagatttacagtccaatgcttcactcagccattttacctcacccccactgatgttcgccgaccgttgactattctctacaaaccacaaagacattggaacactatacctattattcggcgcatgagctggagtcctaggcacagctctaagcctccttattcgagccgagctgggccagccaggcaaccttctaggtaacgaccacatctacaacgttatcgtcacagcccatgcatttgtaataatcttcttcatagtaatacccatcataatcggaggctttggcaactgactagttcccctaataatcggtgcccccgatatggcgtttccccgcataaacaacataagcttctgactcttacctccctctctcctactcctgctcgcatctgctatagtggaggccggagcaggaacaggttgaacagtctaccctcccttagcagggaactactcccaccctggagcctccgtagacctaaccatcttctccttacacctagcaggtgtctcctctatcttaggggccatcaatttcatcacaacaattatcaatataaaaccccctgccataacccaataccaaacgcccctcttcgtctgatccgtcctaatcacagcagtcctacttctcctatctctcccagtcctagctgctggcatcactatactactaacagaccgcaacctcaacaccaccttcttcgaccccgccggaggaggagaccccattctataccaacacctattctgatttttcggtcaccctgaagtttatattcttatcctaccaggcttcggaataatctcccatattgtaacttactactccggaaaaaaagaaccatttggatacataggtatggtctgagctatgatatcaattggcttcctagggtttatcgtgtgagcacaccatatatttacagtaggaatagacgtagacacacgagcatatttcacctccgctaccataatcatcgctatccccaccggcgtcaaagtatttagttgactcgccacactccacggaagcaatatgaaatgatctgctgcagtgctctgagccctaggattcatctttcttttcaccgtaggtggcctgactggcattgtattagcaaactcatcactagacatcgtactacacgacacgtactacgttgtagcccacttccactatgtcctatcaataggagctgtatttgccatcataggaggcttcattcactgatttcccctattctcaggctacaccctagaccaaacctacgccaaaatccatttcactatcatattcatcggcgtaaatctaactttcttcccacaacactttctcggcctatccggaatgccccgacgttactcggactaccccgatgcatacaccacatgaaacatcctatcatctgtaggctcattcatttctctaacagcagtaatattaataattttcatgatttgagaagccttcgcttcgaagcgaaaagtcctaatagtagaagaaccctccataaacctggagtgactatatggatgccccccaccctaccacacattcgaagaacccgtatacataaaatctagacaaaaaaggaaggaatcgaaccccccaaagctggtttcaagccaaccccatggcctccatgactttttcaaaaaggtattagaaaaaccatttcataactttgtcaaagttaaattataggctaaatcctatatatcttaatggcacatgcagcgcaagtaggtctacaagacgctacttcccctatcatagaagagcttatcacctttcatgatcacgccctcataatcattttccttatctgcttcctagtcctgtatgcccttttcctaacactcacaacaaaactaactaatactaacatctcagacgctcaggaaatagaaaccgtctgaactatcctgcccgccatcatcctagtcctcatcgccctcccatccctacgcatcctttacataacagacgaggtcaacgatccctcccttaccatcaaatcaattggccaccaatggtactgaacctacgagtacaccgactacggcggactaatcttcaactcctacatacttcccccattattcctagaaccaggcgacctgcgactccttgacgttgacaatcgagtagtactcccgattgaagcccccattcgtataataattacatcacaagacgtcttgcactcatgagctgtccccacattaggcttaaaaacagatgcaattcccggacgtctaaaccaaaccactttcaccgctacacgaccgggggtatactacggtcaatgctctgaaatctgtggagcaaaccacagtttcatgcccatcgtcctagaattaattcccctaaaaatctttgaaatagggcccgtatttaccctatagcaccccctctaccccctctagagcccactgtaaagctaacttagcattaaccttttaagttaaagattaagagaaccaacacctctttacagtgaaatgccccaactaaatactaccgtatggcccaccataattacccccatactccttacactattcctcatcacccaactaaaaatattaaacacaaactaccacctacctccctcaccaaagcccataaaaataaaaaattataacaaaccctgagaaccaaaatgaacgaaaatctgttcgcttcattcattgcccccacaatcctaggcctacccgccgcagtactgatcattctatttccccctctattgatccccacctccaaatatctcatcaacaaccgactaatcaccacccaacaatgactaatcaaactaacctcaaaacaaatgataaccatacacaacactaaaggacgaacctgatctcttatactagtatccttaatcatttttattgccacaactaacctcctcggactcctgcctcactcatttacaccaaccacccaactatctataaacctagccatggccatccccttatgagcgggcgcagtgattataggctttcgctctaagattaaaaatgccctagcccacttcttaccacaaggcacacctacaccccttatccccatactagttattatcgaaaccatcagcctactcattcaaccaatagccctggccgtacgcctaaccgctaacattactgcaggccacctactcatgcacctaattggaagcgccaccctagcaatatcaaccattaaccttccctctacacttatcatcttcacaattctaattctactgactatcctagaaatcgctgtcgccttaatccaagcctacgttttcacacttctagtaagcctctacctgcacgacaacacataatgacccaccaatcacatgcctatcatatagtaaaacccagcccatgacccctaacaggggccctctcagccctcctaatgacctccggcctagccatgtgatttcacttccactccataacgctcctcatactaggcctactaaccaacacactaaccatataccaatgatggcgcgatgtaacacgagaaagcacataccaaggccaccacacaccacctgtccaaaaaggccttcgatacgggataatcctatttattacctcagaagtttttttcttcgcaggatttttctgagccttttaccactccagcctagcccctaccccccaattaggagggcactggcccccaacaggcatcaccccgctaaatcccctagaagtcccactcctaaacacatccgtattactcgcatcaggagtatcaatcacctgagctcaccatagtctaatagaaaacaaccgaaaccaaataattcaagcactgcttattacaattttactgggtctctattttaccctcctacaagcctcagagtacttcgagtctcccttcaccatttccgacggcatctacggctcaacattttttgtaaccacaggcttccacggacttcacgtcattattggctcaactttcctcactatctgcttcatccgccaactaatatttcactttacatccaaacatcactttggcttcgaagccgccgcctgatactggcattttgtagatgtggtttgactatttctgtatgtctccatctattgatgagggtcttactcttttagtataaatagtaccgttaacttccaattaactagttttgacaacattcaaaaaagagtaataaacttcgccttaattttaataatcaacaccctcctagccttactactaataattattacattttgactaccacaactcaacggctacatagaaaaatccaccccttacgagtgcggcttcgaccctatatcccccgcccgcgtccctttctccataaaattcttcttagtagctattaccttcttattatttgatctagaaattgccctccttttacccctaccatgagccctacaaacaactaacctgccactaatagttatgtcatccctcttattaatcatcatcctagccctaagtctggcctatgagtgactacaaaaaggattagactgaaccgaattggtatatagtttaaacaaaacgaatgatttcgactcattaaattatgataatcatatttaccaaatgcccctcatttacataaatattatactagcatttaccatctcacttctaggaatactagtatatcgctcacacctcatatcctccctactatgcctagaaggaataatactatcgctgttcattatagctactctcataaccctcaacacccactccctcttagccaatattgtgcctattgccatactagtctttgccgcctgcgaagcagcggtgggcctagccctactagtctcaatctccaacacatatggcctagactacgtacataacctaaacctactccaatgctaaaactaatcgtcccaacaattatattactaccactgacatgactttccaaaaaacacataatttgaatcaacacaaccacccacagcctaattattagcatcatccctctactattttttaaccaaatcaacaacaacctatttagctgttccccaaccttttcctccgaccccctaacaacccccctcctaatactaactacctgactcctacccctcacaatcatggcaagccaacgccacttatccagtgaaccactatcacgaaaaaaactctacctctctatactaatctccctacaaatctccttaattataacattcacagccacagaactaatcatattttatatcttcttcgaaaccacacttatccccaccttggctatcatcacccgatgaggcaaccagccagaacgcctgaacgcaggcacatacttcctattctacaccctagtaggctcccttcccctactcatcgcactaatttacactcacaacaccctaggctcactaaacattctactactcactctcactgcccaagaactatcaaactcctgagccaacaacttaatatgactagcttacacaatagcttttatagtaaagatacctctttacggactccacttatgactccctaaagcccatgtcgaagcccccatcgctgggtcaatagtacttgccgcagtactcttaaaactaggcggctatggtataatacgcctcacactcattctcaaccccctgacaaaacacatagcctaccccttccttgtactatccctatgaggcataattataacaagctccatctgcctacgacaaacagacctaaaatcgctcattgcatactcttcaatcagccacatagccctcgtagtaacagccattctcatccaaaccccctgaagcttcaccggcgcagtcattctcataatcgcccacgggcttacatcctcattactattctgcctagcaaactcaaactacgaacgcactcacagtcgcatcataatcctctctcaaggacttcaaactctactcccactaatagctttttgatgacttctagcaagcctcgctaacctcgccttaccccccactattaacctactgggagaactctctgtgctagtaaccacgttctcctgatcaaatatcactctcctacttacaggactcaacatactagtcacagccctatactccctctacatatttaccacaacacaatggggctcactcacccaccacattaacaacataaaaccctcattcacacgagaaaacaccctcatgttcatacacctatcccccattctcctcctatccctcaaccccgacatcattaccgggttttcctcttgtaaatatagtttaaccaaaacatcagattgtgaatctgacaacagaggcttacgaccccttatttaccgagaaagctcacaagaactgctaactcatgcccccatgtctaacaacatggctttctcaacttttaaaggataacagctatccattggtcttaggccccaaaaattttggtgcaactccaaataaaagtaataaccatgcacactactataaccaccctaaccctgacttccctaattccccccatccttaccaccctcgttaaccctaacaaaaaaaactcatacccccattatgtaaaatccattgtcgcatccacctttattatcagtctcttccccacaacaatattcatgtgcctagaccaagaagttattatctcgaactgacactgagccacaacccaaacaacccagctctccctaagcttcaaactagactacttctccataatattcatccctgtagcattgttcgttacatggtccatcatagaattctcactgtgatatataaactcagacccaaacattaatcagttcttcaaatatctactcatcttcctaattaccatactaatcttagttaccgctaacaacctattccaactgttcatcggctgagagggcgtaggaattatatccttcttgctcatcagttgatgatacgcccgagcagatgccaacacagcagccattcaagcaatcctatacaaccgtatcggcgatatcggtttcatcctcgccttagcatgatttatcctacactccaactcatgagacccacaacaaatagcccttctaaacgctaatccaagcctcaccccactactaggcctcctcctagcagcagcaggcaaatcagcccaattaggtctccacccctgactcccctcagccatagaaggccccaccccagtctcagccctactccactcaagcactatagttgtagcaggaatcttcttactcatccgcttccaccccctagcagaaaatagcccactaatccaaactctaacactatgcttaggcgctatcaccactctgttcgcagcagtctgcgcccttacacaaaatgacatcaaaaaaatcgtagccttctccacttcaagtcaactaggactcataatagttacaatcggcatcaaccaaccacacctagcattcctgcacatctgtacccacgccttcttcaaagccatactatttatgtgctccgggtccatcatccacaaccttaacaatgaacaagatattcgaaaaataggaggactactcaaaaccatacctctcacttcaacctccctcaccattggcagcctagcattagcaggaatacctttcctcacaggtttctactccaaagaccacatcatcgaaaccgcaaacatatcatacacaaacgcctgagccctatctattactctcatcgctacctccctgacaagcgcctatagcactcgaataattcttctcaccctaacaggtcaacctcgcttccccacccttactaacattaacgaaaataaccccaccctactaaaccccattaaacgcctggcagccggaagcctattcgcaggatttctcattactaacaacatttcccccgcatcccccttccaaacaacaatccccctctacctaaaactcacagccctcgctgtcactttcctaggacttctaacagccctagacctcaactacctaaccaacaaacttaaaataaaatccccactatgcacattttatttctccaacatactcggattctaccctagcatcacacaccgcacaatcccctatctaggccttcttacgagccaaaacctgcccctactcctcctagacctaacctgactagaaaagctattacctaaaacaatttcacagcaccaaatctccacctccatcatcacctcaacccaaaaaggcataattaaactttacttcctctctttcttcttcccactcatcctaaccctactcctaatcacataacctattcccccgagcaatctcaattacaatatatacaccaacaaacaatgttcaaccagtaactactactaatcaacgcccataatcatacaaagcccccgcaccaataggatcctcccgaatcaaccctgacccctctccttcataaattattcagcttcctacactattaaagtttaccacaaccaccaccccatcatactctttcacccacagcaccaatcctacctccatcgctaaccccactaaaacactcaccaagacctcaacccctgacccccatgcctcaggatactcctcaatagccatcgctgtagtatatccaaagacaaccatcattccccctaaataaattaaaaaaactattaaacccatataacctcccccaaaattcagaataataacacacccgaccacaccgctaacaatcaatactaaacccccataaataggagaaggcttagaagaaaaccccacaaaccccattactaaacccacactcaacagaaacaaagcatacatcattattctcgcacggactacaaccacgaccaatgatatgaaaaaccatcgttgtatttcaactacaagaacaccaatgaccccaatacgcaaaactaaccccctaataaaattaattaaccactcattcatcgacctccccaccccatccaacatctccgcatgatgaaacttcggctcactccttggcgcctgcctgatcctccaaatcaccacaggactattcctagccatgcactactcaccagacgcctcaaccgccttttcatcaatcgcccacatcactcgagacgtaaattatggctgaatcatccgctaccttcacgccaatggcgcctcaatattctttatctgcctcttcctacacatcgggcgaggcctatattacggatcatttctctactcagaaacctgaaacatcggcattatcctcctgcttgcaactatagcaacagccttcataggctatgtcctcccgtgaggccaaatatcattctgaggggccacagtaattacaaacttactatccgccatcccatacattgggacagacctagttcaatgaatctgaggaggctactcagtagacagtcccaccctcacacgattctttacctttcacttcatcttgcccttcattattgcagccctagcagcactccacctcctattcttgcacgaaacgggatcaaacaaccccctaggaatcacctcccattccgataaaatcaccttccacccttactacacaatcaaagacgccctcggcttacttctcttccttctctccttaatgacattaacactattctcaccagacctcctaggcgacccagacaattataccctagccaaccccttaaacacccctccccacatcaagcccgaatgatatttcctattcgcctacacaattctccgatccgtccctaacaaactaggaggcgtccttgccctattactatccatcctcatcctagcaataatccccatcctccatatatccaaacaacaaagcataatatttcgcccactaagccaatcactttattgactcctagccgcagacctcctcattctaacctgaatcggaggacaaccagtaagctacccttttaccatcattggacaagtagcatccgtactatacttcacaacaatcctaatcctaataccaactatctccctaattgaaaacaaaatactcaaatgggcctgtccttgtagtataaactaatacaccagtcttgtaaaccggagatgaaaacctttttccaaggacaaatcagagaaaaagtctttaactccaccattagcacccaaagctaagattctaatttaaactattctctgttctttcatggggaagcagatttgggtaccacccaagtattgactcacccatcaacaaccgctatgtatctcgtacattactgccagccaccatgaatattgtacggtaccataaatacttgaccacctgtagtacataaaaacccaatccacatcaaaaccccctccccatgcttacaagcaagtacagcaatcaaccctcaactatcacacatcaactgcaactccaaagccacccctcacccactaggataccaacaaacctacccacccttaacagtacatagtacataaagccatttaccgtacatagcacattacagtcaaatcccttctcgcccccatggatgacccccctcagataggggtcccttgaccaccatcctccgtgaaatcaatatcccgcacaagagtgctactctcctcgctccgggcccataacacttgggggtagctaaggtgaactgtatccgacatctggttcctacttcagggtcataaagcctaaatagcccacacgttccccttaaataagacatcacgatg

SEQ ID NO: 131 - DNA, 16572 bp, Homo sapiens mitochondrial
  3110: "n" refers to a nucleotide at position 3107 of the Cambridge Reference Sequence (CRS, Anderson et al. 1981 Nature 290:457-465), later determined to be absent from the human mtDNA sequence according to the revised CRS (rCRS, Andrews et al. 1999 Nature Genetics 23:147); "n" therefore represents a single nucleotide deletion at a position corresponding to nucleotide 3107 of SEQ ID NO:1 as provided herein.
gatcacaggtctatcaccctattaaccactcacgggagctctccatgcatttggtattttcgtctggggggtatgcacgcgatagcattgcgagacgctggagccggagcaccctatgtcgcagtatctgtctttgattcctgcctcatcctattatttatcgcacctacgttcaatattacaggcgaacatacttactaaagtgtgttaattaattaatgcttgtaggacataataacaacaattgaatgtctgcacagccgctttccacacagacatcataacaaaaaatttccaccaaaccccccctccccccccgcttctggccacagcacttaaacacatctctgccaaaccccaaaaacaaagaaccctaacaccagcctaaccagatttcaaattttatcttttggcggtatgcacttttaacagtcaccccccaactaacacattattttcccctcccactcccatactactaatctcatcaatacaacccccgcccatcctacccagcacacacacaccgctgctaaccccataccccgaaccaaccaaaccccaaagacaccccccacagtttatgtagcttacctcctcaaagcaatacactgaaaatgtttagacgggctcacatcaccccataaacaaataggtttggtcctagcctttctattagctcttagtaagattacacatgcaagcatccccgttccagtgagttcaccctctaaatcaccacgatcaaaagggacaagcatcaagcacgcagcaatgcagctcaaaacgcttagcctagccacacccccacgggaaacagcagtgattaacctttagcaataaacgaaagtttaactaagctatactaaccccagggttggtcaatttcgtgccagccaccgcggtcacacgattaacccaagtcaatagaagccggcgtaaagagtgttttagatcaccccctccccaataaagctaaaactcacctgagttgtaaaaaactccagttgacacaaaatagactacgaaagtggctttaacatatctgaacacacaatagctaagacccaaactgggattagataccccactatgcttagccctaaacctcaacagttaaatcaacaaaactgctcgccagaacactacgagccacagcttaaaactcaaaggacctggcggtgcttcatatccctctagaggagcctgttctgtaatcgataaaccccgatcaacctcaccacctcttgctcagcctatataccgccatcttcagcaaaccctgatgaaggctacaaagtaagcgcaagtacccacgtaaagacgttaggtcaaggtgtagcccatgaggtggcaagaaatgggctacattttctaccccagaaaactacgatagcccttatgaaacttaagggtcgaaggtggatttagcagtaaactgagagtagagtgcttagttgaacagggccctgaagcgcgtacacaccgcccgtcaccctcctcaagtatacttcaaaggacatttaactaaaacccctacgcatttatatagaggagacaagtcgtaacatggtaagtgtactggaaagtgcacttggacgaaccagagtgtagcttaacacaaagcacccaacttacacttaggagatttcaacttaacttgaccgctctgagctaaacctagccccaaacccactccaccttactaccagacaaccttagccaaaccatttacccaaataaagtataggcgatagaaattgaaacctggcgcaatagatatagtaccgcaagggaaagatgaaaaattataaccaagcataatatagcaaggactaacccctataccttctgcataatgaattaactagaaataactttgcaaggagagccaaagctaagacccccgaaaccagacgagctacctaagaacagctaaaagagcacacccgtctatgtagcaaaatagtgggaagatttataggtagaggcgacaaacctaccgagcctggtgatagctggttgtccaagatagaatcttagttcaactttaaatttgcccacagaaccctctaaatccccttgtaaatttaactgttagtccaaagaggaacagctctttggacactaggaaaaaaccttgtagagagagtaaaaaatttaacacccatagtaggcctaaaagcagccaccaattaagaaagcgttcaagctcaacacccactacctaaaaaatcccaaacatataactgaactcctcacacccaattggaccaatctatcaccctatagaagaactaatgttagtataagtaacatgaaaacattctcctccgcataagcctgcgtcagattaaaacactgaactgacaattaacagcccaatatctacaatcaaccaacaagtcattattaccctcactgtcaacccaacacaggcatgctcataaggaaaggttaaaaaaagtaaaaggaactcggcaaatcttaccccgcctgtttaccaaaaacatcacctctagcatcaccagtattagaggcaccgcctgcccagtgacacatgtttaacggccgcggtaccctaaccgtgcaaaggtagcataatcacttgttccttaaatagggacctgtatgaatggctccacgagggttcagctgtctcttacttttaaccagtgaaattgacctgcccgtgaagaggcgggcataacacagcaagacgagaagaccctatggagctttaatttattaatgcaaacagtacctaacaaacccacaggtcctaaactaccaaacctgcattaaaaatttcggttggggcgacctcggagcagaacccaacctccgagcagtacatgctaagacttcaccagtcaaagcgaactactatactcaattgatccaataacttgaccaacggaacaagttaccctagggataacagcgcaatcctattctagagtccatatcaacaatagggtttacgacctcgatgttggatcaggacatcccgatggtgcagccgctattaaaggttcgtttgttcaacgattaaagtcctacgtgatctgagttcagaccggagtaatccaggtcggtttctatctacnttcaaattcctccctgtacgaaaggacaagagaaataaggcctacttcacaaagcgccttcccccgtaaatgatatcatctcaacttagtattatacccacacccacccaagaacagggtttgttaagatggcagagcccggtaatcgcataaaacttaaaactttacagtcagaggttcaattcctcttcttaacaacatacccatggccaacctcctactcctcattgtacccattctaatcgcaatggcattcctaatgcttaccgaacgaaaaattctaggctatatacaactacgcaaaggccccaacgttgtaggcccctacgggctactacaacccttcgctgacgccataaaactcttcaccaaagagcccctaaaacccgccacatctaccatcaccctctacatcaccgccccgaccttagctctcaccatcgctcttctactatgaacccccctccccatacccaaccccctggtcaacctcaacctaggcctcctatttattctagccacctctagcctagccgtttactcaatcctctgatcagggtgagcatcaaactcaaactacgccctgatcggcgcactgcgagcagtagcccaaacaatctcatatgaagtcaccctagccatcattctactatcaacattactaataagtggctcctttaacctctccacccttatcacaacacaagaacacctctgattactcctgccatcatgacccttggccataatatgatttatctccacactagcagagaccaaccgaacccccttcggccttgccgaaggggagtccgaactagtctcaggcttcaacatcgaatacgccgcaggccccttcgccctattcttcatagccgaatacacaaacattattataataaacaccctcaccactacaatcttcctaggaacaacatatgacgcactctcccctgaactctacacaacatattttgtcaccaagaccctacttctaacctccctgttcttatgaattcgaacagcatacccccgattccgctacgaccaactcatacacctcctatgaaaaaacttcctaccactcaccctagcattacttatatgatatgtctccatacccattacaatctccagcattccccctcaaacctaagaaatatgtctgataaaagagttactttgatagagtaaataataggagcttaaacccccttatttctaggactatgagaatcgaacccatccctgagaatccaaaattctccgtgccacctatcacaccccatcctaaagtaaggtcagctaaataagctatcgggcccataccccgaaaatgttggttatacccttcccgtactaattaatcccctggcccaacccgtcatctactctaccatctttgcaggcacactcatcacagcgctaagctcgcactgattttttacctgagtaggcctagaaataaacatgctagcttttattccagttctaaccaaaaaaataaaccctcgttccacagaagctgccatcaagtatttcctcacgcaagcaaccgcatccataatccttctaatagctatcctcttcaacaatatactctccggacaatgaaccataaccaatactaccaatcaatactcatcattaataatcataatggctatagcaataaaactaggaatagccccctttcacttctgagtcccagaggttacccaaggcacccctctgacatccggcctgcttcttctcacatgacaaaaactagcccccatctcaatcatataccaaatctctccctcactaaacgtaagccttctcctcactctctcaatcttatccatcatagcaggcagttgaggtggattaaaccaaacccagctacgcaaaatcttagcatactcctcaattacccacataggatgaataatagcagttctaccgtacaaccctaacataaccattcttaatttaactatttatattatcctaactactaccgcattcctactactcaacttaaactccagcaccacgaccctactactatctcgcacctgaaacaagctaacatgactaacacccttaattccatccaccctcctctccctaggaggcctgcccccgctaaccggctttttgcccaaatgggccattatcgaagaattcacaaaaaacaatagcctcatcatccccaccatcatagccaccatcaccctccttaacctctacttctacctacgcctaatctactccacctcaatcacactactccccatatctaacaacgtaaaaataaaatgacagtttgaacatacaaaacccaccccattcctccccacactcatcgcccttaccacgctactcctacctatctccccttttatactaataatcttatagaaatttaggttaaatacagaccaagagccttcaaagccctcagtaagttgcaatacttaatttctgtaacagctaaggactgcaaaaccccactctgcatcaactgaacgcaaatcagccactttaattaagctaagcccttactagaccaatgggacttaaacccacaaacacttagttaacagctaagcaccctaatcaactggcttcaatctacttctcccgccgccgggaaaaaaggcgggagaagccccggcaggtttgaagctgcttcttcgaatttgcaattcaatatgaaaatcacctcggagctggtaaaaagaggcctaacccctgtctttagatttacagtccaatgcttcactcagccattttacctcacccccactgatgttcgccgaccgttgactattctctacaaaccacaaagacattggaacactatacctattattcggcgcatgagctggagtcctaggcacagctctaagcctccttattcgagccgagctgggccagccaggcaaccttctaggtaacgaccacatctacaacgttatcgtcacagcccatgcatttgtaataatcttcttcatagtaatacccatcataatcggaggctttggcaactgactagttcccctaataatcggtgcccccgatatggcgtttccccgcataaacaacataagcttctgactcttacctccctctctcctactcctgctcgcatctgctatagtggaggccggagcaggaacaggttgaacagtctaccctcccttagcagggaactactcccaccctggagcctccgtagacctaaccatcttctccttacacctagcaggtgtctcctctatcttaggggccatcaatttcatcacaacaattatcaatataaaaccccctgccataacccaataccaaacgcccctcttcgtctgatccgtcctaatcacagcagtcctacttctcctatctctcccagtcctagctgctggcatcactatactactaacagaccgcaacctcaacaccaccttcttcgaccccgccggaggaggagaccccattctataccaacacctattctgatttttcggtcaccctgaagtttatattcttatcctaccaggcttcggaataatctcccatattgtaacttactactccggaaaaaaagaaccatttggatacataggtatggtctgagctatgatatcaattggcttcctagggtttatcgtgtgagcacaccatatatttacagtaggaatagacgtagacacacgagcatatttcacctccgctaccataatcatcgctatccccaccggcgtcaaagtatttagttgactcgccacactccacggaagcaatatgaaatgatctgctgcagtgctctgagccctaggattcatctttcttttcaccgtaggtggcctgactggcattgtattagcaaactcatcactagacatcgtactacacgacacgtactacgttgtagcccacttccactatgtcctatcaataggagctgtatttgccatcataggaggcttcattcactgatttcccctattctcaggctacaccctagaccaaacctacgccaaaatccatttcactatcatattcatcggcgtaaatctaactttcttcccacaacactttctcggcctatccggaatgccccgacgttactcggactaccccgatgcatacaccacatgaaacatcctatcatctgtaggctcattcatttctctaacagcagtaatattaataattttcatgatttgagaagccttcgcttcgaagcgaaaagtcctaatagtagaagaaccctccataaacctggagtgactatatggatgccccccaccctaccacacattcgaagaacccgtatacataaaatctagacaaaaaaggaaggaatcgaaccccccaaagctggtttcaagccaaccccatggcctccatgactttttcaaaaaggtattagaaaaaccatttcataactttgtcaaagttaaattataggctaaatcctatatatcttaatggcacatgcagcgcaagtaggtctacaagacgctacttcccctatcatagaagagcttatcacctttcatgatcacgccctcataatcattttccttatctgcttcctagtcctgtatgcccttttcctaacactcacaacaaaactaactaatactaacatctcagacgctcaggaaatagaaaccgtctgaactatcctgcccgccatcatcctagtcctcatcgccctcccatccctacgcatcctttacataacagacgaggtcaacgatccctcccttaccatcaaatcaattggccaccaatggtactgaacctacgagtacaccgactacggcggactaatcttcaactcctacatacttcccccattattcctagaaccaggcgacctgcgactccttgacgttgacaatcgagtagtactcccgattgaagcccccattcgtataataattacatcacaagacgtcttgcactcatgagctgtccccacattaggcttaaaaacagatgcaattcccggacgtctaaaccaaaccactttcaccgctacacgaccgggggtatactacggtcaatgctctgaaatctgtggagcaaaccacagtttcatgcccatcgtcctagaattaattcccctaaaaatctttgaaatagggcccgtatttaccctatagcaccccctctaccccctctagagcccactgtaaagctaacttagcattaaccttttaagttaaagattaagagaaccaacacctctttacagtgaaatgccccaactaaatactaccgtatggcccaccataattacccccatactccttacactattcctcatcacccaactaaaaatattaaacacaaactaccacctacctccctcaccaaagcccataaaaataaaaaattataacaaaccctgagaaccaaaatgaacgaaaatctgttcgcttcattcattgcccccacaatcctaggcctacccgccgcagtactgatcattctatttccccctctattgatccccacctccaaatatctcatcaacaaccgactaatcaccacccaacaatgactaatcaaactaacctcaaaacaaatgataaccatacacaacactaaaggacgaacctgatctcttatactagtatccttaatcatttttattgccacaactaacctcctcggactcctgcctcactcatttacaccaaccacccaactatctataaacctagccatggccatccccttatgagcgggcgcagtgattataggctttcgctctaagattaaaaatgccctagcccacttcttaccacaaggcacacctacaccccttatccccatactagttattatcgaaaccatcagcctactcattcaaccaatagccctggccgtacgcctaaccgctaacattactgcaggccacctactcatgcacctaattggaagcgccaccctagcaatatcaaccattaaccttccctctacacttatcatcttcacaattctaattctactgactatcctagaaatcgctgtcgccttaatccaagcctacgttttcacacttctagtaagcctctacctgcacgacaacacataatgacccaccaatcacatgcctatcatatagtaaaacccagcccatgacccctaacaggggccctctcagccctcctaatgacctccggcctagccatgtgatttcacttccactccataacgctcctcatactaggcctactaaccaacacactaaccatataccaatgatggcgcgatgtaacacgagaaagcacataccaaggccaccacacaccacctgtccaaaaaggccttcgatacgggataatcctatttattacctcagaagtttttttcttcgcaggatttttctgagccttttaccactccagcctagcccctaccccccaattaggagggcactggcccccaacaggcatcaccccgctaaatcccctagaagtcccactcctaaacacatccgtattactcgcatcaggagtatcaatcacctgagctcaccatagtctaatagaaaacaaccgaaaccaaataattcaagcactgcttattacaattttactgggtctctattttaccctcctacaagcctcagagtacttcgagtctcccttcaccatttccgacggcatctacggctcaacattttttgtaaccacaggcttccacggacttcacgtcattattggctcaactttcctcactatctgcttcatccgccaactaatatttcactttacatccaaacatcactttggcttcgaagccgccgcctgatactggcattttgtagatgtggtttgactatttctgtatgtctccatctattgatgagggtcttactcttttagtataaatagtaccgttaacttccaattaactagttttgacaacattcaaaaaagagtaataaacttcgccttaattttaataatcaacaccctcctagccttactactaataattattacattttgactaccacaactcaacggctacatagaaaaatccaccccttacgagtgcggcttcgaccctatatcccccgcccgcgtccctttctccataaaattcttcttagtagctattaccttcttattatttgatctagaaattgccctccttttacccctaccatgagccctacaaacaactaacctgccactaatagttatgtcatccctcttattaatcatcatcctagccctaagtctggcctatgagtgactacaaaaaggattagactgaaccgaattggtatatagtttaaacaaaacgaatgatttcgactcattaaattatgataatcatatttaccaaatgcccctcatttacataaatattatactagcatttaccatctcacttctaggaatactagtatatcgctcacacctcatatcctccctactatgcctagaaggaataatactatcgctgttcattatagctactctcataaccctcaacacccactccctcttagccaatattgtgcctattgccatactagtctttgccgcctgcgaagcagcggtgggcctagccctactagtctcaatctccaacacatatggcctagactacgtacataacctaaacctactccaatgctaaaactaatcgtcccaacaattatattactaccactgacatgactttccaaaaaacacataatttgaatcaacacaaccacccacagcctaattattagcatcatccctctactattttttaaccaaatcaacaacaacctatttagctgttccccaaccttttcctccgaccccctaacaacccccctcctaatactaactacctgactcctacccctcacaatcatggcaagccaacgccacttatccagtgaaccactatcacgaaaaaaactctacctctctatactaatctccctacaaatctccttaattataacattcacagccacagaactaatcatattttatatcttcttcgaaaccacacttatccccaccttggctatcatcacccgatgaggcaaccagccagaacgcctgaacgcaggcacatacttcctattctacaccctagtaggctcccttcccctactcatcgcactaatttacactcacaacaccctaggctcactaaacattctactactcactctcactgcccaagaactatcaaactcctgagccaacaacttaatatgactagcttacacaatagcttttatagtaaagatacctctttacggactccacttatgactccctaaagcccatgtcgaagcccccatcgctgggtcaatagtacttgccgcagtactcttaaaactaggcggctatggtataatacgcctcacactcattctcaaccccctgacaaaacacatagcctaccccttccttgtactatccctatgaggcataattataacaagctccatctgcctacgacaaacagacctaaaatcgctcattgcatactcttcaatcagccacatagccctcgtagtaacagccattctcatccaaaccccctgaagcttcaccggcgcagtcattctcataatcgcccacgggcttacatcctcattactattctgcctagcaaactcaaactacgaacgcactcacagtcgcatcataatcctctctcaaggacttcaaactctactcccactaatagctttttgatgacttctagcaagcctcgctaacctcgccttaccccccactattaacctactgggagaactctctgtgctagtaaccacgttctcctgatcaaatatcactctcctacttacaggactcaacatactagtcacagccctatactccctctacatatttaccacaacacaatggggctcactcacccaccacattaacaacataaaaccctcattcacacgagaaaacaccctcatgttcatacacctatcccccattctcctcctatccctcaaccccgacatcattaccgggttttcctcttgtaaatatagtttaaccaaaacatcagattgtgaatctgacaacagaggcttacgaccccttatttaccgagaaagctcacaagaactgctaactcatgcccccatgtctaacaacatggctttctcaacttttaaaggataacagctatccattggtcttaggccccaaaaattttggtgcaactccaaataaaagtaataaccatgcacactactataaccaccctaaccctgacttccctaattccccccatccttaccaccctcgttaaccctaacaaaaaaaactcatacccccattatgtaaaatccattgtcgcatccacctttattatcagtctcttccccacaacaatattcatgtgcctagaccaagaagttattatctcgaactgacactgagccacaacccaaacaacccagctctccctaagcttcaaactagactacttctccataatattcatccctgtagcattgttcgttacatggtccatcatagaattctcactgtgatatataaactcagacccaaacattaatcagttcttcaaatatctactcatcttcctaattaccatactaatcttagttaccgctaacaacctattccaactgttcatcggctgagagggcgtaggaattatatccttcttgctcatcagttgatgatacgcccgagcagatgccaacacagcagccattcaagcaatcctatacaaccgtatcggcgatatcggtttcatcctcgccttagcatgatttatcctacactccaactcatgagacccacaacaaatagcccttctaaacgctaatccaagcctcaccccactactaggcctcctcctagcagcagcaggcaaatcagcccaattaggtctccacccctgactcccctcagccatagaaggccccaccccagtctcagccctactccactcaagcactatagttgtagcaggaatcttcttactcatccgcttccaccccctagcagaaaatagcccactaatccaaactctaacactatgcttaggcgctatcaccactctgttcgcagcagtctgcgcccttacacaaaatgacatcaaaaaaatcgtagccttctccacttcaagtcaactaggactcataatagttacaatcggcatcaaccaaccacacctagcattcctgcacatctgtacccacgccttcttcaaagccatactatttatgtgctccgggtccatcatccacaaccttaacaatgaacaagatattcgaaaaataggaggactactcaaaaccatacctctcacttcaacctccctcaccattggcagcctagcattagcaggaatacctttcctcacaggtttctactccaaagaccacatcatcgaaaccgcaaacatatcatacacaaacgcctgagccctatctattactctcatcgctacctccctgacaagcgcctatagcactcgaataattcttctcaccctaacaggtcaacctcgcttccccacccttactaacattaacgaaaataaccccaccctactaaaccccattaaacgcctggcagccggaagcctattcgcaggatttctcattactaacaacatttcccccgcatcccccttccaaacaacaatccccctctacctaaaactcacagccctcgctgtcactttcctaggacttctaacagccctagacctcaactacctaaccaacaaacttaaaataaaatccccactatgcacattttatttctccaacatactcggattctaccctagcatcacacaccgcacaatcccctatctaggccttcttacgagccaaaacctgcccctactcctcctagacctaacctgactagaaaagctattacctaaaacaatttcacagcaccaaatctccacctccatcatcacctcaacccaaaaaggcataattaaactttacttcctctctttcttcttcccactcatcctaaccctactcctaatcacataacctattcccccgagcaatctcaattacaatatatacaccaacaaacaatgttcaaccagtaactactactaatcaacgcccataatcatacaaagcccccgcaccaataggatcctcccgaatcaaccctgacccctctccttcataaattattcagcttcctacactattaaagtttaccacaaccaccaccccatcatactctttcacccacagcaccaatcctacctccatcgctaaccccactaaaacactcaccaagacctcaacccctgacccccatgcctcaggatactcctcaatagccatcgctgtagtatatccaaagacaaccatcattccccctaaataaattaaaaaaactattaaacccatataacctcccccaaaattcagaataataacacacccgaccacaccgctaacaatcaatactaaacccccataaataggagaaggcttagaagaaaaccccacaaaccccattactaaacccacactcaacagaaacaaagcatacatcattattctcgcacggactacaaccacgaccaatgatatgaaaaaccatcgttgtatttcaactacaagaacaccaatgaccccaatacgcaaaactaaccccctaataaaattaattaaccactcattcatcgacctccccaccccatccaacatctccgcatgatgaaacttcggctcactccttggcgcctgcctgatcctccaaatcaccacaggactattcctagccatgcactactcaccagacgcctcaaccgccttttcatcaatcgcccacatcactcgagacgtaaattatggctgaatcatccgctaccttcacgccaatggcgcctcaatattctttatctgcctcttcctacacatcgggcgaggcctatattacggatcatttctctactcagaaacctgaaacatcggcattatcctcctgcttgcaactatagcaacagccttcataggctatgtcctcccgtgaggccaaatatcattctgaggggccacagtaattacaaacttactatccgccatcccatacattgggacagacctagttcaatgaatctgaggaggctactcagtagacagtcccaccctcacacgattctttacctttcacttcatcttgcccttcattattgcagccctagcagcactccacctcctattcttgcacgaaacgggatcaaacaaccccctaggaatcacctcccattccgataaaatcaccttccacccttactacacaatcaaagacgccctcggcttacttctcttccttctctccttaatgacattaacactattctcaccagacctcctaggcgacccagacaattataccctagccaaccccttaaacacccctccccacatcaagcccgaatgatatttcctattcgcctacacaattctccgatccgtccctaacaaactaggaggcgtccttgccctattactatccatcctcatcctagcaataatccccatcctccatatatccaaacaacaaagcataatatttcgcccactaagccaatcactttattgactcctagccgcagacctcctcattctaacctgaatcggaggacaaccagtaagctacccttttaccatcattggacaagtagcatccgtactatacttcacaacaatcctaatcctaataccaactatctccctaattgaaaacaaaatactcaaatgggcctgtccttgtagtataaactaatacaccagtcttgtaaaccggagatgaaaacctttttccaaggacaaatcagagaaaaagtctttaactccaccattagcacccaaagctaagattctaatttaaactattctctgttctttcatggggaagcagatttgggtaccacccaagtattgactcacccatcaacaaccgctatgtatttcgtacattactgccagccaccatgaatattgtacggtaccataaatacttgaccacctgtagtacataaaaacccaatccacatcaaaaccccctccccatgcttacaagcaagtacagcaatcaaccctcaactatcacacatcaactgcaactccaaagccacccctcacccactaggataccaacaaacctacccacccttaacagtacatagtacataaagccatttaccgtacatagcacattacagtcaaatcccttctcgcccccatggatgacccccctcagataggggtcccttgaccaccatcctccgtgaaatcaatatcccgcacaagagtgctactctcctcgctccgggcccataacacttgggggtagctaaggtgaactgtatccgacatctggttcctacttcagggtcataaagcctaaatagcccacacgttccccttaaataagacatcacgatg

SEQ ID NO: 132 - DNA, 16571 bp, Homo sapiens mitochondrial
  3109: "n" refers to a nucleotide at position 3107 of the Cambridge Reference Sequence (CRS, Anderson et al. 1981 Nature 290:457-465), later determined to be absent from the human mtDNA sequence according to the revised CRS (rCRS, Andrews et al. 1999 Nature Genetics 23:147); "n" therefore represents a single nucleotide deletion at a position corresponding to nucleotide 3107 of SEQ ID NO:1 as provided herein.
gatcacaggtctatcaccctattaaccactcacgggagctctccatgcatttggtattttcgtctggggggtgtgcacgcgatagcattgcgagacgctggagccggagcaccctatgtcgcagtatctgtctttgattcctgcctcatcctattatttatcgcacctacgttcaatattacaggcgaacatacttactaaagtgtgttaattaattaatgcttgtaggacataataataacaattgaatgtctgcacagccgctttccacacagacatcataacaaaaaatttccaccaaaccccccctcccccccgcttctggccacagcacttaaacacatctctgccaaaccccaaaaacaaagaaccctaacaccagcctaaccagatttcaaattttatcttttggcggtatgcacttttaacagtcaccccccaactaacacattattttcccctcccactcccatactactaatctcatcaatacaacccccgcccatcctacccagcacacacacaccgctgctaaccccataccccgaaccaaccaaaccccaaagacaccccccacagtttatgtagcttacctcctcaaagcaatacactgaaaatgtttagacgggctcacatcaccccataaacaaataggtttggtcctagcctttctattagctcttagtaagattacacatgcaagcatccccgttccagtgagttcaccctctaaatcaccacgatcaaaagggacaagcatcaagcacgcagcaatgcagctcaaaacgcttagcctagccacacccccacgggaaacagcagtgattaacctttagcaataaacgaaagtttaactaagctatactaaccccagggttggtcaatttcgtgccagccaccgcggtcacacgattaacccaagtcaatagaagccggcgtaaagagtgttttagatcaccccctccccaataaagctaaaactcacctgagttgtaaaaaactccagttgacacaaaatagactacgaaagtggctttaacatatctgaacacacaatagctaagacccaaactgggattagataccccactatgcttagccctaaacctcaacagttaaatcaacaaaactgctcgccagaacactacgagccacagcttaaaactcaaaggacctggcggtgcttcatatccctctagaggagcctgttctgtaatcgataaaccccgatcaacctcaccacctcttgctcagcctatataccgccatcttcagcaaaccctgatgaaggctacaaagtaagcgcaagtacccacgtaaagacgttaggtcaaggtgtagcccatgaggtggcaagaaatgggctacattttctaccccagaaaactacgatagcccttatgaaacttaagggtcgaaggtggatttagcagtaaactgagagtagagtgcttagttgaacagggccctgaagcgcgtacacaccgcccgtcaccctcctcaagtatacttcaaaggacatttaactaaaacccctacgcatttatatagaggagacaagtcgtaacatggtaagtgtactggaaagtgcacttggacgaaccagagtgtagcttaacacaaagcacccaacttacacttaggagatttcaacttaacttgaccgctctgagctaaacctagccccaaacccactccaccttactaccagacaaccttagccaaaccatttacccaaataaagtataggcgatagaaattgaaacctggcgcaatagatatagtaccgcaagggaaagatgaaaaattataaccaagcataatatagcaaggactaacccctataccttctgcataatgaattaactagaaataactttgcaaggagagccaaagctaagacccccgaaaccagacgagctacctaagaacagctaaaagagcacacccgtctatgtagcaaaatagtgggaagatttataggtagaggcgacaaacctaccgagcctggtgatagctggttgtccaagatagaatcttagttcaactttaaatttgcccacagaaccctctaaatccccttgtaaatttaactgttagtccaaagaggaacagctctttggacactaggaaaaaaccttgtagagagagtaaaaaatttaacacccatagtaggcctaaaagcagccaccaattaagaaagcgttcaagctcaacacccactacctaaaaaatcccaaacatataactgaactcctcacacccaattggaccaatctatcaccctatagaagaactaatgttagtataagtaacatgaaaacattctcctccgcataagcctgcgtcagattaaaacactgaactgacaattaacagcccaatatctacaatcaaccaacaagtcattattaccctcactgtcaacccaacacaggcatgctcataaggaaaggttaaaaaaagtaaaaggaactcggcaaatcttaccccgcctgtttaccaaaaacatcacctctagcatcaccagtattagaggcaccgcctgcccagtgacacatgtttaacggccgcggtaccctaaccgtgcaaaggtagcataatcacttgttccttaaatagggacctgtatgaatggctccacgagggttcagctgtctcttacttttaaccagtgaaattgacctgcccgtgaagaggcgggcataacacagcaagacgagaagaccctatggagctttaatttattaatgcaaacagtacctaacaaacccacaggtcctaaactaccaaacctgcattaaaaatttcggttggggcgacctcggagcagaacccaacctccgagcagtacatgctaagacttcaccagtcaaagcgaactactatactcaattgatccaataacttgaccaacggaacaagttaccctagggataacagcgcaatcctattctagagtccatatcaacaatagggtttacgacctcgatgttggatcaggacatcccaatggtgcagccgctattaaaggttcgtttgttcaacgattaaagtcctacgtgatctgagttcagaccggagtaatccaggtcggtttctatctacnttcaaattcctccctgtacgaaaggacaagagaaataaggcctacttcacaaagcgccttcccccgtaaatgatatcatctcaacttagtattatacccacacccacccaagaacagggtttgttaagatggcagagcccggtaatcgcataaaacttaaaactttacagtcagaggttcaattcctcttcttaacaacatacccatggccaacctcctactcctcattgtacccattctaatcgcaatggcattcctaatgcttaccgaacgaaaaattctaggctatatacaactacgcaaaggccccaacgttgtaggcccctacgggctactacaacccttcgctgacgccataaaactcttcaccaaagagcccctaaaacccgccacatctaccatcaccctctacatcaccgccccgaccttagctctcaccatcgctcttctactatgaacccccctccccatacccaaccccctggtcaacctcaacctaggcctcctatttattctagccacctctagcctagccgtttactcaatcctctgatcagggtgagcatcaaactcaaactacgccctgatcggcgcactgcgagcagtagcccaaacaatctcatatgaagtcaccctagccatcattctactatcaacattactaataagtggctcctttaacctctccacccttatcacaacacaagaacacctctgattactcctgccatcatgacccttggccataatatgatttatctccacactagcagagaccaaccgaacccccttcgaccttgccgaaggggagtccgaactagtctcaggcttcaacatcgaatacgccgcaggccccttcgccctattcttcatagccgaatacacaaacattattataataaacaccctcaccactacaatcttcctaggaacaacatatgacgcactctcccctgaactctacacaacatattttgtcaccaagaccctacttctaacctccctgttcttatgaattcgaacagcatacccccgattccgctacgaccaactcatacacctcctatgaaaaaacttcctaccactcaccctagcattacttatatgatatgtctccatacccattacaatctccagcattccccctcaaacctaagaaatatgtctgataaaagagttactttgatagagtaaataataggagcttaaacccccttatttctaggactatgagaatcgaacccatccctgagaatccaaaattctccgtgccacctatcacaccccatcctaaagtaaggtcagctaaataagctatcgggcccataccccgaaaatgttggttatacccttcccgtactaattaatcccctggcccaacccgtcatctactctaccatctttgcaggcacactcatcacagcgctaagctcgcactgattttttacctgagtaggcctagaaataaacatgctagcttttattccagttctaaccaaaaaaataaaccctcgttccacagaagctgccatcaagtatttcctcacgcaagcaaccgcatccataatccttctaatagctatcctcttcaacaatatactctccggacaatgaaccataaccaatactaccaatcaatactcatcattaataatcataatggctatagcaataaaactaggaatagccccctttcacttctgagtcccagaggttacccaaggcacccctctgacatccggcctgcttcttctcacatgacaaaaactagcccccatctcaatcatataccaaatctctccctcactaaacgtaagccttctcctcactctctcaatcttatccatcatagcaggcagttgaggtggattaaaccaaacccagctacgcaaaatcttagcatactcctcaattacccacataggatgaataatagcagttctaccgtacaaccctaacataaccattcttaatttaactatttatattatcctaactactaccgcattcctactactcaacttaaactccagcaccacgaccctactactatctcgcacctgaaacaagctaacatgactaacacccttaattccatccaccctcctctccctaggaggcctgcccccgctaaccggctttttgcccaaatgggccattatcgaagaattcacaaaaaacaatagcctcatcatccccaccatcatagccaccatcaccctccttaacctctacttctacctacgcctaatctactccacctcaatcacactactccccatatctaacaacgtaaaaataaaatgacagtttgaacatacaaaacccaccccattcctccccacactcatcgcccttaccacgctactcctacctatctccccttttatactaataatcttatagaaatttaggttaaatacagaccaagagccttcaaagccctcagtaagttgcaatacttaatttctgtaacagctaaggactgcaaaaccccactctgcatcaactgaacgcaaatcagccactttaattaagctaagcccttactagaccaatgggacttaaacccacaaacacttagttaacagctaagcaccctaatcaactggcttcaatctacttctcccgccgccgggaaaaaaggcgggagaagccccggcaggtttgaagctgcttcttcgaatttgcaattcaatatgaaaatcacctcggagctggtaaaaagaggcctaacccctgtctttagatttacagtccaatgcttcactcagccattttacctcacccccactgatgttcgccgaccgttgactattctctacaaaccacaaagacattggaacactatacctattattcggcgcatgagctggagtcctaggcacagctctaagcctccttattcgagccgagctgggccagccaggcaaccttctaggtaacgaccacatctacaacgttatcgtcacagcccatgcatttgtaataatcttcttcatagtaatacccatcataatcggaggctttggcaactgactagttcccctaataatcggtgcccccgatatggcgtttccccgcataaacaacataagcttctgactcttacctccctctctcctactcctgctcgcatctgctatagtggaggccggagcaggaacaggttgaacagtctaccctcccttagcagggaactactcccaccctggagcctccgtagacctaaccatcttctccttacacctagcaggtgtctcctctatcttaggggccatcaatttcatcacaacaattatcaatataaaaccccctgccataacccaataccaaacgcccctcttcgtctgatccgtcctaatcacagcagtcctacttctcctatctctcccagtcctagctgctggcatcactatactactaacagaccgcaacctcaacaccaccttcttcgaccccgccggaggaggagaccccattctataccaacacctattctgatttttcggtcaccctgaagtttatattcttatcctaccaggcttcggaataatctcccatattgtaacttactactccggaaaaaaagaaccatttggatacataggtatggtctgagctatgatatcaattggcttcctagggtttatcgtgtgagcacaccatatatttacagtaggaatagacgtagacacacgagcatatttcacctccgctaccataatcatcgctatccccaccggcgtcaaagtatttagctgactcgccacactccacggaagcaatatgaaatgatctgctgcagtgctctgagccctaggattcatctttcttttcaccgtaggtggcctgactggcattgtattagcaaactcatcactagacatcgtactacacgacacgtactacgttgtagcccacttccactatgtcctatcaataggagctgtatttgccatcataggaggcttcattcactgatttcccctattctcaggctacaccctagaccaaacctacgccaaaatccatttcactatcatattcatcggcgtaaatctaactttcttcccacaacactttctcggcctatccggaatgccccgacgttactcggactaccccgatgcatacaccacatgaaacatcctatcatctgtaggctcattcatttctctaacagcagtaatattaataattttcatgatttgagaagccttcgcttcgaagcgaaaagtcctaatagtagaagaaccctccataaacctggagtgactatatggatgccccccaccctaccacacattcgaagaacccgtatacataaaatctagacaaaaaaggaaggaatcgaaccccccaaagctggtttcaagccaaccccatggcctccatgactttttcaaaaaggtattagaaaaaccatttcataactttgtcaaagttaaattataggctaaatcctatatatcttaatggcacatgcagcgcaagtaggtctacaagacgctacttcccctatcatagaagagcttatcacctttcatgatcacgccctcataatcattttccttatctgcttcctagtcctgtatgcccttttcctaacactcacaacaaaactaactaatactaacatctcagacgctcaggaaatagaaaccgtctgaactatcctgcccgccatcatcctagtcctcatcgccctcccatccctacgcatcctttacataacagacgaggtcaacgatccctcccttaccatcaaatcaattggccaccaatggtactgaacctacgagtacaccgactacggcggactaatcttcaactcctacatacttcccccattattcctagaaccaggcgacctgcgactccttgacgttgacaatcgagtagtactcccgattgaagcccccattcgtataataattacatcacaagacgtcttgcactcatgagctgtccccacattaggcttaaaaacagatgcaattcccggacgtctaaaccaaaccactttcaccgctacacgaccgggggtatactacggtcaatgctctgaaatctgtggagcaaaccacagtttcatgcccatcgtcctagaattaattcccctaaaaatctttgaaatagggcccgtatttaccctatagcaccccctctaccccctctagagcccactgtaaagctaacttagcattaaccttttaagttaaagattaagagaaccaacacctctttacagtgaaatgccccaactaaatactaccgtatggcccaccataattacccccatactccttacactattcctcatcacccaactaaaaatattaaacacaaactaccacctacctccctcaccaaagcccataaaaataaaaaattataacaaaccctgagaaccaaaatgaacgaaaatctgttcgcttcattcattgcccccacaatcctaggcctacccgccgcagtactgatcattctatttccccctctattgatccccacctccaaatatctcatcaacaaccgactaatcaccacccaacaatgactaatcaaactaacctcaaaacaaatgataaccatacacaacactaaaggacgaacctgatctcttatactagtatccttaatcatttttattgccacaactaacctcctcggactcctgcctcactcatttacaccaaccacccaactatctataaacctagccatgaccatccccttatgagcgggcgcagtgattataggctttcgctctaagattaaaaatgccctagcccacttcttaccacaaggcacacctacaccccttatccccatactagttattatcgaaaccatcagcctactcattcaaccaatagccctggccgtacgcctaaccgctaacattactgcaggccacctactcatgcacctaattggaagcgccaccctagcaatatcaaccattaaccttccctctacacttatcatcttcacaattctaattctactgactatcctagaaatcgctgtcgccttaatccaagcctacgttttcacacttctagtaagcctctacctgcacgacaacacataatgacccaccaatcacatgcctatcatatagtaaaacccagcccatgacccctaacaggggccctctcagccctcctaatgacctccggcctagccatgtgatttcacttccactccataacgctcctcatactaggcctactaaccaacacactaaccatataccaatgatggcgcgatgtaacacgagaaagcacataccaaggccaccacacaccacctgtccaaaaaggccttcgatacgggataatcctatttattacctcagaagtttttttcttcgcaggatttttctgagccttttaccactccagcctagcccctaccccccaattaggagggcactggcccccaacaggcatcaccccgctaaatcccctagaagtcccactcctaaacacatccgtattactcgcatcaggagtatcaatcacctgagctcaccatagtctaatagaaaacaaccgaaaccaaataattcaagcactgcttattacaattttactgggtctctattttaccctcctacaagcctcagagtacttcgagtctcccttcaccatttccgacggcatctacggctcaacattttttgtagccacaggcttccacggacttcacgtcattattggctcaactttcctcactatctgcttcatccgccaactaatatttcactttacatccaaacatcactttggcttcgaagccgccgcctgatactggcattttgtagatgtggtttgactatttctgtatgtctccatctattgatgagggtcttactcttttagtataaatagtaccgttaacttccaattaactagttttgacaacattcaaaaaagagtaataaacttcgccttaattttaataatcaacaccctcctagccttactactaataattattacattttgactaccacaactcaacggctacatagaaaaatccaccccttacgagtgcggcttcgaccctatatcccccgcccgcgtccctttctccataaaattcttcttagtagctattaccttcttattatttgatctagaaattgccctccttttacccctaccatgagccctacaaacaactaacctgccactaatagttatgtcatccctcttattaatcatcatcctagccctaagtctggcctatgagtgactacaaaaaggattagactgaaccgaattggtatatagtttaaacaaaacgaatgatttcgactcattaaattatgataatcatatttaccaaatgcccctcatttacataaatattatactagcatttaccatctcacttctaggaatactagtatatcgctcacacctcatatcctccctactatgcctagaaggaataatactatcgctgttcattatagctactctcataaccctcaacacccactccctcttagccaatattgtgcctattgccatactagtctttgccgcctgcgaagcagcggtgggcctagccctactagtctcaatctccaacacatatggcctagactacgtacataacctaaacctactccaatgctaaaactaatcgtcccaacaattatattactaccactgacatgactttccaaaaaacacataatttgaatcaacacaaccacccacagcctaattattagcatcatccctctactattttttaaccaaatcaacaacaacctatttagctgttccccaaccttttcctccgaccccctaacaacccccctcctaatactaactacctgactcctacccctcacaatcatggcaagccaacgccacttatccagtgaaccactatcacgaaaaaaactctacctctctatactaatctccctacaaatctccttaattataacattcacagccacagaactaatcatattttatatcttcttcgaaaccacacttatccccaccttggctatcatcacccgatgaggcaaccagccagaacgcctgaacgcaggcacatacttcctattctacaccctagtaggctcccttcccctactcatcgcactaatttacactcacaacaccctaggctcactaaacattctactactcactctcactgcccaagaactatcaaactcctgagccaacaacttaatatgactagcttacacaatagcttttatagtaaagatacctctttacggactccacttatgactccctaaagcccatgtcgaagcccccatcgctgggtcaatagtacttgccgcagtactcttaaaactaggcggctatggtataatacgcctcacactcattctcaaccccctgacaaaacacatagcctaccccttccttgtactatccctatgaggcataattataacaagctccatctgcctacgacaaacagacctaaaatcgctcattgcatactcttcaatcagccacatagccctcgtagtaacagccattctcatccaaaccccctgaagcttcaccggcgcagtcattctcataatcgcccacgggcttacatcctcattactattctgcctagcaaactcaaactacgaacgcactcacagtcgcatcataatcctctctcaaggacttcaaactctactcccactaatagctttttgatgacttctagcaagcctcgctaacctcgccttaccccccactattaacctactgggagaactctctgtgctagtaaccacgttctcctgatcaaatatcactctcctacttacaggactcaacatactagtcacagccctatactccctctacatatttaccacaacacaatggggctcactcacccaccacattaacaacataaaaccctcattcacacgagaaaacaccctcatgttcatacacctatcccccattctcctcctatccctcaaccccgacatcattaccgggttttcctcttgtaaatatagtttaaccaaaacatcagattgtgaatctgacaacagaggcttacgaccccttatttaccgagaaagctcacaagaactgctaactcatgcccccatgtctaacaacatggctttctcaacttttaaaggataacagctatccattggtcttaggccccaaaaattttggtgcaactccaaataaaagtaataaccatgcacactactataaccaccctaaccctgacttccctaattccccccatccttaccaccctcgttaaccctaacaaaaaaaactcatacccccattatgtaaaatccattgtcgcatccacctttattatcagtctcttccccacaacaatattcatgtgcctagaccaagaagttattatctcgaactgacactgagccacaacccaaacaacccagctctccctaagcttcaaactagactacttctccataatattcatccctgtagcattgttcgttacatggtccatcatagaattctcactgtgatatataaactcagacccaaacattaatcagttcttcaaatatctactcatcttcctaattaccatactaatcttagttaccgctaacaacctattccaactgttcatcggctgagagggcgtaggaattatatccttcttgctcatcagttgatgatacgcccgagcagatgccaacacagcagccattcaagcaatcctatacaaccgtatcggcgatatcggtttcatcctcgccttagcatgatttatcctacactccaactcatgagacccacaacaaatagcccttctaaacgctaatccaagcctcaccccactactaggcctcctcctagcagcagcaggcaaatcagcccaattaggtctccacccctgactcccctcagccatagaaggccccaccccagtctcagccctactccactcaagcactatagttgtggcaggaatcttcttactcatccgcttccaccccctagcagaaaatagcccactaatccaaactctaacactatgcttaggcgctatcaccactctgttcgcagcagtctgcgcccttacacaaaatgacatcaaaaaaatcgtagccttctccacttcaagtcaactaggactcataatagttacaatcggcatcaaccaaccacacctagcattcctgcacatctgtacccacgccttcttcaaagccatactatttatgtgctccgggtccatcatccacaaccttaacaatgaacaagatattcgaaaaataggaggactactcaaaaccatacctctcacttcaacctccctcaccattggcagcctagcattagcaggaatacctttcctcacaggtttctactccaaagaccacatcatcgaaaccgcaaacatatcatacacaaacgcctgagccctatctattactctcatcgctacctccctgacaagcgcctatagcactcgaataattcttctcaccctaacaggtcaacctcgcttccccacccttactaacattaacgaaaataaccccaccctactaaaccccattaaacgcctggcagccggaagcctattcgcaggatttctcattactaacaacatttcccccgcatcccccttccaaacaacaatccccctctacctaaaactcacagccctcgctgtcactttcctaggacttctaacagccctagacctcaactacctaaccaacaaacttaaaataaaatccccactatgcacattttatttctccaacatactcggattctaccctagcatcacacaccgcacaatcccctatctaggccttcttacgagccaaaacctgcccctactcctcctagacctaacctgactagaaaagctattacctaaaacaatttcacagcaccaaatctccacctccatcatcacctcaacccaaaaaggcataattaaactttacttcctctctttcttcttcccactcatcctaaccctactcctaatcacataacctattcccccgagcaatctcaattacaatatatacaccaacaaacaatgttcaaccagtaactactactaatcaacgcccataatcatacaaagcccccgcaccaataggatcctcccgaatcaaccctgacccctctccttcataaattattcagcttcctacactattaaagtttaccacaaccaccaccccatcatactctttcacccacagcaccaatcctacctccatcgctaaccccactaaaacactcaccaagacctcaacccctgacccccatgcctcaggatactcctcaatagccatcgctgtagtatatccaaagacaaccatcattccccctaaataaattaaaaaaactattaaacccatataacctcccccaaaattcagaataataacacacccgaccacaccgctaacaatcaatactaaacccccataaataggagaaggcttagaagaaaaccccacaaaccccattactaaacccacactcaacagaaacaaagcatacatcattattctcgcacggactacaaccacgaccaatgatatgaaaaaccatcgttgtatttcaactacaagaacaccaatgaccccaatacgcaaaactaaccccctaataaaattaattaaccactcattcatcgacctccccaccccatccaacatctccgcatgatgaaacttcggctcactccttggcgcctgcctgatcctccaaatcaccacaggactattcctagccatgcactactcaccagacgcctcaaccgccttttcatcaatcgcccacatcactcgagacgtaaattatggctgaatcatccgctaccttcacgccaatggcgcctcaatattctttatctgcctcttcctacacatcgggcgaggcctatattacggatcatttctctactcagaaacctgaaacatcggcattatcctcctgcttgcaactatagcaacagccttcataggctatgtcctcccgtgaggccaaatatcattctgaggggccacagtaattacaaacttactatccgccatcccatacattgggacagacctagttcaatgaatctgaggaggctactcagtagacagtcccaccctcacacgattctttacctttcacttcatcttgcccttcattattgcagccctagcagcactccacctcctattcttgcacgaaacgggatcaaacaaccccctaggaatcacctcccattccgataaaatcaccttccacccttactacacaatcaaagacgccctcggcttacttctcttccttctctccttaatgacattaacactattctcaccagacctcctaggcgacccagacaattataccctagccaaccccttaaacacccctccccacatcaagcccgaatgatatttcctattcgcctacacaattctccgatccgtccctaacaaactaggaggcgtccttgccctattactatccatcctcatcctagcaataatccccatcctccatatatccaaacaacaaagcataatatttcgcccactaagccaatcactttattgactcctagccgcagacctcctcattctaacctgaatcggaggacaaccagtaagctacccttttatcatcattggacaagtagcatccgtactatacttcacaacaatcctaatcctaataccaactatctccctaattgaaaacaaaatactcaaatgggcctgtccttgtagtataaactaatacaccagtcttgtaaaccggagatgaaaacctttttccaaggacaaatcagagaaaaagtctttaactccaccattagcacccaaagctaagattctaatttaaactattctctgttctttcatggggaagcagatttgggtaccacccaagtattgactcacccatcaacaaccgctatgtatttcgtacattactgccagccaccatgaatattgtacggtaccataaatacttgaccacctgtagtacatgaaaacccaatccacatcaaaaccccctccccatgcttacaagcaagtacagcaatcaaccctcaactatcacacatcaactgcaactccaaagccacccctcacccactaggataccaacaaacctacccacccttaacagtacatagtacataaagccatttaccgtacatagcacattacagtcaaatcccttctcgtccccatggatgacccccctcagataggggtcccttgaccaccatcctccgtgaaatcaatatcccgcacaagagtgctactctcctcgctccgggcccataacacttgggggtagctaaagtgaactgtatccgacatctggttcctacttcagggccataaagcctaaatagcccacacgttccccttaaataagacatcacgatg

SEQ ID NO: 133 - DNA, 16570 bp, Homo sapiens mitochondrial
  3108: "n" refers to a nucleotide at position 3107 of the Cambridge Reference Sequence (CRS, Anderson et al. 1981 Nature 290:457-465), later determined to be absent from the human mtDNA sequence according to the revised CRS (rCRS, Andrews et al. 1999 Nature Genetics 23:147); "n" therefore represents a single nucleotide deletion at a position corresponding to nucleotide 3107 of SEQ ID NO:1 as provided herein.
gatcacaggtctatcaccctattaaccactcacgggagctctccatgcatttggtattttcgtctggggggtatgcacgcgatagcattgcgagacgctggagccggagcaccctatgtcgcagtatctgtctttgattcctgcctcatcccattatttatcgcacctacgttcaatattacaggcgaacatacttactaaagtgtgttaattaattaatgcttgtaggacataataataacaattgaatgtctgcacagccgctttccacacagacatcataacaaaaaatttccaccaaaccccccctcccccgccttctggccacagcacttaaacacatctctgccaaaccccaaaaacaaagaaccctaacaccagcctaaccagatttcaaattttatcttttggcggtatgcacttttaacagtcaccccccaactaacacattattttcccctcccactcccatactactaatctcatcaatacaacccccgcccatcctacccagcacacacacaccgctgctaaccccataccccgaaccaaccaaaccccaaagacaccccccacagtttatgtagcttacctcctcaaagcaatacactgaaaatgtttagacgggctcacatcaccccataaacaaataggtttggtcctagcctttctattagctcttagtaagattacacatgcaagcatccccgttccagtgagttcaccctctaaatcaccacgatcaaaagggacaagcatcaagcacgcagcaatgcagctcaaaacgcttagcctagccacacccccacgggaaacagcagtgattaacctttagcaataaacgaaagtttaactaagctatactaaccccagggttggtcaatttcgtgccagccaccgcggtcacacgattaacccaagtcaatagaagccggcgtaaagagtgttttagatcaccccctccccaataaagctaaaactcacctgagttgtaaaaaactccagttgacacaaaatagactacgaaagtggctttaacatatctgaacacacaatagctaagacccaaactgggattagataccccactatgcttagccctaaacctcaacagttaaatcaacaaaactgctcgccagaacactacgagccacagcttaaaactcaaaggacctggcggtgcttcatatccctctagaggagcctgttctgtaatcgataaaccccgatcaacctcaccacctcttgctcagcctatataccgccatcttcagcaaaccctgatgaaggctacaaagtaagcgcaagtacccacgtaaagacgttaggtcaaggtgtagcccatgaggtggcaagaaatgggctacattttctaccccagaaaactacgatagcccttatgaaacttaagggtcgaaggtggatttagcagtaaactgagagtagagtgcttagttgaacagggccctgaagcgcgtacacaccgcccgtcaccctcctcaagtatacttcaaaggacatttaactaaaacccctacgcatttatatagaggagacaagtcgtaacatggtaagtgtactggaaagtgcacttggacgaaccagagtgtagcttaacacaaagcacccaacttacacttaggagatttcaacttaacttgaccgctctgagctaaacctagccccaaacccactccaccttactaccagacaaccttagccaaaccatttacccaaataaagtataggcgatagaaattgaaacctggcgcaatagatatagtaccgcaagggaaagatgaaaaattataaccaagcataatatagcaaggactaacccctataccttctgcataatgaattaactagaaataactttgcaaggagagccaaagctaagacccccgaaaccagacgagctacctaagaacagctaaaagagcacacccgtctatgtagcaaaatagtgggaagatttataggtagaggcgacaaacctaccgagcctggtgatagctggttgtccaagatagaatcttagttcaactttaaatttgcccacagaaccctctaaatccccttgtaaatttaactgttagtccaaagaggaacagctctttggacactaggaaaaaaccttgtagagagagtaaaaaatttaacacccatagtaggcctaaaagcagccaccaattaagaaagcgttcaagctcaacacccactacctaaaaaatcccaaacatataactgaactcctcacacccaattggaccaatctatcaccctatagaagaactaatgttagtataagtaacatgaaaacattctcctccgcataagcctgcgtcagattaaaacactgaactgacaattaacagcccaatatctacaatcaaccaacaagtcattattaccctcactgtcaacccaacacaggcatgctcataaggaaaggttaaaaaaagtaaaaggaactcggcaaatcttaccccgcctgtttaccaaaaacatcacctctagcatcaccagtattagaggcaccgcctgcccagtgacacatgtttaacggccgcggtaccctaaccgtgcaaaggtagcataatcacttgttccttaaatagggacctgtatgaatggctccacgagggttcagctgtctcttacttttaaccagtgaaattgacctgcccgtgaagaggcgggcataacacagcaagacgagaagaccctatggagctttaatttattaatgcaaacagtacctaacaaacccacaggtcctaaactaccaaacctgcattaaaaatttcggttggggcgacctcggagcagaacccaacctccgagcagtacatgctaagacttcaccagtcaaagcgaactactatactcaattgatccaataacttgaccaacggaacaagttaccctagggataacagcgcaatcctattctagagtccatatcaacaatagggtttacgacctcgatgttggatcaggacatcccgatggtgcagccgctattaaaggttcgtttgttcaacgattaaagtcctacgtgatctgagttcagaccggagtaatccaggtcggtttctatctacnttcaaattcctccctgtacgaaaggacaagagaaataaggcctacttcacaaagcgccttcccccgtaaatgatatcatctcaacttagtattatacccacacccacccaagaacagggtttgttaagatggcagagcccggtaatcgcataaaacttaaaactttacagtcagaggttcaattcctcttcttaacaacatacccatggccaacctcctactcctcattgtacccattctaatcgcaatggcattcctaatgcttaccgaacgaaaaattctaggccatatacaactacgcaaaggccccaacgttgtaggcccctacgggctactacaacccttcgctgacgccataaaactcttcaccaaagagcccctaaaacccgccacatctaccatcaccctctacatcaccgccccgaccttagctctcaccatcgctcttctactatgaacccccctccccatacccaaccccctggtcaacctcaacctaggcctcctatttattctagccacctctagcctagccgtttactcaatcctctgatcagggtgagcatcaaactcaaactacgccctgatcggcgcactgcgagcagtagcccaaacaatctcatatgaagtcaccctagccatcattctactatcaacattactaataagtggctcctttaacctctccacccttatcacaacacaagaacacctctgattactcctgccatcatgacccttggccataatatgatttatctccacactagcagagaccaaccgaacccccttcgaccttgccgaaggggagtccgaactagtctcaggcttcaacatcgaatacgccgcaggccccttcgccctattcttcatagccgaatacacaaacattattataataaacaccctcaccactacaatcttcctaggaacaacatatgacgcactctcccctgaactctacacaacatattttgtcaccaagaccctacttctaacctccctgttcttatgaattcgaacagcatacccccgattccgctacgaccaactcatacacctcctatgaaaaaacttcctaccactcaccctagcattacttatatgatatgtctccatacccattacaatctccagcattccccctcaaacctaagaaatatgtctgataaaagagttactttgatagagtaaataataggagcttaaacccccttatttctaggactatgagaatcgaacccatccctgagaatccaaaattctccgtgccacctatcacaccccatcctaaagtaaggtcagctaaataagctatcgggcccataccccgaaaatgttggttatacccttcccgtactaattaatcccctggcccaacccgtcatctactctaccatctttgcaggcacactcatcacagcgctaagctcgcactgattttttacctgagtaggcctagaaataaacatgctagcttttattccagttctaaccaaaaaaataaaccctcgttccacagaagctgccatcaagtatttcctcacgcaagcaaccgcatccataatccttctaatagctatcctcttcaacaatatactctccggacaatgaaccataaccaatactaccaatcaatactcatcattaataatcataatggctatagcaataaaactaggaatagccccctttcacttctgagtcccagaggttacccaaggcacccctctgacatccggcctgcttcttctcacatgacaaaaactagcccccatctcaatcatataccaaatctctccctcactaaacgtaagccttctcctcactctctcaatcttatccatcatagcaggcagttgaggtggattaaaccaaacccagctacgcaaaatcttagcatactcctcaattacccacataggatgaataatagcagttctaccgtacaaccctaacataaccattcttaatttaactatttatattatcctaactactaccgcattcctactactcaacttaaactccagcaccacgaccctactactatctcgcacctgaaacaagctaacatgactaacacccttaattccatccaccctcctctccctaggaggcctgcccccgctaaccggctttttgcccaaatgggccattatcgaagaattcacaaaaaacaatagcctcatcatccccaccatcatagccaccatcaccctccttaacctctacttctacctacgcctaatctactccacctcaatcacactactccccatatctaacaacgtaaaaataaaatgacagtttgaacatacaaaacccaccccattcctccccacactcatcgcccttaccacgctactcctacctatctccccttttatactaataatcttatagaaatttaggttaaatacagaccaagagccttcaaagccctcagtaagttgcaatacttaatttctgtaacagctaaggactgcaaaaccccactctgcatcaactgaacgcaaatcagccactttaattaagctaagcccttactagaccaatgggacttaaacccacaaacacttagttaacagctaagcaccctaatcaactggcttcaatctacttctcccgccgccgggaaaaaaggcgggagaagccccggcaggtttgaagctgcttcttcgaatttgcaattcaatatgaaaatcacctcggagctggtaaaaagaggcctaacccctgtctttagatttacagtccaatgcttcactcagccattttacctcacccccactgatgttcgccgaccgttgactattctctacaaaccacaaagacattggaacactatacctattattcggcgcatgagctggagtcctaggcacagctctaagcctccttattcgagccgagctgggccagccaggcaaccttctaggtaacgaccacatctacaacgttatcgtcacagcccatgcatttgtaataatcttcttcatagtaatacccatcataatcggaggctttggcaactgactagttcccctaataatcggtgcccccgatatggcgtttccccgcataaacaacataagcttctgactcttacctccctctctcctactcctgctcgcatctgctatagtggaggccggagcaggaacaggttgaacagtctaccctcccttagcagggaactactcccaccctggagcctccgtagacctaaccatcttctccttacacctagcaggtgtctcctctatcttaggggccatcaatttcatcacaacaattatcaatataaaaccccctgccataacccaataccaaacgcccctcttcgtctgatccgtcctaatcacagcagtcctacttctcctatctctcccagtcctagctgctggcatcactatactactaacagaccgcaacctcaacaccaccttcttcgaccccgccggaggaggagaccccattctataccaacacctattctgatttttcggtcaccctgaagtttatattcttatcctaccaggcttcggaataatctcccatattgtaacttactactccggaaaaaaagaaccatttggatacataggtatggtctgagctatgatatcaattggcttcctagggtttatcgtgtgagcacaccacatatttacagtaggaatagacgtagacacacgagcatatttcacctccgctaccataatcatcgctatccccaccggcgtcaaagtatttagctgactcgccacactccacggaagcaatatgaaatgatctgctgcagtgctctgagccctaggattcatctttcttttcaccgtaggtggcctgactggcattgtattagcaaactcatcactagacatcgtactacacgacacgtactacgttgtagcccacttccactatgtcctatcaataggagctgtatttgccatcataggaggcttcattcactgatttcccctattctcaggctacaccctagaccaaacctacgccaaaatccatttcactatcatattcatcggcgtaaatctaactttcttcccacaacactttctcggcctatccggaatgccccgacgttactcggactaccccgatgcatacaccacatgaaacatcctatcatctgtaggctcattcatttctctaacagcagtaatattaataattttcatgatttgagaagccttcgcttcgaagcgaaaagtcctaatagtagaagaaccctccataaacctggagtgactatatggatgccccccaccctaccacacattcgaagaacccgtatacataaaatctagacaaaaaaggaaggaatcgaaccccccaaagctggtttcaagccaaccccatggcctccatgactttttcaaaaaggtattagaaaaaccatttcataactttgtcaaagttaaattataggctaaatcctatatatcttaatggcacatgcagcgcaagtaggtctacaagacgctacttcccctatcatagaagagcttatcacctttcatgatcacgccctcataatcattttccttatctgcttcctagtcctgtatgcccttttcctaacactcacaacaaaactaactaatactaacatctcagacgctcaggaaatagaaaccgtctgaactatcctgcccgccatcatcctagtcctcatcgccctcccatccctacgcatcctttacataacagacgaggtcaacgatccctcccttaccatcaaatcaattggccaccaatggtactgaacctacgagtacaccgactacggcggactaatcttcaactcctacatacttcccccattattcctagaaccaggcgacctgcgactccttgacgttgacaatcgagtagtactcccgattgaagcccccattcgtataataattacatcacaagacgtcttgcactcatgagctgtccccacattaggcttaaaaacagatgcaattcccggacgtctaaaccaaaccactttcaccgctacacgaccgggggtatactacggtcaatgctctgaaatctgtggagcaaaccacagtttcatgcccatcgtcctagaattaattcccctaaaaatctttgaaatagggcccgtatttaccctatagcaccccctctaccccctctagagcccactgtaaagctaacttagcattaaccttttaagttaaagattaagagaaccaacacctctttacagtgaaatgccccaactaaatactaccgtatggcccaccataattacccccatactccttacactattcctcatcacccaactaaaaatattaaacacaaactaccacctacctccctcaccaaagcccataaaaataaaaaattataacaaaccctgagaaccaaaatgaacgaaaatctgttcgcttcattcattgcccccacaatcctaggcctacccgccgcagtactgatcattctatttccccctctattgatccccacctccaaatatctcatcaacaaccgactaatcaccacccaacaatgactaatcaaactaacctcaaaacaaatgataaccatacacaacactaaaggacgaacctgatctcttatactagtatccttaatcatttttattgccacaactaacctcctcggactcctgcctcactcatttacaccaaccacccaactatctataaacctagccatggccatccccttatgagcgggcgcagtgattataggctttcgctctaagattaaaaatgccctagcccacttcttaccacaaggcacacctacaccccttatccccatactagttattatcgaaaccatcagcctactcattcaaccaatagccctggccgtacgcctaaccgctaacattactgcaggccacctactcatgcacctaattggaagcgccaccctagcaatatcaaccattaaccttccctctacacttatcatcttcacaattctaattctactgactatcctagaaatcgctgtcgccttaatccaagcctacgttttcacacttctagtaagcctctacctgcacaacaacacataatgacccaccaatcacatgcctatcatatagtaaaacccagcccatgacccctaacaggggccctctcagccctcctaatgacctccggcctagccatgtgatttcacttccactccataacgctcctcatactaggcctactaaccaacacactaaccatataccaatgatggcgcgatgtaacacgagaaagcacataccaaggccaccacacaccacctgtccaaaaaggccttcgatacgggataatcctatttattacctcagaagtttttttcttcgcaggatttttctgagccttttaccactccagcctagcccctaccccccaattaggagggcactggcccccaacaggcatcaccccgctaaatcccctagaagtcccactcctaaacacatccgtattactcgcatcaggagtatcaatcacctgagctcaccatagtctaatagaaaacaaccgaaaccaaataattcaagcactgcttattacaattttactgggtctctattttaccctcctacaagcctcagagtacttcgagtctcccttcaccatttccgacggcatctacggctcaacattttttgtagccacaggcttccacggacttcacgtcattattggctcaactttcctcactatctgcttcatccgccaactaatatttcactttacatccaaacatcactttggcttcgaagccgccgcctgatactggcattttgtagatgtggtttgactatttctgtatgtctccatctattgatgagggtcttactcttttagtataaatagtaccgttaacttccaattaactagttttgacaacattcaaaaaagagtaataaacttcgccttaattttaataatcaacaccctcctagccttactactaataattattacattttgactaccacaactcaacggctacatagaaaaatccaccccttacgagtgcggcttcgaccctatatcccccgcccgcgtccctttctccataaaattcttcttagtagctattaccttcttattatttgatctagaaattgccctccttttacccctaccatgagccctacaaacaactaacctgccactaatagttatgtcatccctcttattaatcatcatcctagccctaagtctggcctatgagtgactacaaaaaggattagactgaaccgaattggtatatagtttaaacaaaacgaatgatttcgactcattaaattatgataatcatatttaccaaatgcccctcatttacataaatattatactagcatttaccatctcacttctaggaatactagtatatcgctcacacctcatatcctccctactatgcctagaaggaataatactatcgctgttcattatagctactctcataaccctcaacacccactccctcttagccaatattgtacctattgccatactagtctttgccgcctgcgaagcagcggtgggcctagccctactagtctcaatctccaacacatatggcctagactacgtacataacctaaacctcctccaatgctaaaactaatcgtcccaacaattatattactaccactgacatgactttccaaaaaacacataatttgaatcaacacaaccacccacagcctaattattagcatcatccctctactattttttaaccaaatcaacaacaacctatttagctgttccccaaccttttcctccgaccccctaacaacccccctcctaatactaactacctgactcctacccctcacaatcatggcaagccaacgccacttatccagtgaaccactatcacgaaaaaaactctacctctctatactaatctccctacaaatctccttaattataacattcacagccacagaactaatcatattttatatcttcttcgaaaccacacttatccccaccttggctatcatcacccgatgaggcaaccagccagaacgcctgaacgcaggcacatacttcctattctacaccctagtaggctcccttcccctactcatcgcactaatttacactcacaacaccctaggctcactaaacattctactactcactctcactgcccaagaactatcaaactcctgagccaacaacttaatatgactagcttacacaatagcttttatagtaaagatacctctttacggactccacttatgactccctaaagcccatgtcgaagcccccatcgctgggtcaatagtacttgccgcagtactcttaaaactaggcggctatggtataatacgcctcacactcattctcaaccccctgacaaaacacatagcctaccccttccttgtactatccctatgaggcataattataacaagctccatctgcctacgacaaacagacctaaaatcgctcattgcatactcttcaatcagccacatagccctcgtagtaacagccattctcatccaaaccccctgaagcttcaccggcgcagtcattctcataatcgcccacgggcttacatcctcattactattctgcctagcaaactcaaactacgaacgcactcacagtcgcatcataatcctctctcaaggacttcaaactctactcccactaatagctttttgatgacttctagcaagcctcgctaacctcgccttaccccccactattaacctactgggagaactctctgtgctagtaaccacgttctcctgatcaaatatcactctcctacttacaggactcaacatactagtcacagccctatactccctctacatatttaccacaacacaatggggctcactcacccaccacattaacaacataaaaccctcattcacacgagaaaacaccctcatgttcatacacctatcccccattctcctcctatccctcaaccccgacatcattaccgggttttcctcttgtaaatatagtttaaccaaaacatcagattgtgaatctgacaacagaggcttacgaccccttatttaccgagaaagctcacaagaactgctaactcatgcccccatgtctaacaacatggctttctcaacttttaaaggataacagctatccattggtcttaggccccaaaaattttggtgcaactccaaataaaagtaataaccatgcacactactataaccaccctaaccctgacttccctaattccccccatccttaccaccctcgttaaccctaacaaaaaaaactcatacccccattatgtaaaatccattgtcgcatccacctttattatcagtctcttccccacaacaatattcatgtgcctagaccaagaagttattatctcgaactgacactgagccacaacccaaacaacccagctctccctaagcttcaaactagactacttctccataatattcatccctgtagcattgttcgttacatggtccatcatagaattctcactgtgatatataaactcagacccaaacattaatcagttcttcaaatatctactcatcttcctaattaccatactaatcttagttaccgctaacaacctattccaactgttcatcggctgagagggcgtaggaattatatccttcttgctcatcagttgatgatacgcccgagcagatgccaacacagcagccattcaagcaatcctatacaaccgtatcggcgatatcggtttcatcctcgccttagcatgatttatcctacactccaactcatgagacccacaacaaatagcccttctaaacgctaatccaagcctcaccccactactaggcctcctcctagcagcagcaggcaaatcagcccaattaggtctccacccctgactcccctcagccatagaaggccccaccccagtctcagccctactccactcaagcactatagttgtagcaggaatcttcttactcatccgcttccaccccctagcagaaaatagcccactaatccaaactctaacactatgcttaggcgctatcaccactctgttcgcagcagtctgcgcccttacacaaaatgacatcaaaaaaatcgtagccttctccacttcaagtcaactaggactcataatagttacaatcggcatcaaccaaccacacctagcattcctgcacatctgtacccacgccttcttcaaagccatactatttatgtgctccgggtccatcatccacaaccttaacaatgaacaagatattcgaaaaataggaggactactcaaaaccatacctctcacttcaacctccctcaccattggcagcctagcattagcaggaatacctttcctcacaggtttctactccaaagaccacatcatcgaaaccgcaaacatatcatacacaaacgcctgagccctatctattactctcatcgctacctccctgacaagcgcctatagcactcgaataattcttctcaccctaacaggtcaacctcgcttccccacccttactaacattaacgaaaataaccccaccctactaaaccccattaaacgcctggcagccggaagcctattcgcaggatttctcattactaacaacatttcccccgcatcccccttccaaacaacaatccccctctacctaaaactcacagccctcgctgtcactttcctaggacttctaacagccctagacctcaactacctaaccaacaaacttaaaataaaatccccactatgcacattttatttctccaacatactcggattctaccctagcatcacacaccgcacaatcccctatctaggccttcttacgagccaaaacctgcccctactcctcctagacctaacctgactagaaaagctattacctaaaacaatttcacagcaccaaatctccacctccatcatcacctcaacccaaaaaggcataattaaactttacttcctctctttcttcttcccactcatcctaaccctactcctaatcacataacctattcccccgagcaatctcaattacaatatatacaccaacaaacaatgttcaaccagtaactactactaatcaacgcccataatcatacaaagcccccgcaccaataggatcctcccgaatcaaccctgacccctctccttcataaattattcagcttcctacactattaaagtttaccacaaccaccaccccatcatactctttcacccacagcaccaatcctacctccatcgctaaccccactaaaacactcaccaagacctcaacccctgacccccatgcctcaggatactcctcaatagccatcgctgtagtatatccaaagacaaccatcattccccctaaataaattaaaaaaactattaaacccatataacctcccccaaaattcagaataataacacacccgaccacaccgctaacaatcaatactaaacccccataaataggagaaggcttagaagaaaaccccacaaaccccattactaaacccacactcaacagaaacaaagcatacatcattattctcgcacggactacaaccacgaccaatgatatgaaaaaccatcgttgtatttcaactacaagaacaccaatgaccccaatacgcaaaactaaccccctaataaaattaattaaccactcattcatcgacctccccaccccatccaacatctccgcatgatgaaacttcggctcactccttggcgcctgcctgatcctccaaatcaccacaggactattcctagccatgcactactcaccagacgcctcaaccgccttttcatcaatcgcccacatcactcgagacgtaaattatggctgaatcatccgctaccttcacgccaatggcgcctcaatattctttatctgcctcttcctacacatcgggcgaggcctatattacggatcatttctctactcagaaacctgaaacatcggcattatcctcctgcttgcaactatagcaacagccttcataggctatgtcctcccgtgaggccaaatatcattctgaggggccacagtaattacaaacttactatccgccatcccatacattgggacagacctagttcaatgaatctgaggaggctactcagtagacagtcccaccctcacacgattctttacctttcacttcatcttgcccttcattattgcagccctagcagcactccacctcctattcttgcacgaaacgggatcaaacaaccccctaggaatcacctcccattccgataaaatcaccttccacccttactacacaatcaaagacgccctcggcttacttctcttccttctctccttaatgacattaacactattctcaccagacctcctaggcgacccagacaattataccctagccaaccccttaaacacccctccccacatcaagcccgaatgatatttcctattcgcctacacaattctccgatccgtccctaacaaactaggaggcgtccttgccctattactatccatcctcatcctagcaataatccccatcctccatatatccaaacaacaaagcataatatttcgcccactaagccaatcactttattgactcctagccgcagacctcctcattctaacctgaatcggaggacaaccagtaagctacccttttaccatcattggacaagtagcatccgtactatacttcacaacaatcctaatcctaataccaactatctccctaattgaaaacaaaatactcaaatgggcctgtccttgtagtataaactaatacaccagtcttgtaaaccgaagatgaaaacctttttccaaggacaaatcagagaaaaagtctttaactccaccattagcacccaaagctaagattctaatttaaactattctctgttctttcatggggaagcagatttgggtaccacccaagtattgactcacccatcaacaaccgctatgtatttcgtacattactgccagccaccatgaatattgtacggtaccataaatacttgaccacctgtagtacataaaaacccaatccacatcaaaaccccctccccatgcttacaagcaagtacagcaatcaaccctcaactatcacacatcaactgcaactccaaagccacccctcacccactaggataccaacaaacctacccacccttaacagtacatagtacataaagccatttaccgtacatagcacattacagtcaaatcccttctcgtccccatggatgacccccctcagataggggtcccttgaccaccatcctccgtgaaatcaatatcccgcacaagagtgctactctcctcgctccgggcccataacacttgggggtagctaaagtgaactgtatccgacatctggttcctacttcagggccataaagcctaaatagcccacacgttccccttaaataagacatcacgatg

SEQ ID NO: 134 - DNA, 16570 bp, Homo sapiens mitochondrial
  3108: "n" refers to a nucleotide at position 3107 of the Cambridge Reference Sequence (CRS, Anderson et al. 1981 Nature 290:457-465), later determined to be absent from the human mtDNA sequence according to the revised CRS (rCRS, Andrews et al. 1999 Nature Genetics 23:147); "n" therefore represents a single nucleotide deletion at a position corresponding to nucleotide 3107 of SEQ ID NO:1 as provided herein.
gatcacaggtctatcaccctattaaccactcacgggagctctccatgcatttggtattttcgtctggggggtatgcacgcgatagcattgcgagacgctggagccggagcaccctatgtcgcagtatctgtctttgattcctgcctcatcccattatttatcgcacctacgttcaatattacaggcgaacatacttactaaagtgtgttaattaattaatgcttgtaggacataataataacaattgaatgtctgcacagccgctttccacacagacatcataacaaaaaatttccaccaaaccccccctcccccgccttctggccacagcacttaaacacatctctgccaaaccccaaaaacaaagaaccctaacaccagcctaaccagatttcaaattttatcttttggcggtatgcacttttaacagtcaccccccaactaacacattattttcccctcccactcccatactactaatctcatcaatacaacccccgcccatcctacccagcacacacacaccgctgctaaccccataccccgaaccaaccaaaccccaaagacaccccccacagtttatgtagcttacctcctcaaagcaatacactgaaaatgtttagacgggctcacatcaccccataaacaaataggtttggtcctagcctttctattagctcttagtaagattacacatgcaagcatccccgttccagtgagttcaccctctaaatcaccacgatcaaaagggacaagcatcaagcacgcagcaatgcagctcaaaacgcttagcctagccacacccccacgggaaacagcagtgattaacctttagcaataaacgaaagtttaactaagctatactaaccccagggttggtcaatttcgtgccagccaccgcggtcacacgattaacccaagtcaatagaagccggcgtaaagagtgttttagatcaccccctccccaataaagctaaaactcacctgagttgtaaaaaactccagttgacacaaaatagactacgaaagtggctttaacatatctgaacacacaatagctaagacccaaactgggattagataccccactatgcttagccctaaacctcaacagttaaatcaacaaaactgctcgccagaacactacgagccacagcttaaaactcaaaggacctggcggtgcttcatatccctctagaggagcctgttctgtaatcgataaaccccgatcaacctcaccacctcttgctcagcctatataccgccatcttcagcaaaccctgatgaaggctacaaagtaagcgcaagtacccacgtaaagacgttaggtcaaggtgtagcccatgaggtggcaagaaatgggctacattttctaccccagaaaactacgatagcccttatgaaacttaagggtcgaaggtggatttagcagtaaactgagagtagagtgcttagttgaacagggccctgaagcgcgtacacaccgcccgtcaccctcctcaagtatacttcaaaggacatttaactaaaacccctacgcatttatatagaggagacaagtcgtaacatggtaagtgtactggaaagtgcacttggacgaaccagagtgtagcttaacacaaagcacccaacttacacttaggagatttcaacttaacttgaccgctctgagctaaacctagccccaaacccactccaccttactaccagacaaccttagccaaaccatttacccaaataaagtataggcgatagaaattgaaacctggcgcaatagatatagtaccgcaagggaaagatgaaaaattataaccaagcataatatagcaaggactaacccctataccttctgcataatgaattaactagaaataactttgcaaggagagccaaagctaagacccccgaaaccagacgagctacctaagaacagctaaaagagcacacccgtctatgtagcaaaatagtgggaagatttataggtagaggcgacaaacctaccgagcctggtgatagctggttgtccaagatagaatcttagttcaactttaaatttgcccacagaaccctctaaatccccttgtaaatttaactgttagtccaaagaggaacagctctttggacactaggaaaaaaccttgtagagagagtaaaaaatttaacacccatagtaggcctaaaagcagccaccaattaagaaagcgttcaagctcaacacccactacctaaaaaatcccaaacatataactgaactcctcacacccaattggaccaatctatcaccctatagaagaactaatgttagtataagtaacatgaaaacattctcctccgcataagcctgcgtcagattaaaacactgaactgacaattaacagcccaatatctacaatcaaccaacaagtcattattaccctcactgtcaacccaacacaggcatgctcataaggaaaggttaaaaaaagtaaaaggaactcggcaaatcttaccccgcctgtttaccaaaaacatcacctctagcatcaccagtattagaggcaccgcctgcccagtgacacatgtttaacggccgcggtaccctaaccgtgcaaaggtagcataatcacttgttccttaaatagggacctgtatgaatggctccacgagggttcagctgtctcttacttttaaccagtgaaattgacctgcccgtgaagaggcgggcataacacagcaagacgagaagaccctatggagctttaatttattaatgcaaacagtacctaacaaacccacaggtcctaaactaccaaacctgcattaaaaatttcggttggggcgacctcggagcagaacccaacctccgagcagtacatgctaagacttcaccagtcaaagcgaactactatactcaattgatccaataacttgaccaacggaacaagttaccctagggataacagcgcaatcctattctagagtccatatcaacaatagggtttacgacctcgatgttggatcaggacatcccgatggtgcagccgctattaaaggttcgtttgttcaacgattaaagtcctacgtgatctgagttcagaccggagtaatccaggtcggtttctatctacnttcaaattcctccctgtacgaaaggacaagagaaataaggcctacttcacaaagcgccttcccccgtaaatgatatcatctcaacttagtattatacccacacccacccaagaacagggtttgttaagatggcagagcccggtaatcgcataaaacttaaaactttacagtcagaggttcaattcctcttcttaacaacatacccatggccaacctcctactcctcattgtacccattctaatcgcaatggcattcctaatgcttaccgaacgaaaaattctaggctatatacaactacgcaaaggccccaacgttgtaggcccctacgggctactacaacccttcgctgacgccataaaactcttcaccaaagagcccctaaaacccgccacatctaccatcaccctctacatcaccgccccgaccttagctctcaccatcgctcttctactatgaacccccctccccatacccaaccccctggtcaacctcaacctaggcctcctatttattctagccacctctagcctagccgtttactcaatcctctgatcagggtgagcatcaaactcaaactacgccctgatcggcgcactgcgagcagtagcccaaacaatctcatatgaagtcaccctagccatcattctactatcaacattactaataagtggctcctttaacctctccacccttatcacaacacaagaacacctctgattactcctgccatcatgacccttggccataatatgatttatctccacactagcagagaccaaccgaacccccttcgaccttgccgaaggggagtccgaactagtctcaggcttcaacatcgaatacgccgcaggccccttcgccctattcttcatagccgaatacacaaacattattataataaacaccctcaccactacaatcttcctaggaacaacatatgacgcactctcccctgaactctacacaacatattttgtcaccaagaccctacttctaacctccctgttcttatgaattcgaacagcatacccccgattccgctacgaccaactcatacacctcctatgaaaaaacttcctaccactcaccctagcattacttatatgatatgtctccatacccattacaatctccagcattccccctcaaacctaagaaatatgtctgataaaagagttactttgatagagtaaataataggagcttaaacccccttatttctaggactatgagaatcgaacccatccctgagaatccaaaattctccgtgccacctatcacaccccatcctaaagtaaggtcagctaaataagctatcgggcccataccccgaaaatgttggttatacccttcccgtactaattaatcccctggcccaacccgtcatctactctaccatctttgcaggcacactcatcacagcgctaagctcgcactgattttttacctgagtaggcctagaaataaacatgctagcttttattccagttctaaccaaaaaaataaaccctcgttccacagaagctgccatcaagtatttcctcacgcaagcaaccgcatccataatccttctaatagctatcctcttcaacaatatactctccggacaatgaaccataaccaatactaccaatcaatactcatcattaataatcataatggctatagcaataaaactaggaatggccccctttcacttctgagtcccagaggttacccaaggcacccctctgacatccggcctgcttcttctcacatgacaaaaactagcccccatctcaatcatataccaaatctctccctcactaaacgtaagccttctcctcactctctcaatcttatccatcatagcaggcagttgaggtggattaaaccaaacccagctacgcaaaatcttagcatactcctcaattacccacataggatgaataatagcagttctaccgtacaaccctaacataaccattcttaatttaactatttatattatcctaactactaccgcattcctactactcaacttaaactccagcaccacgaccctactactatctcgcacctgaaacaagctaacatgactaacacccttaattccatccaccctcctctccctaggaggcctgcccccgctaaccggctttttgcccaaatgggccattatcgaagaattcacaaaaaacaatagcctcatcatccccaccatcatagccaccatcaccctccttaacctctacttctacctacgcctaatctactccacctcaatcacactactccccatatctaacaacgtaaaaataaaatgacagtttgaacatacaaaacccaccccattcctccccacactcatcgcccttaccacgctactcctacctatctccccttttatactaataatcttatagaaatttaggttaaatacagaccaagagccttcaaagccctcagtaagttgcaatacttaatttctgtaacagctaaggactgcaaaaccccactctgcatcaactgaacgcaaatcagccactttaattaagctaagcccttactagaccaatgggacttaaacccacaaacacttagttaacagctaagcaccctaatcaactggcttcaatctacttctcccgccgccgggaaaaaaggcgggagaagccccggcaggtttgaagctgcttcttcgaatttgcaattcaatatgaaaatcacctcggagctggtaaaaagaggcctaacccctgtctttagatttacagtccaatgcttcactcagccattttacctcacccccactgatgttcgccgaccgttgactattctctacaaaccacaaagacattggaacactatacctattattcggcgcatgagctggagtcctaggcacagctctaagcctccttattcgagccgagctgggccagccaggcaaccttctaggtaacgaccacatctacaacgttatcgtcacagcccatgcatttgtaataatcttcttcatagtaatacccatcataatcggaggctttggcaactgactagttcccctaataatcggtgcccccgatatggcgtttccccgcataaacaacataagcttctgactcttacctccctctctcctactcctgctcgcatctgctatagtggaggccggagcaggaacaggttgaacagtctaccctcccttagcagggaactactcccaccctggagcctccgtagacctaaccatcttctccttacacctagcaggtgtctcctctatcttaggggccatcaatttcatcacaacaattatcaatataaaaccccctgccataacccaataccaaacgcccctcttcgtctgatccgtcctaatcacagcagtcctacttctcctatctctcccagtcctagctgctggcatcactatactactaacagaccgcaacctcaacaccaccttcttcgaccccgccggaggaggagaccccattctataccaacacctattctgatttttcggtcaccctgaagtttatattcttatcctaccaggcttcggaataatctcccatattgtaacttactactccggaaaaaaagaaccatttggatacataggtatggtctgagctatgatatcaattggcttcctagggtttatcgtgtgagcacaccatatatttacagtaggaatagacgtagacacacgagcatatttcacctccgctaccataatcatcgctatccccaccggcgtcaaagtatttagctgactcgccacactccacggaagcaatatgaaatgatctgctgcagtgctctgagccctaggattcatctttcttttcaccgtaggtggcctgactggcattgtattagcaaactcatcactagacatcgtactacacgacacgtactacgttgtagcccacttccactatgtcctatcaataggagctgtatttgccatcataggaggcttcattcactgatttcccctattctcaggctacaccctagaccaaacctacgccaaaatccatttcactatcatattcatcggcgtaaatctaactttcttcccacaacactttctcggcctatccggaatgccccgacgttactcggactaccccgatgcatacaccacatgaaacatcctatcatctgtaggctcattcatttctctaacagcagtaatattaataattttcatgatttgagaagccttcgcttcgaagcgaaaagtcctaatagtagaagaaccctccataaacctggagtgactatatggatgccccccaccctaccacacattcgaagaacccgtatacataaaatctagacaaaaaaggaaggaatcgaaccccccaaagctggtttcaagccaaccccatggcctccatgactttttcaaaaaggtattagaaaaaccatttcataactttgtcaaagttaaattataggctaaatcctatatatcttaatggcacatgcagcgcaagtaggtctacaagacgctacttcccctatcatagaagagcttatcacctttcatgatcacgccctcataatcattttccttatctgcttcctagtcctgtatgcccttttcctaacactcacaacaaaactaactaatactaacatctcagacgctcaggaaatagaaaccgtctgaactatcctgcccgccatcatcctagtcctcatcgccctcccatccctacgcatcctttacataacagacgaggtcaacgacccctcccttaccatcaaatcaattggccaccaatggtactgaacctacgagtacaccgactacggcggactaatcttcaactcctacatacttcccccattattcctagaaccaggcgacctgcgactccttgacgttgacaatcgagtagtactcccgattgaagcccccattcgtataataattacatcacaagacgtcttgcactcatgagctgtccccacattaggcttaaaaacagatgcaattcccggacgtctaaaccaaaccactttcaccgctacacgaccgggggtatactacggtcaatgctctgaaatctgtggagcaaaccacagtttcatgcccatcgtcctagaattaattcccctaaaaatctttgaaatagggcccgtatttaccctatagcaccccctctaccccctctagagcccactgtaaagctaacttagcattaaccttttaagttaaagattaagagaaccaacacctctttacagtgaaatgccccaactaaatactaccgtatggcccaccataattacccccatactccttacactattcctcatcacccaactaaaaatattaaacacaaactaccacctacctccctcaccaaagcccataaaaataaaaaattataacaaaccctgagaaccaaaatgaacgaaaatctgttcgcttcattcattgcccccacaatcctaggcctacccgccgcagtactgatcattctatttccccctctattgatccccacctccaaatatctcatcaacaaccgactaatcaccacccaacaatgactaatcaaactaacctcaaaacaaatgataaccatacacaacactaaaggacgaacctgatctcttatactagtatccttaatcatttttattgccacaactaacctcctcggactcctgcctcactcatttacaccaaccacccaactatctataaacctagccatggccatccccttatgagcgggcgcagtgattataggctttcgctctaagattaaaaatgccctagcccacttcttaccacaaggcacacctacaccccttatccccatactagttattatcgaaaccatcagcctactcattcaaccaatagccctggccgtacgcctaaccgctaacattactgcaggccacctactcatgcgcctaattggaagcgccaccctagcaatatcaaccattaaccttccctctacacttatcatcttcacaattctaattctactgactatcctagaaatcgctgtcgccttaatccaagcctacgttttcacacttctagtaagcctctacctgcacgacaacacataatgacccaccaatcacatgcctatcatatagtaaaacccagcccatgacccctaacaggggccctctcagccctcctaatgacctccggcctagccatgtgatttcacttccactccataacgctcctcatactaggcctactaaccaacacactaaccatataccaatgatggcgcgatgtaacacgagaaagcacataccaaggccaccacacaccacctgtccaaaaaggccttcgatacgggataatcctatttattacctcagaagtttttttcttcgcaggatttttctgagccttttaccactccagcctagcccctaccccccaattaggagggcactggcccccaacaggcatcaccccgctaaatcccctagaagtcccactcctaaacacatccgtattactcgcatcaggagtatcaatcacctgagctcaccatagtctaatagaaaacaaccgaaaccaaataattcaagcactgcttattacaattttactgggtctctattttaccctcctacaagcctcagagtacttcgagtctcccttcaccatttccgacggcatctacggctcaacattttttgtagccacaggcttccacggacttcacgtcattattggctcaactttcctcactatctgcttcatccgccaactaatatttcactttacatccaaacatcactttggcttcgaagccgccgcctgatactggcattttgtagatgtggtttgactatttctgtatgtctccatctattgatgagggtcttactcttttagtataaatagtaccgttaacttccaattaactagttttgacaacattcaaaaaagagtaataaacttcgccttaattttaataatcaacaccctcctagccttactactaataattattacattttgactaccacaactcaacggctacatagaaaaatccaccccttacgagtgcggcttcgaccctatatcccccgcccgcgtccctttctccataaaattcttcttagtagctattaccttcttattatttgatctagaaattgccctccttttacccctaccatgagccctacaaacaactaacctgccactaatagttatgtcatccctcttattaatcatcatcctagccctaagtctggcctatgagtgactacaaaaaggattagactgaaccgaattggtatatagtttaaacaaaacgaatgatttcgactcattaaattatgataatcatatttaccaaatgcccctcatttacataaatattatactagcatttaccatctcacttctaggaatactagtatatcgctcacacctcatatcctccctactatgcctagaaggaataatactatcgctgttcattatagctactctcataaccctcaacacccactccctcttagccaatattgtgcctattgccatactagtctttgccgcctgcgaagcagcggtgggcctagccctactagtctcaatctccaacacatatggcctagactacgtacataacctaaacctactccaatgctaaaactaatcgtcccaacaattatattactaccactgacatgactttccaaaaaacacataatttgaatcaacacaaccacccacagcctaattattagcatcatccctctactattttttaaccaaatcaacaacaacctatttagctgttccccaaccttttcctccgaccccctaacaacccccctcctaatactaactacctgactcctacccctcacaatcatggcaagccaacgccacttatccagtgaaccactatcacgaaaaaaactctacctctctatactaatctccctacaaatctccttaattataacattcacagccacagaactaatcatattttatatcttcttcgaaaccacacttatccccaccttggctatcatcacccgatgaggcaaccagccagaacgcctgaacgcaggcacatacttcctattctacaccctagtaggctcccttcccctactcatcgcactaatttacactcacaacaccctaggctcactaaacattctactactcactctcactgcccaagaactatcaaactcctgagccaacaacttaatatgactagcttacacaatagcttttatagtaaagatacctctttacggactccacttatgactccctaaagcccatgtcgaagcccccatcgctgggtcaatagtacttgccgcagtactcttaaaactaggcggctatggtataatacgcctcacactcattctcaaccccctgacaaaacacatagcctaccccttccttgtactatccctatgaggcataattataacaagctccatctgcctacgacaaacagacctaaaatcgctcattgcatactcttcaatcagccacatagccctcgtagtaacagccattctcatccaaaccccctgaagcttcaccggcgcagtcattctcataatcgcccacgggcttacatcctcattactattctgcctagcaaactcaaactacgaacgcactcacagtcgcatcataatcctctctcaaggacttcaaactctactcccactaatagctttttgatgacttctagcaagcctcgctaacctcgccttaccccccactattaacctactgggagaactctctgtgctagtaaccacgttctcctgatcaaatatcactctcctacttacaggactcaacatactagtcacagccctatactccctctacatatttaccacaacacaatggggctcactcacccaccacattaacaacataaaaccctcattcacacgagaaaacaccctcatgttcatacacctatcccccattctcctcctatccctcaaccccgacatcattaccgggttttcctcttgtaaatatagtttaaccaaaacatcagattgtgaatctgacaacagaggcttacgaccccttatttaccgagaaagctcacaagaactgctaactcatgcccccatgtctaacaacatggctttctcaacttttaaaggataacagctatccattggtcttaggccccaaaaattttggtgcaactccaaataaaagtaataaccatgcacactactataaccaccctaaccctgacttccctaattccccccatccttaccaccctcgttaaccctaacaaaaaaaactcatacccccattatgtaaaatccattgtcgcatccacctttattatcagtctcttccccacaacaatattcatgtgcctagaccaagaagttattatctcgaactgacactgagccacaacccaaacaacccagctctccctaagcttcaaactagactacttctccataatattcatccctgtagcattgttcgttacatggtccatcatagaattctcactgtgatatataaactcagacccaaacattaatcagttcttcaaatatctactcatcttcctaattaccatactaatcttagttaccggtaacaacctattccaactgttcatcggctgagagggcgtaggaattatatccttcttgctcatcagttgatgatacgcccgagcagatgccaacacagcagccattcaagcaatcctatacaaccgtatcggcgatatcggtttcatcctcgccttagcatgatttatcctacactccaactcatgagacccacaacaaatagcccttctaaacgctaatccaagcctcaccccactactaggcctcctcctagcagcagcaggcaaatcagcccaattaggtctccacccctgactcccctcagccatagaaggccccaccccagtctcagccctactccactcaagcactatagttgtagcaggaatcttcttactcatccgcttccaccccctagcagaaaatagcccactaatccaaactctaacactatgcttaggcgctatcaccactctgttcgcagcagtctgcgcccttacacaaaatgacatcaaaaaaatcgtagccttctccacttcaagtcaactaggactcataatagttacaatcggcatcaaccaaccacacctagcattcctgcacatctgtacccacgccttcttcaaagccatactatttatgtgctccgggtccatcatccacaaccttaacaatgaacaagatattcgaaaaataggaggactactcaaaaccatacctctcacttcaacctccctcaccattggcagcctagcattagcaggaatacctttcctcacaggtttctactccaaagaccacatcatcgaaaccgcaaacatatcatacacaaacgcctgagccctatctattactctcatcgctacctccctgacaagcgcctatagcactcgaataattcttctcaccctaacaggtcaacctcgcttccccacccttactaacattaacgaaaataaccccaccctactaaaccccattaaacgcctggcagccggaagcctattcgcaggatttctcattactaacaacatttcccccgcatcccccttccaaacaacaatccccctctacctaaaactcacagccctcgctgtcactttcctaggacttctaacagccctagacctcaactacctaaccaacaaacttaaaataaaatccccactatgcacattttatttctccaacatactcggattctaccctagcatcacacaccgcacaatcccctatctaggccttcttacgagccaaaacctgcccctactcctcctagacctaacctgactagaaaagctattacctaaaacaatttcacagcaccaaatctccacctccatcatcacctcaacccaaaaaggcataattaaactttacttcctctctttcttcttcccactcatcctaaccctactcctaatcacataacctattcccccgagcaatctcaattacaatatatacaccaacaaacaatgttcaaccagtaactactactaatcaacgcccataatcatacaaagcccccgcaccaataggatcctcccgaatcaaccctgacccctctccttcataaattattcagcttcctacactattaaagtttaccacaaccaccaccccatcatactctttcacccacagcaccaatcctacctccatcgctaaccccactaaaacactcaccaagacctcaacccctgacccccatgcctcaggatactcctcaatagccatcgctgtagtatatccaaagacaaccatcattccccctaaataaattaaaaaaactattaaacccatataacctcccccaaaattcagaataataacacacccgaccacaccgctaacaatcaatactaaacccccataaataggagaaggcttagaagaaaaccccacaaaccccattactaaacccacactcaacagaaacaaagcatacatcattattctcgcacggactacaaccacgaccaatgatatgaaaaaccatcgttgtatttcaactacaagaacaccaatgaccccaatacgcaaaactaaccccctaataaaattaattaaccactcattcatcgacctccccaccccatccaacatctccgcatgatgaaacttcggctcactccttggcgcctgcctgatcctccaaatcaccacaggactattcctagccatgcactactcaccagacgcctcaaccgccttttcatcaatcgcccacatcactcgagacgtaaattatggctgaatcatccgctaccttcacgccaatggcgcctcaatattctttatctgcctcttcctacacatcgggcgaggcctatattacggatcatttctctactcagaaacctgaaacatcggcattatcctcctgcttgcaactatagcaacagccttcataggctatgtcctcccgtgaggccaaatatcattctgaggggccacagtaattacaaacttactatccgccatcccatacattgggacagacctagttcaatgaatctgaggaggctactcagtagacagtcccaccctcacacgattctttacctttcacttcatcttgcccttcattattgcagccctagcagcactccacctcctattcttgcacgaaacgggatcaaacaaccccctaggaatcacctcccattccgataaaatcaccttccacccttactacacaatcaaagacgccctcggcttacttctcttccttctctccttaatgacattaacactattctcaccagacctcctaggcgacccagacaattataccctagccaaccccttaaacacccctccccacatcaagcccgaatgatatttcctattcgcctacacaattctccgatccgtccctaacaaactaggaggcgtccttgccctattactatccatcctcatcctagcaataatccccatcctccatatatccaaacaacaaagcataatatttcgcccactaagccaatcactttattgactcctagccgcagacctcctcattctaacctgaatcggaggacaaccagtaagctacccttttaccatcattggacaagtagcatccgtactatacttcacaacaatcctaatcctaataccaactatctccctaattgaaaacaaaatactcaaatgggcctgtccttgtagtataaactaatacaccagtcttgtaaaccggagatgaaaacctttttccaaggacaaatcagagaaaaagtctttaactccaccattagcacccaaagctaagattctaatttaaactattctctgttctttcatggggaagcagatttgggtaccacccaagtattgactcacccatcaacaaccgctatgtatttcgtacattactgccagccaccatgaatattgtacggtgccataaatacttgaccacctgtagtacataaaaacccaatccacatcaaaaccccctccccatgcttacaagcaagtacagcaatcaaccctcaactatcacacatcgactgcaactccaaagccacccctcacccactaggatatcaacaaacctactcacccttaacagtacatagtacataaagccatttaccgtacatagcacattacagtcaaatcccttctcgtccccatggatgacccccctcagataggggtcccttgaccaccatcctccgtgaaatcaatatcccgcacaagagtgctactctcctcgctccgggcccataacacttgggggtagctaaagtgaactggatccgacatctggttcctacttcagggccataaagcctaaatagcccacacgttccccttaaataagacatcacgatg

SEQ ID NO: 135 - DNA, 16568 bp, Homo sapiens mitochondrial
  3106: "n" refers to a nucleotide at position 3107 of the Cambridge Reference Sequence (CRS, Anderson et al. 1981 Nature 290:457-465), later determined to be absent from the human mtDNA sequence according to the revised CRS (rCRS, Andrews et al. 1999 Nature Genetics 23:147); "n" therefore represents a single nucleotide deletion at a position corresponding to nucleotide 3107 of SEQ ID NO:1 as provided herein.
gatcacaggtctatcaccctattaaccactcacgggagctctccatgcatttggtattttcgtctggggggtatgcacgcgatagcattgcgagacgctggagccggagcaccctatgtcgcagtatctgtctttgattcctgcctcatcctattatttatcgcacctacgttcaatattacaggcgaacatacttactaaagtgtgttaattaattaatgcttgtaggacataataataacaattgaatgtctgcacagccgctttccacacagacatcataacaaaaaatttccaccaaaccccccctcccccgccttctggccacagcacttaaacacatctctgccaaaccccaaaaacaaagaaccctaacaccagcctaaccagatttcaaattttatcttttggcggtatgcacttttaacagtcaccccccaactaacacattattttcccctcccactcccatactactaatctcatcaatacaacccccgcccatcctacccagcacacacaccgctgctaaccccataccccgaaccaaccaaaccccaaagacaccccccacagtttatgtagcttacctcctcaaagcaatacactgaaaatgtttagacgggctcacatcaccccataaacaaataggtttggtcctagcctttctattagctcttagtaagattacacatgcaagcatccccgttccagtgagttcaccctctaaatcaccacgatcaaaagggacaagcatcaagcacgcagcaatgcagctcaaaacgcttagcctagccacacccccacgggaaacagcagtgattaacctttagcaataaacgaaagtttaactaagctatactaaccccagggttggtcaatttcgtgccagccaccgcggtcacacgattaacccaagtcaatagaagccggcgtaaagagtgttttagatcaccccctccccaataaagctaaaactcacctgagttgtaaaaaactccagttgacacaaaatagactacgaaagtggctttaacatatctgaacacacaatagctaagacccaaactgggattagataccccactatgcttagccctaaacctcaacagttaaatcaacaaaactgctcgccagaacactacgagccacagcttaaaactcaaaggacctggcggtgcttcatatccctctagaggagcctgttctgtaatcgataaaccccgatcaacctcaccacctcttgctcagcctatataccgccatcttcagcaaaccctgatgaaggctacaaagtaagcgcaagtacccacgtaaagacgttaggtcaaggtgtagcccatgaggtggcaagaaatgggctacattttctaccccagaaaactacgatagcccttatgaaacttaagggtcgaaggtggatttagcagtaaactgagagtagagtgcttagttgaacagggccctgaagcgcgtacacaccgcccgtcaccctcctcaagtatacttcaaaggacatttaactaaaacccctacgcatttatatagaggagacaagtcgtaacatggtaagtgtactggaaagtgcacttggacgaaccagagtgtagcttaacacaaagcacccaacttacacttaggagatttcaacttaacttgaccgctctgagctaaacctagccccaaacccactccaccttactaccagacaaccttagccaaaccatttacccaaataaagtataggcgatagaaattgaaacctggcgcaatagatatagtaccgcaagggaaagatgaaaaattataaccaagcataatatagcaaggactaacccctataccttctgcataatgaattaactagaaataactttgcaaggagagccaaagctaagacccccgaaaccagacgagctacctaagaacagctaaaagagcacacccgtctatgtagcaaaatagtgggaagatttataggtagaggcgacaaacctaccgagcctggtgatagctggttgtccaagatagaatcttagttcaactttaaatttgcccacagaaccctctaaatccccttgtaaatttaactgttagtccaaagaggaacagctctttggacactaggaaaaaaccttgtagagagagtaaaaaatttaacacccatagtaggcctaaaagcagccaccaattaagaaagcgttcaagctcaacacccactacctaaaaaatcccaaacatataactgaactcctcacacccaattggaccaatctatcaccctatagaagaactaatgttagtataagtaacatgaaaacattctcctccgcataagcctgcgtcagattaaaacactgaactgacaattaacagcccaatatctacaatcaaccaacaagtcattattaccctcactgtcaacccaacacaggcatgctcataaggaaaggttaaaaaaagtaaaaggaactcggcaaatcttaccccgcctgtttaccaaaaacatcacctctagcatcaccagtattagaggcaccgcctgcccagtgacacatgtttaacggccgcggtaccctaaccgtgcaaaggtagcataatcacttgttccttaaatagggacctgtatgaatggctccacgagggttcagctgtctcttacttttaaccagtgaaattgacctgcccgtgaagaggcgggcataacacagcaagacgagaagaccctatggagctttaatttattaatgcaaacagtacctaacaaacccacaggtcctaaactaccaaacctgcattaaaaatttcggttggggcgacctcggagcagaacccaacctccgagcagtacatgctaagacttcaccagtcaaagcgaactactatactcaattgatccaataacttgaccaacggaacaagttaccctagggataacagcgcaatcctattctagagtccatatcaacaatagggtttacgacctcgatgttggatcaggacatcccgatggtgcagccgctattaaaggttcgtttgttcaacgattaaagtcctacgtgatctgagttcagaccggagtaatccaggtcggtttctatctacnttcaaattcctccctgtacgaaaggacaagagaaataaggcctacttcacaaagcgccttcccccgtaaatgatatcatctcaacttagtattatacccacacccacccaagaacagggtttgttaagatggcagagcccggtaatcgcataaaacttaaaactttacagtcagaggttcaattcctcttcttaacaacatacccatggccaacctcctactcctcattgtacccattctaatcgcaatggcattcctaatgcttaccgaacgaaaaattctaggctatatacaactacgcaaaggccccaacgttgtaggcccctacgggctactacaacccttcgctgacgccataaaactcttcaccaaagagcccctaaaacccgccacatctaccatcaccctctacatcaccgccccgaccttagctctcaccatcgctcttctactatgaacccccctccccatacccaaccccctggtcaacctcaacctaggcctcctatttattctagccacctctagcctagccgtttactcaatcctctgatcagggtgagcatcaaactcaaactacgccctgatcggcgcactgcgagcagtagcccaaacaatctcatatgaagtcaccctagccatcattctactatcaacattactaataagtggctcctttaacctctccacccttatcacaacacaagaacacctctgattactcctgccatcatgacccttggccataatatgatttatctccacactagcagagaccaaccgaacccccttcgaccttgccgaaggggagtccgaactagtctcaggcttcaacatcgaatacgccgcaggccccttcgccctattcttcatagccgaatacataaacattattataataaacaccctcaccactgcaatcttcctaggaacaacatatgacgcactctcccctgaactctacacaacatattttgtcaccaagaccctacttctaacctccctgttcttatgaattcgaacagcatacccccgattccgctacgaccaactcatacacctcctatgaaaaaacttcctaccactcaccctagcattacttatatgatatgtctccatacccattacaatctccagcattccccctcaaacctaagaaatatgtctgataaaagagttactttgatagagtaaataataggagcttaaacccccttatttctaggactatgagaatcgaacccatccctgagaatccaaaattctccgtgccacctatcacaccccatcctaaagtaaggtcagctaaataagctatcgggcccataccccgaaaatgttggttatacccttcccgtactaattaatcccctggcccaacccgtcatctactctaccatctttgcaggcacactcatcacagcgctaagctcgcactgattttttacctgagtaggcctagaaataaacatgctagcttttattccagttctaaccaaaaaaataaaccctcgttccacagaagctgccatcaagtatttcctcacgcaagcaaccgcatccataatccttctaatagctatcctcttcaacaatatactctccggacaatgaaccataaccaatactaccaatcaatactcatcattaataatcataatggctatagcaataaaactaggaatagccccctttcacttctgagtcccagaggttacccaaggcacccctctgacatccggcctgcttcttctcacatgacaaaaactagcccccatctcaatcatataccaaatctctccctcactaaacgtaagccttctcctcactctctcaatcttatccatcatagcaggcagttgaggtggattaaaccaaacccagctacgcaaaatcctagcatactcctcaattacccacataggatgaataatagcagttctaccgtacaaccctaacataaccattcttaatttaactatttatattatcctaactactaccgcattcctactactcaacttaaactccagcaccacgaccctactactatctcgcacctgaaacaagctaacatgactaacacccttaattccatccaccctcctctccctaggaggcctgcccccgctaaccggctttttgcccaaatgggccattatcgaagaattcacaaaaaacaatagcctcatcatccccaccatcatagccaccatcaccctccttaacctctacttctacctacgcctaatctactccacctcaatcacactactccccatatctaacaacgtaaaaataaaatgacagtttgaacatacaaaacccaccccattcctccccacactcatcgcccttaccacgctactcctacctatctccccttttatactaataatcttatagaaatttaggttaaatacagaccaagagccttcaaagccctcagtaagttgcaatacttaatttctgtaacagctaaggactgcaaaaccccactctgcatcaactgaacgcaaatcagccactttaattaagctaagcccttactagaccaatgggacttaaacccacaaacacttagttaacagctaagcaccctaatcaactggcttcaatctacttctcccgccgccgggaaaaaaggcgggagaagccccggcaggtttgaagctgcttcttcgaatttgcaattcaatatgaaaatcacctcggagctggtaaaaagaggcctaacccctgtctttagatttacagtccaatgcttcactcagccattttacctcacccccactgatgttcgccgaccgttgactattctctacaaaccacaaagacattggaacactatacctattattcggcgcatgagctggagtcctaggcacagctctaagcctccttattcgagccgagctgggccagccaggcaaccttctaggtaacgaccacatctacaacgttatcgtcacagcccatgcatttgtaataatcttcttcatagtaatacccatcataatcggaggctttggcaactgactagttcccctaataatcggtgcccccgatatggcgtttccccgcataaacaacataagcttctgactcttacctccctctctcctactcctgctcgcatctgctatagtggaggccggagcaggaacaggttgaacagtctaccctcccttagcagggaactactcccaccctggagcctccgtagacctaaccatcttctccttacacctagcaggtgtctcctctatcttaggggccatcaatttcatcacaacaattatcaatataaaaccccctgccataacccaataccaaacgcccctcttcgtctgatccgtcctaatcacagcagtcctacttctcctatctctcccagtcctagctgctggcatcactatactactaacagaccgcaacctcaacaccaccttcttcgaccccgccggaggaggagaccccattctataccaacacctattctgatttttcggtcaccctgaagtttatattcttatcctaccaggcttcggaataatctcccatattgtaacttactactccggaaaaaaagaaccatttggatacataggtatggtctgagctatgatatcaattggcttcctagggtttatcgtgtgagcacaccatatatttacagtaggaatagacgtagacacacgagcatatttcacctccgctaccataatcatcgctatccccaccggcgtcaaagtatttagctgactcgccacactccacggaagcaatatgaaatgatctgctgcagtgctctgagccctaggattcatctttcttttcaccgtaggtggcctgactggcattgtattagcaaactcatcactagacatcgtactacacgacacgtactacgttgtagcccacttccactatgtcctatcaataggagctgtatttgccatcataggaggcttcattcactgatttcccctattctcaggctacaccctagaccaaacctacgccaaaatccatttcactatcatattcatcggcgtaaatctaactttcttcccacaacactttctcggcctatccggaatgccccgacgttactcggactaccccgatgcatacaccacatgaaacatcctatcatctgtaggctcattcatttctctaacagcagtaatattaataattttcatgatttgagaagccttcgcttcgaagcgaaaagtcctaatagtagaagaaccctccataaacctggagtgactatatggatgccccccaccctaccacacattcgaagaacccgtatacataaaatctagacaaaaaaggaaggaatcgaaccccccaaagctggtttcaagccaaccccatggcctccatgactttttcaaaaaggtattagaaaaaccatttcataactttgtcaaagttaaattataggctaaatcctatatatcttaatggcacatgcagcgcaagtaggtctacaagacgctacttcccctatcatagaagagcttatcacctttcatgatcacgccctcataatcattttccttatctgcttcctagtcctgtatgcccttttcctaacactcacaacaaaactaactaatactaacatctcagacgctcaggaaatagaaaccgtctgaactatcctgcccgccatcatcctagtcctcatcgccctcccatccctacgcatcctttacataacagacgaggtcaacgatccctcccttaccatcaaatcaattggccaccaatggtactgaacctacgagtacaccgactacggcggactaatcttcaactcctacatacttcccccattattcctagaaccaggcgacctgcgactccttgacgttgacaatcgagtagtactcccgattgaagcccccattcgtataataattacatcacaagacgtcttgcactcatgagctgtccccacattaggcttaaaaacagatgcaattcccggacgtctaaaccaaaccactttcaccgctacacgaccgggggtatactacggtcaatgctctgaaatctgtggagcaaaccacagtttcatgcccatcgtcctagaattaattcccctaaaaatctttgaaatagggcccgtatttaccctatagcaccccctctaccccctctagagcccactgtaaagctaacttagcattaaccttttaagttaaagattaagagaaccaacacctctttacagtgaaatgccccaactaaatactaccgtatggcccaccataattacccccatactccttacactattcctcatcacccaactaaaaatattaaacacaaactaccacctacctccctcaccaaagcccataaaaataaaaaattataacaaaccctgagaaccaaaatgaacgaaaatctgttcgcttcattcattgcccccacaatcctaggcctacccgccgcagtactgatcattctatttccccctctattgatccccacctccaaatatctcatcaacaaccgactaatcaccacccaacaatgactaatcaaactaacctcaaaacaaatgataaccatacacaacactaaaggacgaacctgatctcttatactagtatccttaatcatttttattgccacaactaacctcctcggactcctgcctcactcatttacaccaaccacccaactatctataaacctagccatggccatccccttatgagcgggcgcagtgattataggctttcgctctaagattaaaaatgccctagcccacttcttaccacaaggcacacctacaccccttatccccatactagttattatcgaaaccatcagcctactcattcaaccaatagccctggccgtacgcctaaccgctaacattactgcaggccacctactcatgcacctaattggaagcgccaccctagcaatatcaaccattaaccttccctctacacttatcatcttcacaattctaattctactaactatcctagaaatcgctgtcgccttaatccaagcctacgttttcacacttctagtaagcctctacctgcacgacaacacataatgacccaccaatcacatgcctatcatatagtaaaacccagcccatgacccctaacaggggccctctcagccctcctaatgacctccggcctagccatgtgatttcacttccactccataacgctcctcatactaggcctactaaccaacacactaaccatataccaatgatggcgcgatgtaacacgagaaagcacataccaaggccaccacacaccacctgtccaaaaaggccttcgatacgggataatcctatttattacctcagaagtttttttcttcgcaggatttttctgagccttttaccactccagcctagcccctaccccccaattaggagggcactggcccccaacaggcatcaccccgctaaatcccctagaagtcccactcctaaacacatccgtattactcgcatcaggagtatcaatcacctgagctcaccatagtctaatagaaaacaaccgaaaccaaataattcaagcactgcttattacaattttactgggtctctattttaccctcctacaagcctcagagtacttcgagtctcccttcaccatttccgacggcatctacggctcaacattttttgtagccacaggcttccacggacttcacgtcattattggctcaactttcctcactatctgcttcatccgccaactaatatttcactttacatccaaacatcactttggcttcgaagccgccgcctgatactggcattttgtagatgtggtttgactatttctgtatgtctccatctattgatgagggtcttactcttttagtataaatagtaccgttaacttccaattaactagttttgacaacattcaaaaaagagtaataaacttcgccttaattttaataatcaacaccctcctagccttactactaataattattacattttgactaccacaactcaacggctacatagaaaaatccaccccttacgagtgcggcttcgaccctatatcccccgcccgcgtccctttctccataaaattcttcttagtagctattaccttcttattatttgatctagaaattgccctccttttacccctaccatgagccctacaaacaactaacctgccactaatagttatgtcatccctcttattaatcatcatcctagccctaagtctggcctatgagtgactacaaaaaggattagactgaaccgaattggtatatagtttaaacaaaacgaatgatttcgactcattaaattatgataatcatatttaccaaatgcccctcatttacataaatattatactagcatttaccatctcacttctaggaatactagtatatcgctcacacctcatatcctccctactatgcctagaaggaataatactatcgctgttcattatagctactctcataaccctcaacacccactccctcttagccaatattgtgcctattgccatactagtctttgccgcctgcgaagcagcggtgggcctagccctactagtctcaatctccaacacatatggcctagactacgtacataacctaaacctactccaatgctaaaactaatcgtcccaacaattatattactaccactgacatgactttccaaaaaacacataatttgaatcaacacaaccacccacagcctaattattagcatcatccctctactattttttaaccaaatcaacaacaacctatttagctgttccccaaccttttcctccgaccccctaacaacccccctcctaatactaactacctgactcctacccctcacaatcatggcaagccaacgccacttatccagtgaaccactatcacgaaaaaaactctacctctctatactaatctccctacaaatctccttaattataacattcacagccacagaactaatcatattttatatcttcttcgaaaccacacttatccccaccttggctatcatcacccgatgaggcaaccagccagaacgcctgaacgcaggcacatacttcctattctacaccctagtaggctcccttcccctactcatcgcactaatttacactcacaacaccctaggctcactaaacattctactactcactctcactgcccaagaactatcaaactcctgagccaacaacttaatatgactagcttacacaatagcttttatagtaaagatacctctttacggactccacttatgactccctaaagcccatgtcgaagcccccatcgctgggtcaatagtacttgccgcagtactcttaaaactaggcggctatggtataatacgcctcacactcattctcaaccccctgacaaaacacatagcctaccccttccttgtactatccctatgaggcataattataacaagctccatctgcctacgacaaacagacctaaaatcgctcattgcatactcttcaatcagccacatagccctcgtagtaacagccattctcatccaaaccccctgaagcttcaccggcgcagtcattctcataatcgcccacgggcttacatcctcattactattctgcctagcaaactcaaactacgaacgcactcacagtcgcatcataatcctctctcaaggacttcaaactctactcccactaatagctttttgatgacttctagcaagcctcgctaacctcgccttaccccccactattaacctactgggagaactctctgtgctagtaaccacgttctcctgatcaaatatcactctcctacttacaggactcaacatactagtcacagccctatactccctctacatatttaccacaacacaatggggctcactcacccaccacattaacaacataaaaccctcattcacacgagaaaacaccctcatgttcatacacctatcccccattctcctcctatccctcaaccccgacatcattaccgggttttcctcttgtaaatatagtttaaccaaaacatcagattgtgaatctgacaacagaggcttacgaccccttatttaccgagaaagctcacaagaactgctaactcatgcccccatgtctaacaacatggctttctcaacttttaaaggataacagctatccattggtcttaggccccaaaaattttggtgcaactccaaataaaagtaataaccatgcacactactataaccaccctaaccctgacttccctaattccccccatccttaccaccctcgttaaccctaacaaaaaaaactcatacccccattatgtaaaatccattgtcgcatccacctttattatcagtctcttccccacaacaatattcatgtgcctagaccaagaagttattatctcgaactgacactgagccacaacccaaacaacccagctctccctaagcttcaaactagactacttctccataatattcatccctgtagcattgttcgttacatggtccatcatagaattctcactgtgatatataaactcagacccaaacattaatcagttcttcaaatatctactcatcttcctaattaccatactaatcttagttaccgctaacaacctattccaactgttcatcggctgagagggcgtaggaattatatccttcttgctcatcagttgatgatacgcccgagcagatgccaacacagcagccattcaagcaatcctatacaaccgtatcggcgatatcggtttcatcctcgccttagcatgatttatcctacactccaactcatgagacccacaacaaatagcccttctaaacgctaatccaagcctcaccccactactaggcctcctcctagcagcagcaggcaaatcagcccaattaggtctccacccctgactcccctcagccatagaaggccccaccccagtctcagccctactccactcaagcactatagttgtagcaggaatcttcttactcatccgcttccaccccctagcagaaaatagcccactaatccaaactctaacactatgcttaggcgctatcaccactctgttcgcagcagtctgcgcccttacacaaaatgacatcaaaaaaatcgtagccttctccacttcaagtcaactaggactcataatagttacaatcggcatcaaccaaccacacctagcattcctgcacatctgtacccacgccttcttcaaagccatactatttatgtgctccgggtccatcatccacaaccttaacaatgaacaagatattcgaaaaataggaggactactcaaaaccatacctctcacttcaacctccctcaccattggcagcctagcattagcaggaatacctttcctcacaggtttctactccaaagaccacatcatcgaaaccgcaaacatatcatacacaaacgcctgagccctatctattactctcatcgctacctccctgacaagcgcctatagcactcgaataattcttctcaccctaacaggtcaacctcgcttccccacccttactaacattaacgaaaataaccccaccctactaaaccccattaaacgcctggcagccggaagcctattcgcaggatttctcattactaacaacatttcccccgcatcccccttccaaacaacaatccccctctacctaaaactcacagccctcgctgtcactttcctaggacttctaacagccctagacctcaactacctaaccaacaaacttaaaataaaatccccactatgcacattttatttctccaacatactcggattctaccctagcatcacacaccgcacaatcccctatctaggccttcttacgagccaaaacctgcccctactcctcctagacctaacctgactagaaaagctattacctaaaacaatttcacagcaccaaatctccacctccatcatcacctcaacccaaaaaggcataattaaactttacttcctctctttcttcttcccactcatcctaaccctactcctaatcacataacctattcccccgagcaatctcaattacaatatatacaccaacaaacaatgttcaaccagtaactactactaatcaacgcccataatcatacaaagcccccgcaccaataggatcctcccgaatcaaccctgacccctctccttcataaattattcagcttcctacactattaaagtttaccacaaccaccaccccatcatactctttcacccacagtaccaatcctacctccatcgctaaccccactaaaacactcaccaagacctcaacccctgacccccatgcctcaggatactcctcaatagccatcgctgtagtatatccaaagacaaccatcattccccctaaataaattaaaaaaactattaaacccatataacctcccccaaaattcagaataataacacacccgaccacaccgctaacaatcaatgctaaacccccataaataggagaaggcttagaagaaaaccccacaaaccccattactaaacccacactcaacagaaacaaagcatacatcattattctcgcacggactacaaccacgaccaatgatatgaaaaaccatcgttgtatttcaactacaagaacaccaatgaccccaatacgcaaaactaaccccctaataaaattaattaaccactcattcatcgacctccccaccccatccaacatctccgcatgatgaaacttcggctcactccttggcgcctgcctgatcctccaaatcaccacaggactattcctagccatgcactactcaccagacgcctcaaccgccttttcatcaatcgcccacatcactcgagacgtaaattatggctgaatcatccgctaccttcacgccaatggcgcctcaatattctttatctgcctcttcctacacatcgggcgaggcctatattacggatcatttctctactcagaaacctgaaacatcggcattatcctcctgcttgcaactatagcaacagccttcataggctatgtcctcccgtgaggccaaatatcattctgaggggccacagtaattacaaacttactatccgccatcccatacattgggacagacctagttcaatgaatctgaggaggctactcagtagacagtcccaccctcacacgattctttacctttcacttcatcttgcccttcattattgcagccctagcagcactccacctcctattcttgcacgaaacgggatcaaacaaccccctaggaatcacctcccattccgataaaatcaccttccacccttactacacaatcaaagacgccctcggcttacttctcttccttctctccttaatgacattaacactattctcaccagacctcctaggcgacccagacaattataccctagccaaccccttaaacacccctccccacatcaagcccgaatgatatttcctattcgcctacacaattctccgatccgtccctaacaaactaggaggcgtccttgccctattactatccatcctcatcctagcaataatccccatcctccatatatccaaacaacaaagcataatatttcgcccactaagccaatcactttattgactcctagccgcagacctcctcattctaacctgaatcggaggacaaccagtaagctacccttttaccatcattggacaagtagcatccgtactatacttcacaacaatcctaatcctaataccaactatctccctaattgaaaacaaaatactcaaatgggcctgtccttgtagtataaactaatacaccagtcttgtaaaccggagatgaaaacctttttccaaggacaaatcagagaaaaagtctttaactccaccattagcacccaaagctaagattctaatttaaactattctctgttctttcatggggaagcagatttgggtaccacccaagtattgactcacccatcaacaaccgctatgtatctcgtacattactgccagccaccatgaatattgtacggtaccataaatacttgaccacctgtagtacataaaaacccaatccacatcaaaaccccctccccatgcttacaagcaagtacagcaatcaaccctcaactatcacacatcaactgcaactccaaagccacccctcacccactaggataccaacaaacctacccacccttaacagtacatagcacataaagccatttaccgtacatagcacattacagtcaaatcccttctcgtccccatggatgacccccctcagataggggtcccttgaccaccatcctccgtgaaatcaatatcccgcacaagagtgctactctcctcgctccgggcccataacacttgggggtagctaaagtgaactgtatccgacatctggttcctacttcagggtcataaagcctaaatagcccacacgttccccttaaataagacatcacgatg

SEQ ID NO: 136 - DNA, 16571 bp, Homo sapiens mitochondrial
  3109: "n" refers to a nucleotide at position 3107 of the Cambridge Reference Sequence (CRS, Anderson et al. 1981 Nature 290:457-465), later determined to be absent from the human mtDNA sequence according to the revised CRS (rCRS, Andrews et al. 1999 Nature Genetics 23:147); "n" therefore represents a single nucleotide deletion at a position corresponding to nucleotide 3107 of SEQ ID NO:1 as provided herein.
gatcacaggtctatcaccctattaaccactcacgggagctctccatgcatttggtattttcgtctggggggtatgcacgcgatagcattgcgagacgctggagccggagcaccctatgtcgcagtatctgtctttgattcctgcctcatcctattatttatcgcacctacgttcaatattacaggcgaacatacttactaaagtgtgttaattaattaatgcttgtaggacataataacaacaattgaatgtctgcacagccgctttccacacagacatcataacaaaaaatttccaccaaaccccccctcccccccgcttctggccacagcacttaaacacatctctgccaaaccccaaaaacaaagaaccctaacaccagcctaaccagatttcaaattttatcttttggcggtatgcacttttaacagtcaccccccaactaacacattattttcccctcccactcccatactactaatctcatcaatacaacccccgcccatcctacccagcacacacacaccgctgctaaccccataccccgaaccaaccaaaccccaaagacaccccccacagtttatgtagcttacctcctcaaagcaatacactgaaaatgtttagacgggctcacatcaccccataaacaaataggtttggtcctagcctttctattagctcttagtaagattacacatgcaagcatccccgttccagtgagttcaccctctaaatcaccacgatcaaaagggacaagcatcaagcacgcagcaatgcagctcaaaacgcttagcctagccacacccccacgggaaacagcagtgattaacctttagcaataaacgaaagtttaactaagctatactaaccccagggttggtcaatttcgtgccagccaccgcggtcacacgattaacccaagtcaatagaagccggcgtaaagagtgttttagatcaccccctccccaataaagctaaaactcacctgagttgtaaaaaactccagttgacacaaaatagactacgaaagtggctttaacatatctgaacacacaatagctaagacccaaactgggattagataccccactatgcttagccctaaacctcaacagttaaatcaacaaaactgctcgccagaacactacgagccacagcttaaaactcaaaggacctggcggtgcttcatatccctctagaggagcctgttctgtaatcgataaaccccgatcaacctcaccacctcttgctcagcctatataccgccatcttcagcaaaccctgatgaaggctacaaagtaagcgcaagtacccacgtaaagacgttaggtcaaggtgtagcccatgaggtggcaagaaatgggctacattttctaccccagaaaactacgatagcccttatgaaacttaagggtcgaaggtggatttagcagtaaactgagagtagagtgcttagttgaacagggccctgaagcgcgtacacaccgcccgtcaccctcctcaagtatacttcaaaggacatttaactaaaacccctacgcatttatatagaggagacaagtcgtaacatggtaagtgtactggaaagtgcacttggacgaaccagagtgtagcttaacacaaagcacccaacttacacttaggagatttcaacttaacttgaccgctctgagctaaacctagccccaaacccactccaccttactaccagacaaccttagccaaaccatttacccaaataaagtataggcgatagaaattgaaacctggcgcaatagatatagtaccgcaagggaaagatgaaaaattataaccaagcataatatagcaaggactaacccctataccttctgcataatgaattaactagaaataactttgcaaggagagccaaagctaagacccccgaaaccagacgagctacctaagaacagctaaaagagcacacccgtctatgtagcaaaatagtgggaagatttataggtagaggcgacaaacctaccgagcctggtgatagctggttgtccaagatagaatcttagttcaactttaaatttgcccacagaaccctctaaatccccttgtaaatttaactgttagtccaaagaggaacagctctttggacactaggaaaaaaccttgtagagagagtaaaaaatttaacacccatagtaggcctaaaagcagccaccaattaagaaagcgttcaagctcaacacccactacctaaaaaatcccaaacatataactgaactcctcacacccaattggaccaatctatcaccctatagaagaactaatgttagtataagtaacatgaaaacattctcctccgcataagcctgcgtcagattaaaacactgaactgacaattaacagcccaatatctacaatcaaccaacaagtcattattaccctcactgtcaacccaacacaggcatgctcataaggaaaggttaaaaaaagtaaaaggaactcggcaaatcttaccccgcctgtttaccaaaaacatcacctctagcatcaccagtattagaggcaccgcctgcccagtgacacatgtttaacggccgcggtaccctaaccgtgcaaaggtagcataatcacttgttccttaaatagggacctgtatgaatggctccacgagggttcagctgtctcttacttttaaccagtgaaattgacctgcccgtgaagaggcgggcataacacagcaagacgagaagaccctatggagctttaatttattaatgcaaacagtacctaacaaacccacaggtcctaaactaccaaacctgcattaaaaatttcggttggggcgacctcggagcagaacccaacctccgagcagtacatgctaagacttcaccagtcaaagcgaactactatactcaattgatccaataacttgaccaacggaacaagttaccctagggataacagcgcaatcctattctagagtccatatcaacaatagggtttacgacctcgatgttggatcaggacatcccgatggtgcagccgctattaaaggttcgtttgttcaacgattaaagtcctacgtgatctgagttcagaccggagtaatccaggtcggtttctatctacnttcaaattcctccctgtacgaaaggacaagagaaataaggcctacttcacaaagcgccttcccccgtaaatgatatcatctcaacttagtattatacccacacccacccaagaacagggtttgttaagatggcagagcccggtaatcgcataaaacttaaaactttacagtcagaggttcaattcctcttcttaacaacatacccatggccaacctcctactcctcattgtacccattctaatcgcaatggcattcctaatgcttaccgaacgaaaaattctaggctatatacaactacgcaaaggccccaacgttgtaggcccctacgggctactacaacccttcgctgacgccataaaactcttcaccaaagagcccctaaaacccgccacatctaccatcaccctctacatcaccgccccgaccttagctctcaccatcgctcttctactatgaacccccctccccatacccaaccccctggtcaacctcaacctaggcctcctatttattctagccacctctagcctagccgtttactcaatcctctgatcagggtgagcatcaaactcaaactacgccctgatcggcgcactgcgagcagtagcccaaacaatctcatatgaagtcaccctagccatcattctactatcaacattactaataagtggctcctttaacctctccacccttatcacaacacaagaacacctctgattactcctgccatcatgacccttggccataatatgatttatctccacactagcagagaccaaccgaacccccttcgaccttgccgaaggagagtccgaactagtctcaggcttcaacatcgaatacgccgcaggccccttcgccctattcttcatagccgaatacacaaacattattataataaacaccctcaccactacaatcttcctaggaacaacatatgacgcactctcccctgaactctacacaacatattttgtcaccaagaccctacttctaacctccctgttcttatgaattcgaacagcatacccccgattccgctacgaccaactcatacacctcctatgaaaaaacttcctaccactcaccctagcattacttatatgatatgtctccatacccattacaatctccagcattccccctcaaacctaagaaatatgtctgataaaagagttactttgatagagtaaataataggagcttaaacccccttatttctaggactatgagaatcgaacccatccctgagaatccaaaattctccgtgccacctatcacaccccatcctaaagtaaggtcagctaaataagctatcgggcccataccccgaaaatgttggttatacccttcccgtactaattaatcccctggcccaacccgtcatctactctaccatctttgcaggcacactcatcacagcgctaagctcgcactgattttttacctgagtaggcctagaaataaacatgctagcttttattccagttctaaccaaaaaaataaaccctcgttccacagaagctgccatcaagtatttcctcacgcaagcaaccgcatccataatccttctaatagctatcctcttcaacaatatactctccggacaatgaaccatgaccaatactaccaatcaatactcatcattaataatcataatggctatagcaataaaactaggaatagccccctttcacttctgagtcccagaggttacccaaggcacccctctgacatccggcctgcttcttctcacatgacaaaaactagcccccatctcaatcatataccaaatctctccctcactaaacgtaagccttctcctcactctctcaatcttatccatcatagcaggcagttgaggtggattaaaccaaacccagctacgcaaaatcttagcatactcctcaattacccacataggatgaataatagcagttctaccgtacaaccctaacataaccattcttaatttaactatttatattatcctaactactaccgcattcctactactcaacttaaactccagcaccacgaccctactactatctcgcacctgaaacaagctaacatgactaacacccttaattccatccaccctcctctccctaggaggcctgcccccgctaaccggctttttgcccaaatgggccattatcgaagaattcacaaaaaacaatagcctcatcatccccaccatcatagccaccatcaccctccttaacctctacttctacctacgcctaatctactccacctcaatcacactactccccatatctaacaacgtaaaaataaaatgacagtttgaacatacaaaacccaccccattcctccccacactcatcgcccttaccacgctactcctacctatctccccttttatactaataatcttatagaaatttaggttaaatacagaccaagagccttcaaagccctcagtaagttgcaatacttaatttctgtaacagctaaggactgcaaaaccccactctgcatcaactgaacgcaaatcagccactttaattaagctaagcccttactagaccaatgggacttaaacccacaaacacttagttaacagctaagcaccctaatcaactggcttcaatctacttctcccgccgccgggaaaaaaggcgggagaagccccggcaggtttgaagctgcttcttcgaatttgcaattcaatatgaaaatcacctcggagctggtaaaaagaggcctaacccctgtctttagatttacagtccaatgcttcactcagccattttacctcacccccactgatgttcgccgaccgttgactattctctacaaaccacaaagacattggaacactatacctattattcggcgcatgagctggagtcctaggcacagctctaagcctccttattcgagccgagctgggccagccaggcaaccttctaggtaacgaccacatctacaacgttatcgtcacagcccatgcatttgtaataatcttcttcatagtaatacccatcataatcggaggctttggcaactgactagttcccctaataatcggtgcccccgatatggcgtttccccgcataaacaacataagcttctgactcttacctccctctctcctactcctgctcgcatctgctatagtggaggccggagcaggaacaggttgaacagtctaccctcccttagcagggaactactcccaccctggagcctccgtagacctaaccatcttctccttacacctagcaggtgtctcctctatcttaggggccatcaatttcatcacaacaattatcaatataaaaccccctgccataacccaataccaaacgcccctcttcgtctgatccgtcctaatcacagcagtcctacttctcctatctctcccagtcctagctgctggcatcactatactactaacagaccgcaacctcaacaccaccttcttcgaccccgccggaggaggagaccccattctataccaacacctattctgatttttcggtcaccctgaagtttatattcttatcctaccaggcttcggaataatctcccatattgtaacttactactccggaaaaaaagaaccatttggatacataggtatggtctgagctatgatatcaattggcttcctagggtttatcgtgtgagcacaccatatatttacagtaggaatagacgtagacacacgagcatatttcacctccgctaccataatcatcgctatccccaccggcgtcaaagtatttagctgactcgccacactccacggaagcaatatgaaatgatctgctgcagtgctctgagccctaggattcatctttcttttcaccgtaggtggcctgactggcattgtattagcaaactcatcactagacatcgtactacacgacacgtactacgttgtagcccacttccactatgtcctatcaataggagctgtatttgccatcataggaggcttcattcactgatttcccctattctcaggctacaccctagaccaaacctacgccaaaatccatttcactatcatattcatcggcgtaaatctaactttcttcccacaacactttctcggcctatccggaatgccccgacgttactcggactaccccgatgcatacaccacatgaaacatcctatcatctgtaggctcattcatttctctaacagcagtaatattaataattttcatgatttgagaagccttcgcttcgaagcgaaaagtcctaatagtagaagaaccctccataaacctggagtgactatatggatgccccccaccctaccacacattcgaagaacccgtatacataaaatctagacaaaaaaggaaggaatcgaaccccccaaagctggtttcaagccaaccccatggcctccatgactttttcaaaaaggtattagaaaaaccatttcataactttgtcaaagttaaattataggctaaatcctatatatcttaatggcacatgcagcgcaagtaggtctacaagacgctacttcccctatcatagaagagcttatcacctttcatgatcacgccctcataatcattttccttatctgcttcctagtcctgtatgcccttttcctaacactcacaacaaaactaactaatactaacatctcagacgctcaggaaatagaaaccgtctgaactatcctgcccgccatcatcctagtcctcatcgccctcccatccctacgcatcctttacataacagacgaggtcaacgatccctcccttaccatcaaatcaattggccaccaatggtactgaacctacgagtacaccgactacggcggactaatcttcaactcctacatacttcccccattattcctagaaccaggcgacctgcgactccttgacgttgacaatcgagtagtactcccgattgaagcccccattcgtataataattacatcacaagacgtcttgcactcatgagctgtccccacattaggcttaaaaacagatgcaattcccggacgtctaaaccaaaccactttcaccgctacacgaccgggggtatactacggtcaatgctctgaaatctgtggagcaaaccacagtttcatgcccatcgtcctagaattaattcccctaaaaatctttgaaatagggcccgtatttaccctatagcaccccctctaccccctctagagcccactgtaaagctaacttagcattaaccttttaagttaaagattaagagaaccaacacctctttacagtgaaatgccccaactaaatactaccgtatggcccaccataattacccccatactccttacactattcctcatcacccaactaaaaatattaaacacaaactaccacctacctccctcaccaaagcccataaaaataaaaaattataacaaaccctgagaaccaaaatgaacgaaaatctgttcgcttcattcattgcccccacaatcctaggcctacccgccgcagtactgatcattctatttccccctctattgatccccacctccaaatatctcatcaacaaccgactaatcaccacccaacaatgactaatcaaactaacctcaaaacaaatgataaccatacacaacactaaaggacgaacctgatctcttatactagtatccttaatcatttttattgccacaactaacctcctcggactcctgcctcactcatttacaccaaccacccaactatctataaacctagccatggccatccccttatgagcgggcgcagtgattataggctttcgctctaagattaaaaatgccctagcccacttcttaccacaaggcacacctacaccccttatccccatactagttattatcgaaaccatcagcctactcattcaaccaatagccctggccgtacgcctaaccgctaacattactgcaggccacctactcatgcacctaattggaagcgccaccctagcaatatcaaccattaaccttccctctacacttatcatcttcacaattctaattctactgactatcctagaaatcgctgtcgccttaatccaagcctacgttttcacacttctagtaagcctctacctgcacgacaacacataatgacccaccaatcacatgcctatcatatagtaaaacccagcccatgacccctaacaggggccctctcagccctcctaatgacctccggcctagccatgtgatttcacttccactccataacgctcctcatactaggcctactaaccaacacactaaccatataccaatgatgacgcgatgtaacacgagaaagcacataccaaggccaccacacaccacctgtccaaaaaggccttcgatacgggataatcctatttattacctcagaagtttttttcttcgcaggatttttctgagccttttaccactccagcctagcccctaccccccaattaggagggcactggcccccaacaggcatcaccccgctaaatcccctagaagtcccactcctaaacacatccgtattactcgcatcaggagtatcaatcacctgagctcaccatagtctaatagaaaacaaccgaaaccaaataattcaagcactgcttattacaattttactgggtctctattttaccctcctacaagcctcagagtacttcgagtctcccttcaccatttccgacggcatctacggctcaacattttttgtagccacaggcttccacggacttcacgtcattattggctcaactttcctcactatctgcttcatccgccaactaatatttcactttacatccaaacatcactttggcttcgaagccgccgcctgatactggcattttgtagatgtggtttgactatttctgtatgtctccatctattgatgagggtcttactcttttagtataaatagtaccgttaacttccaattaactagttttgacaacattcaaaaaagagtaataaacttcgccttaattttaataatcaacaccctcctagccttactactaataattattacattttgactaccacaactcaacggctacatagaaaaatccaccccttacgagtgcggcttcgaccctatatcccccgcccgcgtccctttctccataaaattcttcttagtagctattaccttcttattatttgatctagaaattgccctccttttacccctaccatgagccctacaaacaactaacctgccactaatagttatgtcatccctcttattaatcatcatcctagccctaagtctggcctatgagtgactacaaaaaggattagactgaaccgaattggtatatagtttaaacaaaacgaatgatttcgactcattaaattatgataatcatatttaccaaatgcccctcatttacataaatattatactagcatttaccatctcacttctaggaatactagtatatcgctcacacctcatatcctccctactatgcctagaaggaataatactatcgctgttcattatagctactctcataaccctcaacacccactccctcttagccaatattgtgcctattgccatactagtctttgccgcctgcgaagcagcggtgggcctagccctactagtctcaatctccaacacatatggcctagactacgtacataacctaaacctactccaatgctaaaactaatcgtcccaacaattatattactaccactgacatgactttccaaaaaacacataatttgaatcaacacaaccacccacagcctaattattagcatcatccctctactattttttaaccaaatcaacaacaacctatttagctgttccccaaccttttcctccgaccccctaacaacccccctcctaatactaactacctgactcctacccctcacaatcatggcaagccaacgccacttatccagtgaaccactatcacgaaaaaaactctacctctctatactaatctccctacaaatctccttaattataacattcacagccacagaactaatcatattttatatcttcttcgaaaccacacttatccccaccttggctatcatcacccgatgaggcaaccagccagaacgcctgaacgcaggcacatacttcctattctacaccctagtaggctcccttcccctactcatcgcactaacttacactcacaacaccctaggctcactaaacattctactactcactctcactgcccaagaactatcaaactcctgagccaacaacttaatatgactagcttacacaatagcttttatagtaaagatacctctttacggactccacttatgactccctaaagcccatgtcgaagcccccatcgctgggtcaatagtacttgccgcagtactcttaaaactaggcggctatggtataatacgcctcacactcattctcaaccccctgacaaaacacatagcctaccccttccttgtactatccctatgaggcataattataacaagctccatctgcctacgacaaacagacctaaaatcgctcattgcatactcttcaatcagccacatagccctcgtagtaacagccattctcatccaaaccccctgaagcttcaccggcgcagtcattctcataatcgcccacgggcttacatcctcattactattctgcctagcaaactcaaactacgaacgcactcacagtcgcatcataatcctctctcaaggacttcaaactctactcccactaatagctttttgatgacttctagcaagcctcgctaacctcgccttaccccccactattaacctactgggagaactctctgtgctagtaaccacgttctcctgatcaaatatcactctcctacttacaggactcaacatactagtcacagccctatactccctctacatatttaccacaacacaatggggctcactcacccaccacattaacaacataaaaccctcattcacacgagaaaacaccctcatgttcatacacctatcccccattctcctcctatccctcaaccccgacatcattaccgggttttcctcttgtaaatatagtttaaccaaaacatcagattgtgaatctgacaacagaggcttacgaccccttatttaccgagaaagctcacaagaactgctaactcatgcccccatgtctaacaacatggctttctcaacttttaaaggataacagctatccattggtcttaggccccaaaaattttggtgcaactccaaataaaagtaataaccatgcacactactataaccaccctaaccctgacttccctaattccccccatccttaccaccctcgttaaccctaacaaaaaaaactcatacccccattatgtaaaatccattgtcgcatccacctttattatcagtctcttccccacaacaatattcatgtgcctagaccaagaagttattatctcgaactgacactgagccacaacccaaacaacccagctctccctaagcttcaaactagactacttctccataatattcatccctgtagcattgttcgttacatggtccatcatagaattctcactgtgatatataaactcagacccaaacattaatcagttcttcaaatatctactcatcttcctaattaccatactaatcttagttaccgctaacaacctattccaactgttcatcggctgagagggcgtaggaattatatccttcttgctcatcagttgatgatacgcccgagcagatgccaacacagcagccattcaagcaatcctatacaaccgtatcggcgatatcggtttcatcctcgccttagcatgatttatcctacactccaactcatgagacccacaacaaatagcccttctaaacgctaatccaagcctcaccccactactaggcctcctcctagcagcagcaggcaaatcagcccaattaggtctccacccctgactcccctcagccatagaaggccccaccccagtctcagccctactccactcaagcactatagttgtagcaggaatcttcttactcatccgcttccaccccctagcagaaaatagcccactaatccaaactctaacactatgcttaggcgctatcaccactctgttcgcagcagtctgcgcccttacacaaaatgacatcaaaaaaatcgtagccttctccacttcaagtcaactaggactcataatagttacaatcggcatcaaccaaccacacctagcattcctgcacatctgtacccacgccttcttcaaagccatactatttatgtgctccgggtccatcatccacaaccttaacaatgaacaagatattcgaaaaataggaggactactcaaaaccatacctctcacttcaacctccctcaccattggcagcctagcattagcaggaatacctttcctcacaggtttctactccaaagaccacatcatcgaaaccgcaaacatatcatacacaaacgcctgagccctatctattactctcatcgctacctccctgacaagcgcctatagcactcgaataattcttctcaccctaacaggtcaacctcgcttccccacccttactaacattaacgaaaataaccccaccctactaaaccccattaaacgcctggcagccggaagcctattcgcaggatttctcattactaacaacatttcccccgcatcccccttccaaacaacaatccccctctacctaaaactcacagccctcgctgtcactttcctaggacttctaacagccctagacctcaactacctaaccaacaaacttaaaataaaatccccactatgcacattttatttctccaacatactcggattctaccctagcatcacacaccgcacaatcccctatctaggccttcttacgagccaaaacctgcccctactcctcctagacctaacctgactagaaaagctattacctaaaacaatttcacagcaccaaatctccacctccatcatcacctcaacccaaaaaggcataattaaactttacttcctctctttcttcttcccactcatcctaaccctactcctaatcacataacctattcccccgagcaatctcaattacaatatatacaccaacaaacaatgttcaaccagtaactactactaatcaacgcccataatcatacaaagcccccgcaccaataggatcctcccgaatcaaccctgacccctctccttcataaattattcagcttcctacactattaaagtttaccacaaccaccaccccatcatactctttcacccacagcaccaatcctacctccatcgctaaccccactaaaacactcaccaagacctcaacccctgacccccatgcctcaggatactcctcaatagccatcgctgtagtatatccaaagacaaccatcattccccctaaataaattaaaaaaactattaaacccatataacctcccccaaaattcagaataataacacacccgaccacaccgctaacaatcaatactaaacccccataaataggagaaggcttagaagaaaaccccacaaaccccattactaaacccacactcaacagaaacaaagcatacatcattattctcgcacggactacaaccacgaccaatgatatgaaaaaccatcgttgtatttcaactacaagaacaccaatgaccccaatacgcaaaactaaccccctaataaaattaattaaccactcattcatcgacctccccaccccatccaacatctccgcatgatgaaacttcggctcactccttggcgcctgcctgatcctccaaatcaccacaggactattcctagccatgcactactcaccagacgcctcaaccgccttttcatcaatcgcccacatcactcgagacgtaaattatggctgaatcatccgctaccttcacgccaatggcgcctcaatattctttatctgcctcttcctacacatcgggcgaggcctatattacggatcatttctctactcagaaacctgaaacatcggcattatcctcctgcttgcaactatagcaacagccttcataggctatgtcctcccgtgaggccaaatatcattctgaggggccacagtaattacaaacttactatccgccatcccatacattgggacagacctagttcaatgaatctgaggaggctactcagtagacagtcccaccctcacacgattctttacctttcacttcatcttgcccttcattattgcagccctagcagcactccacctcctattcttgcacgaaacgggatcaaacaaccccctaggaatcacctcccattccgataaaatcaccttccacccttactacacaatcaaagacgccctcggcttacttctcttccttctctccttaatgacattaacactattctcaccagacctcctaggcgacccagacaattataccctagccaaccccttaaacacccctccccacatcaagcccgaatgatatttcctattcgcctacacaattctccgatccgtccctaacaaactaggaggcgtccttgccctattactatccatcctcatcctagcaataatccccatcctccatatatccaaacaacaaagcataatatttcgcccactaagccaatcactttattgactcctagccgcagacctcctcattctaacctgaatcggaggacaaccagtaagctacccttttaccatcattggacaagtagcatccgtactatacttcacaacaatcctaatcctaataccaactatctccctaattgaaaacaaaatactcaaatgggcctgtccttgtagtataaactaatacaccagtcttgtaaaccggagatgaaaacctttttccaaggacaaatcagagaaaaagtctttaactccaccattagcacccaaagctaagattctaatttaaactattctctgttctttcatggggaagcagatttgggtaccacccaagtattgactcacccatcaacaaccgctatgtatttcgtacattactgccagccaccatgaatattgtacggtaccataaatacttgaccacctgtagtacataaaaacccaatccacatcaaaaccccctccccatgcttacaagcaagtacagcaatcaaccctcaactatcacacatcaactgcaactccaaagccacccctcacccactaggataccaacaaacctacccacccttaacagtacatagtacataaagccatttaccgtacatagcacattacagtcaaatcccttctcgcccccatggatgacccccctcagataggggtcccttgaccaccatcctccgtgaaatcaatatcccgcacaagagtgctactctcctcgctccgggcccataacacttgggggtagctaaggtgaactgtatccgacatctggttcctacttcagggtcataaagcctaaatagcccacacgttccccttaaataagacatcacgatg

SEQ ID NO: 137 - DNA, 16571 bp, Homo sapiens mitochondrial
  3109: "n" refers to a nucleotide at position 3107 of the Cambridge Reference Sequence (CRS, Anderson et al. 1981 Nature 290:457-465), later determined to be absent from the human mtDNA sequence according to the revised CRS (rCRS, Andrews et al. 1999 Nature Genetics 23:147); "n" therefore represents a single nucleotide deletion at a position corresponding to nucleotide 3107 of SEQ ID NO:1 as provided herein.
gatcacaggtctatcaccctattaaccactcacgggagctctccatgcatttggtattttcgtctggggggtgtgcacgcgatagcattgcgagacgctggagccggagcaccctatgtcgcagtatctgtctttgattcctgcctcattctattatttatcgcacctacgttcaatattacaggcgaacatacctactaaagtgtgttaattaattaatgcttgtaggacataataataacaattgaatgtctgcacagccgctttccacacagacatcataacaaaaaatttccaccaaaccccccctcccccccgcttctggccacagcacttaaacacatctctgccaaaccccaaaaacaaagaaccctaacaccagcctaaccagatttcaaattttatcttttggcggtatgcacttttaacagtcaccccccaactaacacattattttcccctcccactcccatactactaatctcatcaatacaacccccgcccatcctacccagcacacacacaccgctgctaaccccataccccgaaccaaccaaaccccaaagacaccccccacagtttatgtagcttacctcctcaaagcaatacactgaaaatgtttagacgggctcacatcaccccataaacaaataggtttggtcctagcctttctattagctcttagtaagattacacatgcaagcatccccgttccagtgagttcaccctctaaatcaccacgatcaaaagggacaagcatcaagcacgcagcaatgcagctcaaaacgcttagcctagccacacccccacgggaaacagcagtgattaacctttagcaataaacgaaagtttaactaagctatactaaccccagggttggtcaatttcgtgccagccaccgcggtcacacgattaacccaagtcaatagaagccggcgtaaagagtgttttagatcaccccctccccaataaagctaaaactcacctgagttgtaaaaaactccagttgacacaaaatagactacgaaagtggctttaacatatctgaacacacaatagctaagacccaaactgggattagataccccactatgcttagccctaaacctcaacagttaaatcaacaaaactgctcgccagaacactacgagccacagcttaaaactcaaaggacctggcggtgcttcatatccctctagaggagcctgttctgtaatcgataaaccccgatcaacctcaccacctcttgctcagcctatataccgccatcttcagcaaaccctgatgaaggctacaaagtaagcgcaagtacccacgtaaagacgttaggtcaaggtgtagcccatgaggtggcaagaaatgggctacattttctaccccagaaaactacgatagcccttatgaaacttaagggtcgaaggtggatttagcagtaaactgagagtagagtgcttagttgaacagggccctgaagcgcgtacacaccgcccgtcaccctcctcaagtatacttcaaaggacatttaactaaaacccctacgcatttatatagaggagacaagtcgtaacatggtaagtgtactggaaagtgcacttggacgaaccagagtgtagcttaacacaaagcacccaacttacacttaggagatttcaacttaacttgaccgctctgagctaaacctagccccaaacccactccaccttactaccagacaaccttagccaaaccatttacccaaataaagtataggcgatagaaattgaaacctggcgcaatagatatagtaccgcaagggaaagatgaaaaattataaccaagcataatatagcaaggactaacccctataccttctgcataatgaattaactagaaataactttgcaaggagagccaaagctaagacccccgaaaccagacgagctacctaagaacagctaaaagagcacacccgtctatgtagcaaaatagtgggaagatttataggtagaggcgacaaacctaccgagcctggtgatagctggttgtccaagatagaatcttagttcaactttaaatttgcccacagaaccctctaaatccccttgtaaatttaactgttagtccaaagaggaacagctctttggacactaggaaaaaaccttgtagagagagtaaaaaatttaacacccatagtaggcctaaaagcagccaccaattaagaaagcgttcaagctcaacacccactacctaaaaaatcccaaacatataactgaactcctcacacccaattggaccaatctatcaccctatagaagaactaatgttagtataagtaacatgaaaacattctcctccgcataagcctgcgtcagatcaaaacactgaactgacaattaacagcccaatatctacaatcaaccaacaagtcattattaccctcactgtcaacccaacacaggcatgctcataaggaaaggttaaaaaaagtaaaaggaactcggcaaatcttaccccgcctgtttaccaaaaacatcacctctagcatcaccagtattagaggcaccgcctgcccagtgacacatgtttaacggccgcggtaccctaaccgtgcaaaggtagcataatcacttgttccttaaatagggacctgtatgaatggctccacgagggttcagctgtctcttacttttaaccagtgaaattgacctgcccgtgaagaggcgggcatgacacagcaagacgagaagaccctatggagctttaatttattaatgcaaacagtacctaacaaacccacaggtcctaaactaccaaacctgcattaaaaatttcggttggggcgacctcggagcagaacccaacctccgagcagtacatgctaagacttcaccagtcaaagcgaactactatactcaattgatccaataacttgaccaacggaacaagttaccctagggataacagcgcaatcctattctagagtccatatcaacaatagggtttacgacctcgatgttggatcaggacatcccgatggtgcagccgctattaaaggttcgtttgttcaacgattaaagtcctacgtgatctgagttcagaccggagtaatccaggtcggtttctatctacnttcaaattcctccctgtacgaaaggacaagagaaataaggcctacttcacaaagcgccttcccccgtaaatgatatcatctcaacttagtattatacccacacccacccaagaacagggtttgttaagatggcagagcccggtaatcgcataaaacttaaaactttacagtcagaggttcaattcctcttcttaacaacatacccatggccaacctcctactcctcattgtacccattctaatcgcaatggcattcctaatgcttaccgaacgaaaaattctaggctatatacaactacgcaaaggccccaacgttgtaggcccctacgggctactacaacccttcgctgacgccataaaactcttcaccaaagagcccctaaaacccgccacatctaccatcaccctctacatcaccgccccgaccttagctctcaccatcgctcttctactatgaacccccctccccatacccaaccccctggtcaacctcaacctaggcctcctatttattctagccacctctagcctagccgtttactcaatcctctgatcagggtgagcatcaaactcaaactacgccctgatcggcgcactgcgagcagtagcccaaacaatctcatatgaagtcaccctagccatcattctactatcaacattactaataagtggctcctttaacctctccacccttatcacaacacaagaacacctctgattactcctgccatcatgacccttggccataatatgatttatctccacactagcagagaccaaccgaacccccttcgaccttgccgaaggggagtccgaactagtctcaggcttcaacatcgaatacgccgcaggccccttcgccctattcttcatagccgaatacacaaacattattataataaacaccctcaccactacaatcttcctaggaacaacatatgacgcactctcccctgaactctacacaacatattttgtcaccaagaccctacttctaacctccctgttcttatgaattcgaacagcatacccccgattccgctacgaccaactcatacacctcctatgaaaaaacttcctaccactcaccctagcattacttatatgatatgtctccatacccattacaatctccagcattccccctcaaacctaagaaatatgtctgataaaagagttactttgatagagtaaataataggagcttaaacccccttatttctaggactatgagaatcgaacccatccctgagaatccaaaattctccgtgccacctatcacaccccatcctaaagtaaggtcagctaaataagctatcgggcccataccccgaaaatgttggttatacccttcccgtactaattaatcccctggcccaacccgtcatctactctaccatctttgcaggcacactcatcacagcgctaagctcgcactgattttttacctgagtaggcctagaaataaacatgctagcttttattccagttctaaccaaaaaaataaaccctcgttccacagaagctgccatcaagtatttcctcacgcaagcaaccgcatccataatccttctaatagctatcctcttcaacaatatactctccggacaatgaaccataaccaatactaccaatcaatactcatcattaataatcataatggctatagcaataaaactaggaatagccccctttcacttctgagtcccagaggttacccaaggcacccctctgacatccggcctgcttcttctcacatgacaaaaactagcccccatctcaatcatataccaaatctctccctcactaaacgtaagccttctcctcactctctcaatcttatccatcatagcaggcagttgaggtggattaaaccaaacccagctacgcaaaatcttagcatactcctcaattacccacataggatgaataatagcagttctaccgtacaaccctaacataaccattcttaatttaactatttatattatcctaactactaccgcattcctactactcaacttaaactccagcaccacgaccctactactatctcgcacctgaaacaagctaacatgactaacacccttaatcccatccaccctcctctccctaggaggcctgcccccgctaaccggctttttgcccaaatgggccattatcgaagaattcacaaaaaacaatagcctcatcatccccaccatcatagccaccatcaccctccttaacctctacttctacctacgcctaatctactccacctcaatcacactactccccatatctaacaacgtaaaaataaaatgacagtttgaacatacaaaacccaccccattcctccccacactcatcgcccttaccacgctactcctacctatctccccttttatactaataatcttatagaaatttaggttaaatacagaccaagagccttcaaagccctcagtaagttgcaatacttaatttctgtaacagctaaggactgcaaaaccccactctgcatcaactgaacgcaaatcagccactttaattaagctaagcccttactagaccaatgggacttaaacccacaaacacttagttaacagctaagcaccctaatcaactggcttcaatctacttctcccgccgccgggaaaaaaggcgggagaagccccggcaggtttgaagctgcttcttcgaatttgcaattcaatatgaaaatcacctcggagctggtaaaaagaggcctaacccctgtctttagatttacagtccaatgcttcactcagccattttacctcacccccactgatgttcgccgaccgttgactattctctacaaaccacaaagacattggaacactatacctattattcggcgcatgagctggagtcctaggcacagctctaagcctccttattcgagccgagctgggccagccaggcaaccttctaggtaacgaccacatctacaacgttatcgtcacagcccatgcatttgtaataatcttcttcatagtaatacccatcataatcggaggctttggcaactgactagttcccctaataatcggtgcccccgatatggcgtttccccgcataaacaacataagcttctgactcttacctccctctctcctactcctgctcgcatctgctatagtggaggccggaacaggaacaggttgaacagtctaccctcccttagcagggaactactcccaccctggagcctccgtagacctaaccatcttctccttacacctagcaggtgtctcctctatcttaggggccatcaatttcatcacaacaattatcaatataaaaccccctgccataacccaataccaaacgcccctcttcgtctgatccgtcctaatcacagcagtcctacttctcctatctctcccagtcctagctgctggcatcactatactactaacagaccgcaacctcaacaccaccttcttcgaccccgccggaggaggagaccccattctataccaacacctattctgatttttcggtcaccctgaagtttatattcttatcctaccaggcttcggaataatctcccatattgtaacttactactccggaaaaaaagaaccatttggatacataggtatggtctgagctatgatatcaattggcttcctagggtttatcgtgtgagcacaccatatatttacagtaggaatagacgtagacacacgagcatatttcacctccgctaccataatcatcgctatccccaccggcgtcaaagtatttagctgactcgccacactccacggaagcaatatgaaatgatctgctgcagtgctctgagccctaggattcatctttcttttcaccgtaggtggcctgactggcattgtattagcaaactcatcactagacatcgtactacacgacacgtactacgttgtagctcacttccactatgtcctatcaataggagctgtatttgccatcataggaggcttcattcactgatttcccctattctcaggctacaccctagaccaaacctacgccaaaatccatttcactatcatattcatcggcgtaaatctaactttcttcccacaacactttctcggcctatccggaatgccccgacgttactcggactaccccgatgcatacaccacatgaaacatcctatcatctgtaggctcattcatttctctaacagcagtaatattaataattttcatgatttgagaagccttcgcttcgaagcgaaaagtcctaatagtagaagaaccctccataaacctggagtgactatatggatgccccccaccctaccacacattcgaagaacccgtatacataaaatctagacaaaaaaggaaggaatcgaaccccccaaagctggtttcaagccaaccccatggcctccatgactttttcaaaaaggtattagaaaaaccatttcataactttgtcaaagttaaattataggctaaatcctatatatcttaatggcacatgcagcgcaagtaggtctacaagacgctacttcccctatcatagaagagcttatcacctttcatgatcacgccctcataatcattttccttatctgcttcctagtcctgtatgcccttttcctaacactcacaacaaaactaactaatactaacatctcagacgctcaggaaatagaaaccgtctgaactatcctgcccgccatcatcctagtcctcatcgccctcccatccctacgcatcctttacataacagacgaggtcaacgatccctcccttaccatcaaatcaattggccaccaatggtactgaacctacgagtacaccgactacggcggactaatcttcaactcctacatacttcccccattattcctagaaccaggcgacctgcgactccttgacgttgacaatcgagtagtactcccgattgaagcccccattcgtataataattacatcacaagacgtcttgcactcatgagctgtccccacattaggcttaaaaacagatgcaattcccggacgtctaaaccaaaccactttcaccgctacacgaccgggggtatactacggtcaatgctctgaaatctgtggagcaaaccacagtttcatgcccatcgtcctagaattaattcccctaaaaatctttgaaatagggcccgtatttaccctatagcaccccctctaccccctctagagcccactgtaaagctaacttagcattaaccttttaagttaaagattaagagaaccaacacctctttacagtgaaatgccccaactaaatactaccgtatggcccaccataattacccccatactccttacactattcctcatcacccaactaaaaatattaaacacaaactaccacctacctccctcaccaaagcccataaaaataaaaaattataacaaaccctgagaaccaaaatgaacgaaaatctgttcgcttcattcattgcccccacaatcctaggcctacccgccgcagtactgatcattctatttccccctctattgatccccacctccaaatatctcatcaacaaccgactaatcaccacccaacaatgactaatcaaactaacctcaaaacaaatgatagccatacacaacactaaaggacgaacctgatctcttatactagtatccttaatcatttttattgccacaactaacctcctcggactcctgcctcactcatttacaccaaccacccaactatctataaacctagccatggccatccccttatgagcgggcgcagtgattataggctttcgctctaagattaaaaatgccctagcccacttcttaccacaaggcacacctacaccccttatccccatactagttattatcgaaaccatcagcctactcattcaaccaatagccctggccgtacgcctaaccgctaacattactgcaggccacctactcatgcacctaattggaagcgccaccctagcaatatcaaccattaaccttccctctacacttatcatcttcacaattctaattctactgactatcctagaaatcgctgtcgccttaatccaagcctacgttttcacacttctagtaagcctctacctgcacgacaacacataatgacccaccaatcacatgcctatcatatagtaaaacccagcccatgacccctaacaggggccctctcagccctcctaatgacctccggcctagccatgtgatttcacttccactccataacgctcctcatactaggcctactaaccaacacactaaccatataccaatgatggcgcgatgtaacacgagaaagcacataccaaggccaccacacaccacctgtccaaaaaggccttcgatacgggataatcctatttattacctcagaagtttttttcttcgcaggatttttctgagccttttaccactccagcctagcccctaccccccaactaggagggcactggcccccaacaggcatcaccccgctaaatcccctagaagtcccactcctaaacacatccgtattactcgcatcaggagtatcaatcacctgagctcaccatagtctaatagaaaacaaccgaaaccaaataattcaagcactgcttattacaattttactgggtctctattttaccctcctacaagcctcagagtacttcgagtctcccttcaccatttccgacggcatctacggctcaacattttttgtagccacaggcttccacggacttcacgtcattattggctcaactttcctcactatctgcttcatccgccaactaatatttcactttacatccaaacatcactttggcttcgaagccgccgcctgatactggcattttgtagatgtggtttgactatttctgtatgtctccatctattgatgagggtcttactcttttagtataaatagtaccgttaacttccaattaactagttttgacaacattcaaaaaagagtaataaacttcgccttaattttaataatcaacaccctcctagccttactactaataattattacattttgactaccacaactcaacggctacatagaaaaatccaccccttacgagtgcggcttcgaccctatatcccccgcccgcgtccctttctccataaaattcttcttagtagctattaccttcttattatttgatctagaaattgccctccttttacccctaccatgagccctacaaacaactaacctgccactaatagttatgtcatccctcttattaatcatcatcctagccctaagtctggcctatgagtgactacaaaaaggattagactgagccgaattggtatatagtttaaacaaaacgaatgatttcgactcattaaattatgataatcatatttaccaaatgcccctcatttacataaatattatactagcatttaccatctcacttctaggaatactagtatatcgctcacacctcatatcctccctactatgcctagaaggaataatactatcgctgttcattatagctactctcataaccctcaacacccactccctcttagccaatattgtgcctattgccatactagtctttgccgcctgcgaagcagcggtgggcctagccctactagtctcaatctccaacacatatggcctagactacgtacataacctaaacctactccaatgctaaaactaatcgtcccaacaattatattactaccactgacatgactttccaaaaagcacataatttgaatcaacacaaccacccacagcctaattattagcatcatccccctactattttttaaccaaatcaacaacaacctatttagctgttccccaaccttttcctccgaccccctaacaacccccctcctaatactaactacctgactcctacccctcacaatcatggcaagccaacgccacttatccagtgaaccactatcacgaaaaaaactctacctctctatactaatctccctacaaatctccttaattataacattcacagccacagaactaatcatattttatatcttcttcgaaaccacacttatccccaccttggctatcatcacccgatgaggcaaccagccagaacgcctgaacgcaggcacatacttcctattctacaccctagtaggctcccttcccctactcatcgcactaatttacactcacaacaccctaggctcactaaacattctactactcactctcactgcccaagaactatcaaactcctgagccaacaacttaatatgactagcttacacaatagcttttatagtaaagatacctctttacggactccacttatgactccctaaagcccatgtcgaagcccccatcgctgggtcaatagtacttgccgcagtactcttaaaactaggcggctatggtataatacgcctcacactcattctcaaccccctgacaaaacacatagcctaccccttccttgtactatccctatgaggcataattataacaagctccatctgcctacgacaaacagacctaaaatcgctcattgcatactcttcaatcagccacatagccctcgtagtaacagccattctcatccaaaccccctgaagcttcaccggcgcagtcattctcataatcgcccacggacttacatcctcattactattctgcctagcaaactcaaactacgaacgcactcacagtcgcatcataatcctctctcaaggacttcaaactctactcccactaatagctttttgatgacttctagcaagcctcgctaacctcgccttaccccccactattaacctactgggagaactctctgtgctagtaaccacgttctcctgatcaaatatcactctcctacttacaggactcaacatactagtcacagccctatactccctctacatatttaccacaacacaatggggctcactcacccaccacattaacaacataaaaccctcattcacacgagaaaacaccctcatgttcatacacctatcccccattctcctcctatccctcaaccccgacatcattaccgggttttcctcttgtaaatatagtttaaccaaaacatcagattgtgaatctgacaacagaggcttacgaccccttatttaccgagaaagctcacaagaactgctaactcatgcccccatgtctaacaacatggctttctcaacttttaaaggataacagctatccattggtcttaggccccaaaaattttggtgcaactccaaataaaagtaataaccatgcacactactataaccaccctaaccctgacttccctaattccccccatccttaccaccctcgttaaccctaacaaaaaaaactcatacccccattatgtaaaatccattgtcgcatccacctttattatcagtctcttccccacaacaatattcatgtgcctagaccaagaagttattatctcgaactgacactgagccacaacccaaacaacccagctctccctaagcttcaaactagactacttctccataatattcatccctgtagcattgttcgttacatggtccatcatagaattctcactgtgatatataaactcagacccaaacattaatcagttcttcaaatatctactcattttcctaattaccatactaatcttagttaccgctaacaacctattccaactgttcatcggctgagagggcgtaggaattatatccttcttgctcatcagttgatgatacgcccgagcagatgccaacacagcagccattcaagcaatcctatacaaccgtatcggcgatatcggtttcatcctcgccttagcatgatttatcctacactccaactcatgagacccacaacaaatagcccttctaaacgctaatccaagcctcaccccactactaggcctcctcctagcagcagcaggcaaatcagcccaattaggtctccacccctgactcccctcagccatagaaggccccaccccagtctcagccctactccactcaagcactatagttgtagcaggaatcttcttactcatccgcttccaccccctagcagaaaatagcccactaatccaaactctaacactatgcttaggcgctatcaccactctgttcgcagcagtctgcgcccttacacaaaatgacatcaaaaaaatcgtagccttctccacttcaagtcaactaggactcataatagttacaatcggcatcaaccaaccacacctagcattcctgcacatctgtacccacgccttcttcaaagccatactatttatgtgctccgggtccatcatccacaaccttaacaatgaacaagatattcgaaaaataggaggactactcaaaaccatacctctcacttcaacctccctcaccattggcagcctagcattagcaggaatacctttcctcacaggtttctactccaaagaccacatcatcgaaaccgcaaacatatcatacacaaacgcctgagccctatctattactctcatcgctacctccctgacaagcgcctatagcactcgaataattcttctcaccctaacaggtcaacctcgcttccccacccttactaacattaacgaaaataaccccaccctactaaaccccattaaacgcctggcagccggaagcctattcgcaggatttctcattactaacaacatttcccccgcatcccccttccaaacaacaatccccctctacctaaaactcacagccctcgctgtcactttcctaggacttctaacagccctagacctcaactacctaaccaacaaacttaaaataaaatccccactatgcacattttatttctccaacatactcggattctaccctagcatcacacaccgcacaatcccctatctaggccttcttacgagccaaaacctgcccctactcctcctagacctaacctgactagaaaagctattacctaaaacaatttcacagcaccaaatctccacctccatcatcacctcaacccaaaaaggcataattaaactttacttcctctctttcttcttcccactcatcctaaccctactcctaatcacataacctattcccccgagcaatctcaattacaatatatacaccaacaaacaatgttcaaccagtaaccactactaatcaacgcccataatcatacaaagcccccgcaccaataggatcctcccgaatcaaccctgacccctctccttcataaattattcagcttcctacactattaaagtttaccacaaccaccaccccatcatactctttcacccacagcaccaatcctacctccatcgctaaccccactaaaacactcaccaagacctcaacccctgacccccatgcctcaggatactcctcaatagccatcgctgtagtatatccaaagacaaccatcattccccctaaataaattaaaaaaactattaaacccatataacctcccccaaaattcagaataataacacacccgaccacaccgctaacaatcaatactaaacccccataaataggagaaggcttagaagaaaaccccacaaaccccattactaaacccacactcaacagaaacaaagcatacatcattattctcgcacggactacaaccacgaccaatgatatgaaaaaccatcgttgtatttcaactacaagaacaccaatgaccccaatacgcaaaattaaccccctaataaaattaattaaccactcattcatcgacctccccaccccatccaacatctccgcatgatgaaacttcggctcactccttggcgcctgcctgatcctccaaatcaccacaggactattcctagccatacactactcaccagacgcctcaaccgccttttcatcaatcgcccacatcactcgagacgtaaattatggctgaatcatccgctaccttcacgccaatggcgcctcaatattctttatctgcctcttcctacacatcgggcgaggcctatattacggatcatttctctactcagaaacctgaaacatcggcattatcctcctgcttgcaactatagcaacagccttcataggctatgtcctcccgtgaggccaaatatcattctgaggggccacagtaattacaaacttactatccgccatcccatacattgggacagacctagttcaatgaatctgaggaggctactcagtagacagtcccaccctcacacgattctttacctttcacttcatcttacccttcattattgcagccctagcagcactccacctcctattcttgcacgaaacgggatcaaacaaccccctaggaatcacctcccattccgataaaatcaccttccacccttactacacaatcaaagacgccctcggcttacttctcttccttctctccttaatgacattaacactattctcaccagacctcctaggcgacccagacaattataccctagccaaccccttaaacacccctccccacatcaagcccgaatgatatttcctattcgcctacacaattctccgatccgtccctaacaaactaggaggcgtccttgccctattactatccatcctcatcctagcaataatccccatcctccatatatccaaacaacaaagcataatatttcgcccactaagccaatcactttattgactcctagccgcagacctcctcattctaacctgaatcggaggacaaccagtaagctacccttttaccatcattggacaagtagcatccgtactatacttcacaacaatcctaatcctaataccaactatctccctaattgaaaacaaaatactcaaatgggcctgtccttgtagtataaactaatacaccagtcttgtaaaccggagatgaaaacctttttccaaggacaaatcagagaaaaagtctttaactccaccattagcacccaaagctaagattctaatttaaactattctctgttctttcatggggaagcagatttgggtaccacccaagtattgactcacccatcaacaaccgctatgtatttcgtacattactgccagccaccatgaatattgtacggtaccataaatacttgaccacctgtagtacataaaaacccaacccacatcaaacccccccccccatgcttacaagcaagtacagcaatcaaccttcaactatcacacatcaactgcaactccaaagccacccctcacccactaggataccaacaaacctacccacccttaacagtacatagtacataaagtcatttaccgtacatagcacattacagtcaaatcccttctcgtccccatggatgacccccctcagataggggtcccttgaccaccatcctccgtgaaatcaatatcccgcacaagagtgctactctcctcgctccgggcccataacacttgggggtagctaaagtgaactgtatccgacatctggttcctacttcagggccataaagcctaaatagcccacacgttccccttaaataagacatcacgatg

SEQ ID NO: 138 - DNA, 16571 bp, Homo sapiens mitochondrial
  3109: "n" refers to a nucleotide at position 3107 of the Cambridge Reference Sequence (CRS, Anderson et al. 1981 Nature 290:457-465), later determined to be absent from the human mtDNA sequence according to the revised CRS (rCRS, Andrews et al. 1999 Nature Genetics 23:147); "n" therefore represents a single nucleotide deletion at a position corresponding to nucleotide 3107 of SEQ ID NO:1 as provided herein.
gatcacaggtctatcaccctattaaccactcacgggagctctccatgcatttggtattttcgtctggggggtgtgcacgcgatagcattgcgagacgctggagccggagcaccctatgtcgcagtatctgtctttgattcctgccccatcccattatttatcgcacctacgttcaatattacaggcgaacatacttactaaagtgtgttaattaattaatgcttgtaggacataataataacaattgaatgtctgcacagccgctttccacacagacatcataacaaaaaatttccaccaaaccccccctcccccccgcttctggccacagcacttaaacacatctctgccaaaccccaaaaacaaagaaccctaacaccagcctaaccagatttcaaattttatcttttggcggtatgcacttttaacagtcaccccccaactaacacattattttcccctcccactcccatactactaatctcatcaatacaacccccgcccatcctacccagcacacacacaccgctgctaaccccataccccgaaccaaccaaaccccaaagacaccccccacagtttatgtagcttacctcctcaaagcaatacactgaaaatgtttagacgggctcacatcaccccataaacaaataggtttggtcctagcctttctattagctcttagtaagattacacatgcaagcatccccattccagtgagttcaccctctaaatcaccacgatcaaaagggacaagcatcaagcacgcagcaatgcagctcaaaacgcttagcctagccacacccccacgggaaacagcagtgattaacctttagcaataaacgaaagtttaactaagctatactaaccccagggttggtcaatttcgtgccagccaccgcggtcacacgattaacccaagtcaatagaagccggcgtaaagagtgttttagatcaccccctccccaataaagctaaaactcacctgagttgtaaaaaactccagttgacacaaaatagactacgaaagtggctttaacatatctgaacacacaatagctaagacccaaactgggattagataccccactatgcttagccctaaacctcaacagttaaatcaacaaaactgctcgccagaacactacgagccacagcttaaaactcaaaggacctggcggtgcttcatatccctctagaggagcctgttctgtaatcgataaaccccgatcaacctcaccacctcttgctcagcctatataccgccatcttcagcaaaccctgatgaaggctacaaagtaagcgcaagtacccacgtaaagacgttaggtcaaggtgtagcccatgaggtggcaagaaatgggctacattttctaccccagaaaactacgatagcccttatgaaacttaagggtcgaaggtggatttagcagtaaactgagagtagagtgcttagttgaacagggccctgaagcgcgtacacaccgcccgtcaccctcctcaagtatacttcaaaggacatttaactaaaacccctacgcatttatatagaggagacaagtcgtaacatggtaagtgtactggaaagtgcacttggacgaaccagagtgtagcttaacacaaagcacccaacttacacttaggagatttcaacttaacttgaccgctctgagctaaacctagccccaaacccactccaccttactaccagacaaccttagccaaaccatttacccaaataaagtataggcgatagaaattgaaacctggcgcaatagatatagtaccgcaagggaaagatgaaaaattatagccaagcataatatagcaaggactaacccctataccttctgcataatgaattaactagaaataactttgcaaggagagccaaagctaagacccccgaaaccagacgagctacctaagaacagctaaaagagcacacccgtctatgtagcaaaatagtgggaagatttataggtagaggcgacaaacctaccgagcctggtgatagctggttgtccaagatagaatcttagttcaactttaaatttgcccacagaaccctctaaatccccttgtaaatttaactgttagtccaaagaggaacagctctttggacactaggaaaaaaccttgtagagagagtaaaaaatttaacacccatagtaggcctaaaagcagccaccaattaagaaagcgttcaagctcaacacccactacctaaaaaatcccaaacatataactgaactcctcacacccaattggaccaatctatcaccctatagaagaactaatgttagtataagtaacatgaaaacattctcctccgcataagcctgcgtcagattaaaacactgaactgacaattaacagcccaatatctacaatcaaccaacaagtcattattaccctcactgtcaacccaacacaggcatgctcataaggaaaggttaaaaaaagtaaaaggaactcggcaaatcttaccccgcctgtttaccaaaaacatcacctctagcatcaccagtattagaggcaccgcctgcccagtgacacatgtttaacggccgcggtaccctaaccgtgcaaaggtagcataatcacttgttccttaaatagggacctgtatgaatggctccacgagggttcagctgtctcttacttttaaccagtgaaattgacctgcccgtgaagaggcgggcatgacacagcaagacgagaagaccctatggagctttaatttattaatgcaaacagtacctaacaaacccacaggtcctaaactaccaaacctgcattaaaaatttcggttggggcgacctcggagcagaacccaacctccgagcagtacatgctaagacttcaccagtcaaagcgaactactatactcaattgatccaataacttgaccaacggaacaagttaccctagggataacagcgcaatcctattctagagtccatatcaacaatagggtttacgacctcgatgttggatcaggacatcccgatggtgcagccgctattaaaggttcgtttgttcaacgattaaagtcctacgtgatctgagttcagaccggagtaatccaggtcggtttctatctacnttcaaattcctccctgtacgaaaggacaagagaaataaggcctacttcacaaagcgccttcccccgtaaatgatatcatctcaacttagtattatacccacacccacccaagaacagggtttgttaagatggcagagcccggtaatcgcataaaacttaaaactttacagtcagaggttcaattcctcttcttaacaacatacccatggccaacctcctactcctcattgtacccattctaatcgcaatggcattcctaatgcttaccgaacgaaaaattctaggctatatacaactacgcaaaggccccaacgttgtaggcccctacgggctactacaacccttcgctgacgccataaaactcttcaccaaggagcccctaaaacccgccacatctaccatcaccctctacatcaccgccccgaccttagctctcaccatcgctcttctactatgaacccccctccccatacccaaccccctggtcaacctcaacctaggcctcctatttattctagccacctctagcctagccgtttactcaatcctctgatcagggtgagcatcaaactcaaactacgccctgatcggcgcactgcgagcagtagcccaaacaatctcatatgaagtcaccctagccatcattctactatcaacattactaataagtggctcctttaacctctccacccttatcacaacacaagaacacctctgattactcctgccatcatgacccttggccataatatgatttatctccacactagcagagaccaaccgaacccccttcgaccttgccgaaggggagtccgaactagtctcaggcttcaacatcgaatacgccgcaggccccttcgccctattcttcatagccgaatacacaaacattattataataaacaccctcaccactacaatcttcctaggaacaacatatgacgcactctcccctgaactctacacaacatattttgtcaccaagaccctacttctaacctccctgttcttatgaattcgaacagcatacccccgattccgctacgaccaactcatacacctcctatgaaaaaacttcctaccactcaccctagcattacttatatgatatgtctccatacccattacaatctccagcattccccctcaaacctaagaaatatgtctgataaaagagttactttgatagagtaaataataggagcttaaacccccttatttctaggactatgagaatcgaacccatccctgagaatccaaaattctccgtgccacctatcacaccccatcctaaagtaaggtcagctaaataagctatcgggcccataccccgaaaatgttggttatacccttcccgtactaattaatcccctggcccaacccgtcatctactctaccatctttgcaggcacactcatcacagcgctaagctcgcactgattttttacctgagcaggcctagaaataaacatgctagcttttattccagttctaaccaaaaaaataaaccctcgttccacagaagctgccatcaagtatttcctcacgcaagcaaccgcatccataatccttctaatagctatcctcttcaacaatatactctccggacaatgaaccataaccaatactaccaatcaatactcatcattaataatcataatggctatagcaataaaactaggaatagccccctttcacttctgagtcccagaggttacccaaggcacccctctgacatccggcctgcttcttctcacatgacaaaaactagcccccatctcaatcatataccaaatctctccctcactaaacgtaagccttctcctcactctctcaatcttatccatcatagcaggcagttgaggtggattaaaccaaacccagctacgcaaaatcttagcatactcctcaattacccacataggatgaataatagcagttctaccgtacaaccctaacataaccattcttaatttaactatttatattatcctaactactaccgcattcctactactcaacttaaactccagcaccacgaccctactactatctcgcacctgaaacaagctaacatgactaacacccttaattccatccaccctcctctccctaggaggcctgcccccgctaaccggctttttgcccaaatgggccattatcgaagaattcacaaaaaacaatagcctcatcatccccaccatcatagccaccatcaccctccttaacctctacttctacctacgcctaatctactccacctcaatcacactactccccatatctaacaacgtaaaaataaaatgacagtttgaacatacaaaacccaccccattcctccccacactcatcgcccttaccacgctactcctacctatctccccttttatactaataatcttatagaaatttaggttaaatacagaccaagagccttcaaagccctcagtaagttgcaatacttaatttctgtaacagctaaggactgcaaaaccccactctgcatcaactgaacgcaaatcagccactttaattaagctaagcccttactagaccaatgggacttaaacccacaaacacttagttaacagctaagcaccctaatcaactggcttcaatctacttctcccgccgccgggaaaaaaggcgggagaagccccggcaggtttgaagctgcttcttcgaatttgcaattcaatatgaaaatcacctcggagctggtaaaaagaggcctaacccctgtctttagatttacagtccaatgcttcactcagccattttacctcacccccactgatgttcgccgaccgttgactattctctacaaaccacaaagacattggaacactatacctattattcggcgcatgagctggagtcctaggcacagctctaagcctccttattcgagccgagctgggccagccaggcaaccttctaggtaacgaccacatctacaacgttatcgtcacagcccatgcatttgtaataatcttcttcatagtaatacccatcataatcggaggctttggcaactgactagttcccctaataatcggtgcccccgatatggcgtttccccgcataaacaacataagcttctgactcttacctccctctctcctactcctgctcgcatctgctatagtggaggccggagcaggaacaggttgaacagtctaccctcccttagcagggaactactcccaccctggagcctccgtagacctaaccatcttctccttacacctagcaggtgtctcctctatcttaggggccatcaatttcatcacaacaattatcaatataaaaccccctgccataacccaataccaaacgcccctcttcgtctgatccgtcctaatcacagcagtcctacttctcctatctctcccagtcctagctgctggcatcactatactactaacagaccgcaacctcaacaccaccttcttcgaccccgccggaggaggagaccccattctataccaacacctattctgatttttcggtcaccctgaagtttatattcttatcctaccaggcttcggaataatctcccatattgtaacttactactccggaaaaaaagaaccatttggatacataggtatggtctgagctatgatatcaattggcttcctagggtttatcgtgtgagcacaccatatatttacagtaggaatagacgtagacacacgagcatatttcacctccgctaccataatcatcgctatccccaccggcgtcaaagtatttagctgactcgccacactccacggaagcaatatgaaatgatctgctgcagtgctctgagccctaggattcatctttcttttcaccgtaggtggcctgactggcattgtattagcaaactcatcactagacatcgtactacacgacacgtactacgttgtagctcacttccactatgtcctatcaataggagctgtatttgccatcataggaggcttcattcactgatttcccctattctcaggctacaccctagaccaaacctacgccaaaatccatttcactatcatattcatcggcgtaaatctaactttcttcccacaacactttctcggcctatccggaatgccccgacgttactcggactaccccgatgcatacaccacatgaaacatcctatcatctgtaggctcattcatttctctaacagcagtaatattaataattttcatgatttgagaagccttcgcttcgaagcgaaaagtcctaatagtagaagaaccctccataaacctggagtgactatatggatgccccccaccctaccacacattcgaagaacccgtatacataaaatctagacaaaaaaggaaggaatcgaaccccccaaagctggtttcaagccaaccccatggcctccatgactttttcaaaaaggtattagaaaaaccatttcataactttgtcaaagttaaattataggctaaatcctatatatcttaatggcacatgcagcgcaagtaggtctacaagacgctacttcccctatcatagaagagcttatcacctttcatgatcacgccctcataatcattttccttatctgcttcctagtcctgtatgcccttttcctaacactcacaacaaaactaactaatactaacatctcagacgctcaggaaatagaaaccgtctgaactatcctgcccgccatcatcctagtcctcatcgccctcccatccctacgcatcctttacataacagacgaggtcaacgatccctcccttaccatcaaatcaattggccaccaatggtactgaacctacgagtacaccgactacggcggactaatcttcaactcctacatacttcccccattattcctagaaccaggcgacctgcgactccttgacgttgacaatcgagtagtactcccgattgaagcccccattcgtataataattacatcacaagacgtcttgcactcatgagctgtccccacattaggcttaaaaacagatgcaattcccggacgtctaaaccaaaccactttcaccgctacacgaccgggggtatactacggtcaatgctctgaaatctgtggagcaaaccacagtttcatgcccatcgtcctagaattaattcccctaaaaatctttgaaatagggcccgtatttaccctatagcaccccctctaccccctctagagcccactgtaaagctaacttagcattaaccttttaagttaaagattaagagaaccaacacctctttacagtgaaatgccccaactaaatactaccgtatggcccaccataattacccccatactccttacactattcctcatcacccaactaaaaatattaaacacaaactaccacctacctccctcaccaaagcccataaaaataaaaaattataacaaaccctgagaaccaaaatgaacgaaaatctgttcgcttcattcattgcccccacaatcctaggcctacccgccgcagtactgatcattctatttccccctctattgatccccacctccaaatatctcatcaacaaccgactaatcaccacccaacaatgactaatcaaactaacctcaaaacaaatgataaccatacacaacactaaaggacgaacctgatctcttatactagtatccttaatcatttttattgccacaactaacctcctcggactcctgcctcactcatttacaccaaccacccaactatctataaacctagccatggccatccccttatgagcgggcgcagtgattataggctttcgctctaagattaaaaatgccctagcccacttcttaccacaaggcacacctacaccccttatccccatactagttattatcgaaaccatcagcctactcattcaaccaatagccctggccgtacgcctaaccgctaacattactgcaggccacctactcatgcacctaattggaagcaccaccctagcaatatcaaccattaaccttccctctacacttatcatcttcacaattctaattctactgactatcctagaaatcgctgtcgccttaatccaagcctacgttttcacacttctagtaagcctctacctgcacgacaacacataatgacccaccaatcacatgcctatcatatagtaaaacccagcccatgacccctaacaggggccctctcagccctcctaatgacctccggcctagccatgtgatttcacttccactccataacgctcctcatactaggcctactaaccaacacactaaccatataccaatgatggcgcgatgtaacacgagaaagcacataccaaggccaccacacaccacctgtccaaaaaggccttcgatacgggataatcctatttattacctcagaagtttttttcttcgcaggatttttctgagccttttaccactccagcctagcccctaccccccaattaggagggcactggcccccaacaggcatcaccccgctaaatcccctagaagtcccactcctaaacacatccgtattactcgcatcaggagtatcaatcacctgagctcaccatagtctaatagaaaacaaccgaaaccaaataattcaagcactgctcattacaattttactgggcctctattttaccctcctacaagcctcagagtacttcgagtctcccttcaccatttccgacggcatctacggctcaacattttttgtagccacaggcttccacggacttcacgtcattattggctcaactttcctcactatctgcttcatccgccaactaatatttcactttacatccaaacatcactttggcttcgaagccgccgcctgatactggcattttgtagatgtggtttgactatttctgtatgtctccatctattgatgagggtcttactcttttagtataaatagtaccgttaacttccaattaactagttttgacaacattcaaaaaagagtaataaacttcgccttaattttaataatcaacaccctcctagccttactactaataattattacattttgactaccacaactcaacggctacatagaaaaatccaccccttacgagtgcggcttcgaccctatatcccccgcccgcgtccctttctccataaaattcttcttagtagctattaccttcttattatttgatctagaaattgccctccttttacccctaccatgagccctacaaacaactaacctgccactaatagttatgtcatccctcttattaatcatcatcctagccctaagtctggcctatgagtgactacaaaaaggattagactgaaccgaattggtatatagtttaaacaaaacgaatgatttcgactcattaaattatgataatcatatttaccaaatgcccctcatttacataaatattatactagcatttaccatctcacttctaggaatactagtatatcgctcacacctcatgtcctccctactatgcctagaaggaataatactatcgctgttcattatagctactctcataaccctcaacacccactccctcttagccaatattgtgcctattgccatactagtctttgccgcctgcgaagcagcggtgggcctagccctactagtctcaatctccaacacatatggcctagactacgtacataacctaaacctactccaatgctaaaactaatcgtcccaacaattatattactaccactgacatgactttccaaaaaacacataatttgaatcaacacaaccacccacagcctaattattagcatcatccctctactattttttaaccaaatcaacaacaacctatttagctgttccccaaccttttcctccgaccccctaacaacccccctcctaatactaactacctgactcctacccctcacaatcatggcaagccaacgccacttatccagtgaaccactatcacgaaaaaaactctacctctctatactaatctccctacaaatctccttaattataacattcacagccacagaactaatcatattttatatcttcttcgaaaccacacttatccccaccttggctatcatcacccgatgaggcaaccagccagaacgcctgaacgcaggcacatacttcctattctacaccctagtaggctcccttcccctactcatcgcactaatttacactcacaacaccctaggctcactaaacattctactactcaccctcactgcccaagaactatcaaactcctgagccaacaacttaatatgactagcttacacaatagcttttatagtaaagatacctctttacggactccacttatgactccctaaagcccatgtcgaagcccccatcgctgggtcaatagtacttgccgcagtactcttgaaactaggcggctatggtataatacgcctcacactcattctcaaccccctgacaaaacacatagcctaccccttccttgtactatccctatgaggcataattataacaagctccatctgcctacgacaaacagacctaaaatcgctcattgcatactcttcaatcagccacatagccctcgtagtaacagccattctcatccaaaccccctgaagcttcaccggcgcagtcattctcataatcgcccacggacttacatcctcattactattctgcctagcaaactcaaactacgaacgcactcacagtcgcatcataatcctctctcaaggacttcaaactctactcccactaatagctttttgatgacttctagcaagcctcgctaacctcgccttaccccccactattaacctactgggagaactctctgtgctagtaaccacgttctcctgatcaaatatcactctcctacttacaggactcaacatactagtcacagccctatactccctctacatatttaccacaacacaatggggctcactcacccaccacattaacaacataaaaccctcattcacacgagaaaacaccctcatgttcatacacctatcccccattctcctcctatccctcaaccccgacatcattaccgggttttcctcttgtaaatatagtttaaccaaaacatcagattgtgaatctgacaacagaggcttacgaccccttatttaccgagaaagctcacaagaactgctaactcatgcccccatgtctaacaacatggctttctcaacttttaaaggataacagctatccattggtcttaggccccaagaattttggtgcaactccaaataaaagtaataaccatgcacactactataaccaccctaaccctaacttccctaattccccccatccttaccaccctcgttaaccctaacaaaaaaaactcatacccccattatgtaaaatccattgtcgcatccacctttattatcagtctcttccccacaacaatattcatgtgcctagaccaagaagttattatctcgaactgacactgagccacaacccaaacaacccagctctccctaagcttcaaactagactacttctccataatattcatccctgtagcattgttcgttacatggtccatcatagaattctcactgtgatatataaactcagacccaaacattaatcagttcttcaaatatctactcatcttcctaattaccatactaatcttagttaccgctaacaacctattccaactgttcatcggctgagagggcgtaggaattatatccttcttgctcatcagttgatgatacgcccgagcagatgccaacacagcagccattcaagcaatcctatacaaccgtatcggcgatatcggtttcatcctcgccttagcatgatttatcctacactccaactcatgagacccacaacaaatagcccttctaaacgctaatccaagcctcaccccactactaggcctcctcctagcagcagcaggcaaatcagcccaattaggtctccacccctgactcccctcagccatagaaggccccaccccagtctcagccctactccactcaagcactatagttgtagcaggaatcttcttactcatccgcttccaccccctagcagaaaatagcccactaatccaaactctaacactatgcttaggcgctatcaccactctgttcgcagcagtctgcgcccttacacaaaatgacatcaaaaaaatcgtagccttctccacttcaagtcaactaggactcataatagttacaatcggcatcaaccaaccacacctagcattcctgcacatctgtacccacgccttcttcaaagccatactatttatgtgctccgggtccatcatccacaaccttaacaatgaacaagatattcgaaaaataggaggactactcaaaaccatacctctcacttcaacctccctcaccattggcagcctagcattagcaggaatacctttcctcacaggtttctactccaaagaccacatcatcgaaaccgcaaacatatcatacacaaacgcctgagccctatctattactctcatcgctacctccctgacaagcgcctatagcactcgaataattcttctcaccctaacaggtcaacctcgcttccccacccttactaacattaacgaaaataaccccaccctactaaaccccattaaacgcctggcagccggaagcctattcgcaggatttctcattactaacaacatttcccccgcatcccccttccaaacaacaatccccctctacctaaaactcacagccctcgctgtcactttcctaggacttctaacagccctagacctcaactacctaaccaacaaacttaaaataaaatccccactatgcacattttatttctccaacatactcggattctaccctagcatcacacaccgcacaatcccctatctaggccttcttacgagccaaaacctgcccctactcctcctagacctaacctgactagaaaagctattacctaaaacaatttcacagcaccaaatctccacctccatcatcacctcaacccaaaaaggcataattaaactttacttcctctctttcttcttcccactcatcctaaccctactcctaatcacataacctattcccccgagcaatttcaattacaatatatacaccaacaaacaatgttcaaccagtaactactactaatcaacgcccataatcatacaaagcccccgcaccaataggatcctcccgaatcaaccctgacccctctccttcataaattattcagcttcctacactattaaagtttaccacaaccaccaccccatcatactctttcacccacagcaccaatcctacctccatcgctaaccccactaaaacactcaccaagacctcaacccctgacccccatgcctcaggatactcctcaatagccatcgctgtagtatatccaaagacaaccatcattccccctaaataaattaaaaaaactattaaacccatataacctcccccaaaattcagaataataacacacccgaccacaccgctaacaatcaatactaaacccccataaataggagaaggcttagaagaaaaccccacaaaccccattactaaacccacactcaacagaaacaaagcatacatcattattctcgcacggactacaaccacgaccaatgatatgaaaaaccatcgttgtatttcaactacaagaacaccaatgaccccaatacgcaaaattaaccccctaataaaattaattaaccactcactcatcgacctccccaccccatccaacatctccgcatgatgaaacttcggctcactccttggcgcctgcctgatcctccaaatcaccacaggactattcctagccatgcactactcaccagacgcctcaaccgccttttcatcaatcgcccacatcactcgagacgtaaattatggctgaatcatccgctaccttcacgccaatggcgcctcaatattctttatctgcctcttcctacacatcgggcgaggcctatattacggatcatttctctactcagaaacctgaaacatcggcattatcctcctgcttgcaactatagcaacagccttcataggctatgtcctcccgtgaggccaaatatcattctgaggggccacagtaattacaaacttactatccgccatcccatacattgggacagacctagttcaatgaatctgaggaggctactcagtagacagtcccaccctcacacgattctttacctttcacttcatcttgcccttcattattgcagccctagcagcactccacctcctattcttgcacgaaacgggatcaaacaaccccctaggaatcacctcccattccgataaaatcaccttccacccttactacacaatcaaagacgccctcggcttacttctcttccttctctccttaatgacattaacactattctcaccagacctcctaggcgacccagacaattataccctagccaaccccttaaacacccctccccacatcaagcccgaatgatatttcctattcgcctacacaattctccgatccgtccctaacaaactaggaggcgtccttgccctattactatccatcctcatcctagcaataatccccatcctccatatatccaaacaacaaagcataatatttcgcccactaagccaatcactttattgactcctagccgcagacctcctcattctaacctgaatcggaggacaaccagtaagctacccttttaccatcattggacaagtagcatccgtactatacttcacaacaatcctaatcctaataccaactatctccctaattgaaaacaaaatactcaaatgggcctgtccttgtagtataaactaatacaccagtcttgtaaaccggagatgaaaacctttttccaaggacaaatcagagaaaaagtctttaactccaccattagcacccaaagctaagattctaatttaaactattctctgttctttcatggggaagcagatttgggtaccacccaagtattgactcacccatcaacaaccgctatgtatttcgtacattactgccagccaccatgaatattgtacggtaccataaatacttgaccacctgtagtacataaaaacccaatccacatcaaaaccccctccccatgcttacaagcaagtacagcaatcaacccccaactatcacacatcaactgcaactccaaagccacccctcacccactaggataccaacaaacctacccacccttaacagtacatagtacataaagccatttaccgtacatagcacattacagtcaaatcccttctcgtccccatggatgacccccctcagataggggtcccttgaccaccatcctccgtgaaatcaatatcccgcacaagagtgctactctcctcgctccgggcccataacacttgggggtagctaaagtgaactgtatccgacatctggttcctacttcagggccataaagcctaaatagcccacacgttccccttaaataagacatcacgatg

SEQ ID NO: 139 - DNA, 16573 bp, Homo sapiens mitochondrial
  3111: "n" refers to a nucleotide at position 3107 of the Cambridge Reference Sequence (CRS, Anderson et al. 1981 Nature 290:457-465), later determined to be absent from the human mtDNA sequence according to the revised CRS (rCRS, Andrews et al. 1999 Nature Genetics 23:147); "n" therefore represents a single nucleotide deletion at a position corresponding to nucleotide 3107 of SEQ ID NO:1 as provided herein.
gatcacaggtctatcaccctattaaccactcacgggagctctccatgcatttggtattttcgtctggggggtgtgcacgcgatagcattgcgagacgctggagccggagcaccctatgtcgcagtatctgtctttgattcctgcctcatcctattatttatcgcacctacgttcaatattacaggcgaacatacttactaaagtgtgttaattaattaatgcttgtaggacataataataacaattgaatgtctgcacagccgctttccacacagacatcataacaaaaaatttccaccaaaccccccctcccccccgcttctggccacagcacttaaacacatctctgccaaaccccaaaaacaaagaaccctaacaccagcctaaccagatttcaaattttatcttttggcggtatgcacttttaacagtcaccccccaactaacacattattttcccctcccactcccatactactaatctcatcaatacaacccccgcccatcctacccagcacacacacaccgctgctaaccccataccccgaaccaaccaaaccccaaagacaccccccacccagtttatgtagcttacctcctcaaagcaatacactgaaaatgtttagacgggctcacatcaccccataaacaaataggtttggtcctagcctttctattagctcttagtaagattacacatgcaagcatccccgttccagtgagttcaccctctaaatcaccacgatcaaaagggacaagcatcaagcacgcagcaatgcagctcaaaacgcttagcctagccacacccccacgggaaacagcagtgattaacctttagcaataaacgaaagtttaactaagctatactaaccccagggttggtcaatttcgtgccagccaccgcggtcacacgattaacccaagtcaatagaagccggcgtaaagagtgttttagatcaccccctccccaataaagctaaaactcacctgagttgtaaaaaactccagttgacacaaaatagactacgaaagtggctttaacatatctgaacacacaatagctaagacccaaactgggattagataccccactatgcttagccctaaacctcaacagttaaatcaacaaaactgctcgccagaacactacgagccacagcttaaaactcaaaggacctggcggtgcttcatatccctctagaggagcctgttctgtaatcgataaaccccgatcaacctcaccacctcttgctcagcctatataccgccatcttcagcaaaccctgatgaaggctacaaagtaagcgcaagtacccacgtaaagacgttaggtcaaggtgtagcccatgaggtggcaagaaatgggctacattttctaccccagaaaactacgatagcccttatgaaacttaagggtcgaaggtggatttagcagtaaactgagagtagagtgcttagttgaacagggccctgaagcgcgtacacaccgcccgtcaccctcctcaagtatacttcaaaggacatttaactaaaacccctacgcatttatatagaggagacaagtcgtaacatggtaagtgtactggaaagtgcacttggacgaaccagagtgtagcttaacacaaagcacccaacttacacttaggagatttcaacttaacttgaccgctctgagctaaacctagccccaaacccactccaccctactaccagacaaccttagccaaaccatttacccaaataaagtataggcgatagaaattgaaacctggcgcaatagatatagtaccgcaagggaaagatgaaaaattataaccaagcataatatagcaaggactaacccctataccttctgcataatgaattaactagaaataactttgcaaggagagccaaagctaagacccccgaaaccagacgagctacctaagaacagctaaaagagcacacccgtctatgtagcaaaatagtgggaagatttataggtagaggcgacaaacctaccgagcctggtgatagctggttgtccaagatagaatcttagttcaactttaaatttgcccacagaaccctctaaatccccttgtaaatttaactgttagtccaaagaggaacagctctttggacactaggaaaaaaccttgtagagagagtaaaaaatttaacacccatagtaggcctaaaagcagccaccaattaagaaagcgttcaagctcaacacccactacctaaaaaatcccaaacatataactgaactcctcacacccaattggaccaatctatcaccctatagaagaactaatgttagtataagtaacatgaaaacattctcctccgcataagcctgcgtcagattaaaacactgaactgacaattaacagcccaatatctacaatcaaccaacaagtcattattaccctcactgtcaacccaacacaggcatgctcataaggaaaggttaaaaaaagtaaaaggaactcggcaaatcttaccccgcctgtttaccaaaaacatcacctctagcatcaccagtattagaggcaccgcctgcccagtgacacatgtttaacggccgcggtaccctaaccgtgcaaaggtagcataatcacttgttccttaaatagggacctgtatgaatggctccacgagggttcagctgtctcttacttttaaccagtgaaattgacctgcccgtgaagaggcgggcatgacacagcaagacgagaagaccctatggagctttaatttattaatgcaaacagtacctaacaaacccacaggtcctaaactaccaaacctgcattaaaaatttcggttggggcgacctcggagcagaacccaacctccgagcagtacatgctaagacttcaccagtcaaagcgaactactatactcaattgatccaataacttgaccaacggaacaagttaccctagggataacagcgcaatcctattctagagtccatatcaacaatagggtttacgacctcgatgttggatcaggacatcccgatggtgcagccgctattaaaggttcgtttgttcaacgattaaagtcctacgtgatctgagttcagaccggagtaatccaggtcggtttctatctacnttcaaattcctccctgtacgaaaggacaagagaaataaggcctacttcacaaagcgccttcccccgtaaatgatatcatctcaacttagcattatacccacacccacccaagaacagggtttgttaagatggcagagcccggtaatcgcataaaacttaaaactttacagtcagaggttcaattcctcttcttaacaacatacccatggccaacctcctactcctcattgtacccattctaatcgcaatggcattcctaatgcttaccgaacgaaaaattctaggctatatacaactacgcaaaggccccaacgttgtaggcccctacgggctactacaacccttcgctgacgccataaaactcttcaccaaagagcccctaaaacccgccacatctaccatcaccctctacatcaccgccccgaccttagctctcaccatcgctcttctactatgaacccccctccccatacccaaccccctggtcaacctcaacctaggcctcctatttattctagccacctctagcctagccgtttactcaatcctctgatcagggtgagcatcaaactcaaactacgccctgatcggcgcactgcgagcagtagcccaaacaatctcatatgaagtcaccctagccatcattctactatcaacattactaataagtggctcctttaacctctccacccttatcacaacacaagaacacctctgattactcctgccatcatgacccttggccataatatgatttatctccacactagcagagaccaaccgaacccccttcgaccttgccgaaggggagtccgaactagtctcaggcttcaacatcgaatacgccgcaggccccttcgccctattcttcatagccgaatacacaaacattattataataaacaccctcaccactacaatcttcctaggaacaacatatgacgcactctcccctgaactctacacaacatattttgtcaccaagaccctacttctaacctccctgttcttatgaattcgaacagcatacccccgattccgctacgaccaactcatacacctcctatgaaaaaacttcctaccactcaccctagcattacttatatgatatgtctccatacccattacaatctccagcattccccctcaaacctaagaaatatgtctgataaaagagttactttgatagagtaaataataggagcttaaacccccttatttctaggactatgagaatcgaacccatccctgagaatccaaaattctccgtgccacctatcacaccccatcctaaagtaaggtcagctaaataagctatcgggcccataccccgaaaatgttggttatacccttcccgtactaattaatcccctggcccaacccgtcatctactctaccatctttgcaggcacactcatcacagcgctaagctcgcactgattttttacctgagtaggcctagaaataaacatgctagcttttattccagttctaaccaaaaaaataaaccctcgttccacagaagctgccatcaagtatttcctcacgcaagcaaccgcatccataatccttctaatagctatcctcttcaacaatatactctccggacaatgaaccataaccaatactaccaatcaatactcatcattaataatcataatggctatagcaataaaactaggaatagccccctttcacttctgagtcccagaggttacccaaggcacccctctgacatccggcctgcttcttctcacatgacaaaaactagcccccatctcaatcatataccaaatctctccctcactaaacgtaagccttctcctcactctctcaatcttatccatcatagcaggcagttgaggtggattaaaccaaacccagctacgcaaaatcttagcatactcctcaattacccacataggatgaataatagcagttctaccgtacaaccctaacataaccattcttaatttaactatttatattatcctaactactaccgcattcctactactcaacttaaactccagcaccacgaccctactactatctcgcacctgaaacaagctaacatgactaacacccttaattccatccaccctcctctccctaggaggcctgcccccgctaaccggctttttgcccaaatgggccattatcgaagaattcacaaaaaacaatagcctcatcatccccaccatcatagccgccatcaccctccttaacctctacttctacctacgcctaatctactccacctcaatcacactactccccatatctaacaacgtaaaaataaaatgacagtttgaacatacaaaacccaccccattcctccccacactcatcgcccttaccacgctactcctacctatctccccttttatactaataatcttatagaaatttaggttaaatacagaccaagagccttcaaagccctcagtaagttgcaatacttaatttctgtaacagctaaggactgcaaaaccccactctgcatcaactgaacgcaaatcagccactttaattaagctaagcccttactagaccaatgggacttaaacccacaaacacttagttaacagctaagcaccctaatcaactggcttcaatctacttctcccgccgccgggaaaaaaggcgggagaagccccggcaggtttgaagctgcttcttcgaatttgcaattcaatatgaaaatcacctcggagctggtaaaaagaggcctaacccctgtctttagatttacagtccaatgcttcactcagccattttacctcacccccactgatgttcgccgaccgttgactattctctacaaaccacaaagacattggaacactatacctattattcggcgcatgagctggagtcctaggcacagctctaagcctccttattcgagccgagctgggccagccaggcaaccttctaggtaacgaccacatctacaacgttatcgtcacagcccatgcatttgtaataatcttcttcatagtaatacccatcataatcggaggctttggcaactgactagttcccctaataatcggtgcccccgatatggcgtttccccgcataaacaacataagcttctgactcttacctccctctctcctactcctgctcgcatctgctatagtggaggccggagcaggaacaggttgaacagtctacccccccttagcagggaactactcccaccctggagcctccgtagacctaaccatcttctccttacacctagcaggtgtctcctctatcttaggggccatcaatttcatcacaacaattatcaatataaaaccccctgccataacccaataccaaacgcccctcttcgtctgatccgtcctaatcacagcagtcctacttctcctatctctcccagtcctagctgctggcatcactatactactaacagaccgcaacctcaacaccaccttcttcgaccccgccggaggaggagaccccattctataccaacacctattctgatttttcggtcaccctgaggtttatattcttatcctaccaggcttcggaataatctcccatattgtaacttactactccggaaaaaaagaaccatttggatacataggcatggtctgagctatgatatcaattggcttcctagggtttatcgtgtgagcacaccatatatttacagtaggaatagacgtagacacacgagcatatttcacctccgctaccataatcatcgctatccccaccggcgtcaaagtatttagctgactcgccacactccacggaagcaatatgaaatgatctgctgcagtgctctgagccctaggattcatctttcttttcaccgtaggtggcctgactggcattgtattagcaaactcatcactagacatcgtactacacgacacgtactacgttgtagctcacttccactatgtcctatcaataggagctgtatttgccatcataggaggcttcattcactgatttcccctattctcaggctacaccctagaccaaacctacgccaaaatccatttcactatcatattcatcggcgtaaatctaactttcttcccacaacactttctcggcctatccggaatgccccgacgttactcggactaccccgatgcatacaccacatgaaacatcctatcatctgtaggctcattcatttctctaacagcagtaatattaataattttcatgatttgagaagccttcgcttcgaagcgaaaagtcctaatagtagaagaaccctccataaacctggagtgactatatggatgccccccaccctaccacacattcgaagaacccgtatacataaaatctagacaaaaaaggaaggaatcgaaccccccaaagctggtttcaagccaaccccatggcctccatgactttttcaaaaaggtattagaaaaaccatttcataactttgtcaaagttaaattataggctaaatcctatatatcttaatggcacatgcagcgcaagtaggtctacaagacgctacttcccctatcatagaagagcttatcacctttcatgatcacgccctcataatcattttccttatctgcttcctagtcctgtatgcccttttcctaacactcacaacaaaactaactaatactaacatctcagacgctcaggaaatagaaaccgtctgaactatcctgcccgccatcatcctagtcctcatcgccctcccatccctacgcatcctttacataacagacgaggtcaacgatccctcccttaccatcaaatcaattggccaccaatggtactgaacctacgagtacaccgactacggcggactaatcttcaactcctacatacttcccccattattcctagaaccaggcgacctgcgactccttgacgttgacaatcgagtagtactcccgattgaagcccccattcgtataataattacatcacaagacgtcttgcactcatgagctgtccccacattaggcttaaaaacagatgcaattcccggacgtctaaaccaaaccactttcaccgctacacgaccgggggtatactacggtcaatgctctgaaatctgtggagcaaaccacagtttcatgcccatcgtcctagaattaattcccctaaaaatctttgaaatagggcccgtatttaccctatagcaccccctctaccccctctagagcccactgtaaagctaacttagcattaaccttttaagttaaagattaagagaaccaacacctctttacagtgaaatgccccaactaaatactaccgtatggcccaccataattacccccatactccttacactattcctcatcacccaactaaaaatattaaacacaaactaccacctacctccctcaccaaagcccataaaaataaaaaattataacaaaccctgagaaccaaaatgaacgaaaatctgttcgcttcattcattgcccccacaatcctaggcctacccgccgcagtactgatcattctatttccccctctattgatccccacctccaaatatctcatcaacaaccgactaatcaccacccaacaatgactaatcaaactaacctcaaaacaaatgataaccatacacaacactaaaggacgaacctgatctcttatactagtatccttaatcatttttattgccacaactaacctcctcggactcctgcctcactcatttacaccaaccacccaactatctataaacctagccatggccatccccttatgagcgggcgcagtgattataggctttcgctctaagattaaaaatgccctagcccacttcttaccacaaggcacacctacaccccttatccccatactagttattatcgaaaccatcagcctactcattcaaccaatagccctggccgtacgcctaaccgctaacattactgcaggccacctactcatgcacctaattggaagcgccaccctagcaatatcaaccattaaccttccctctacacttatcatcttcacaattctaattctactgactatcctagaaatcgctgtcgccttaatccaagcctacgttttcacacttctagtaagcctctacctgcacgacaacacataatgacccaccaatcacatgcctatcatatagtaaaacccagcccatgacccctaacaggggccctctcagccctcctaatgacctccggcctagccatgtgatttcacttccactccataacgctcctcatactaggcctactaaccaacacactaaccatataccaatgatggcgcgatgtaacacgagaaagcacataccaaggccaccacacaccacctgtccaaaaaggccttcgatacgggataatcctatttattacctcagaaatttttttcttcgcaggatttttctgagccttttaccactccagcctagcccctaccccccaattaggagggcactggcccccaacaggcatcaccccgctaaatcccctagaagtcccactcctaaacacatccgtattactcgcatcaggagtatcaatcacctgagctcaccatagtctaatagaaaacaaccgaaaccaaataattcaagcactgcttattacaattttactgggtctctattttaccctcctacaagcctcagagtacttcgagtctcccttcaccatttccgacggcatctacggctcaacattttttgtagccacaggcttccacggacttcacgtcattattggctcaactttcctcactatctgcttcatccgccaactaatatttcactttacatccaaacatcactttggcttcgaagccgccgcctgatactggcattttgtagatgtggtttgactatttctgtatgtctccatctattgatgagggtcttactcttttagtataaatagtaccgttaacttccaattaactagttttgacaacattcaaaaaagagtaataaacttcgccttaattttaataatcaacaccctcctagccttactactaataattattacattttgactaccacaactcaacggctacatagaaaaatccaccccttacgagtgcggcttcgaccctatatcccccgcccgcgtccctttctccataaaattcttcttagtagctattaccttcttattatttgatctagaaattgccctccttttacccctaccatgagccctacaaacaactaacctgccactaatagttatgtcatccctcttattaatcatcatcctagccctaagtctggcctatgagtgactacaaaaaggattagactgaaccgaattggtatatagtttaaacaaaacgaatgatttcgactcattaaattatgataatcatatttaccaaatgcccctcatttacataaatattatactagcatttaccatctcacttctaggaatactagtatatcgctcacacctcatatcctccctactatgcctagaaggaataatactatcgctgttcattatagctactctcataaccctcaacacccactccctcttagccaatattgtgcctattgccatactagtctttgccgcctgcgaagcagcagtgggcctagccctactagtctcaatctccaacacatatggcctagactacgtacataacctaaacctactccaatgctaaaactaatcgtcccaacaattatattactaccactgacatgactttccaaaaaacacataatttgaatcaacacaaccacccacagcctaattattagcatcatccctctactattttttaaccaaatcaacaacaacctatttagctgttccccaaccttttcctccgaccccctaacaacccccctcctaatactaactacctgactcctacccctcacaatcatggcaagccaacgccacttatccagtgaaccactatcacgaaaaaaactctacctctctatactaatctccctacaaatctccttaattataacattcacagccacagaactaatcatattttatatcttcttcgaaaccacacttatccccaccttggctatcatcacccgatgaggcaaccagccagaacgcctgaacgcaggcacatacttcctattctacaccctagtaggctcccttcccctactcatcgcactaatttacactcacaacaccctaggctcactaaacattctactactcactctcactgcccaagaactatcaaactcctgagccaacaacttaatatgactagcttacacaatagcttttatagtaaagatacctctttacggactccacttatgactccctaaagcccatgtcgaagcccccatcgctgggtcaatagtacttgccgcagtactcttgaaactaggcggctatggtataatacgcctcacactcattctcaaccccctgacaaaacacatagcctaccccttccttgtactatccctatgaggcataattataacaagctccatctgcctacgacaaacagacctaaaatcgctcattgcatactcttcaatcagccacatagccctcgtagtaacagccattctcatccaaaccccctgaagcttcaccggcgcagtcattctcataatcgcccacggacttacatcctcattactattctgcctagcaaactcaaactacgaacgcactcacagtcgcatcataatcctctctcaaggacttcaaactctactcccactaatagctttttgatgacttctagcaagcctcgctaacctcgccttaccccccactattaacctactgggagaactctctgtgctagtaaccacgttctcctgatcaaatatcactctcctacttacaggactcaacatactagtcacagccctatactccctctacatatttaccacaacacaatggggctcactcacccaccacattaacaacataaaaccctcattcacacgagaaaacaccctcatgttcatacacctatcccccattctcctcctatccctcaaccccgacatcattaccgggttttcctcttgtaaatatagtttaaccaaaacatcagattgtgaatctgacaacagaggcttacgaccccttatttaccgagaaagctcacaagaactgctaactcatgcccccatgtctaacaacatggctttctcaacttttaaaggataacagctatccattggtcttaggccccaagaattttggtgcaactccaaataaaagtaataaccatgtacactactataaccaccctaaccctaacttccctaattccccccatccttaccaccctcgttaaccctaacaaaaaaaactcatacccccattatgtaaaatccattgtcgcatccacctttattatcagtctcttccccacaacaatattcatgtgcctagaccaagaagttattatctcgaactgacactgagccacaacccaaacaacccagctctccctaagcttcaaactagactacttctccataatattcatccctgtagcattgttcgttacatggtccatcatagaattctcactgtgatatataaactcagacccaaacattaatcagttcttcaaatatctactcatcttcctaattaccatactaatcttagttaccgctaacaacctattccaactgttcatcggctgagagggcgtaggaattatatccttcttgctcatcagttgatgatacgcccgagcagatgccaacacagcagccattcaagcaatcctatacaaccgtatcggcgatatcggtttcatcctcgccttagcatgatttatcctacactccaactcatgagacccacaacaaatagcccttctaaacgctaatccaagcctcaccccactactaggcctcctcctagcagcagcaggcaaatcagcccaattaggtctccacccctgactcccctcagccatagaaggccccaccccagtctcagccctactccactcaagcactatagttgtagcaggaatcttcttactcatccgcttccaccccctagcagaaaatagcccactaatccaaactctaacactatgcttaggcgctatcaccactctgttcgcagcagtctgcgcccttacacaaaatgacatcaaaaaaatcgtagccttctccacttcaagtcaactaggactcataatagttacaatcggcatcaaccaaccacacctagcattcctgcacatctgtacccacgccttcttcaaagccatactatttatgtgctccgggtccatcatccacaaccttaacaatgaacaagatattcgaaaaataggaggactactcaaaaccatacctctcacttcaacctccctcaccattggcagcctagcattagcaggaatacctttcctcacaggtttctactccaaagaccacatcatcgaaaccgcaaacatatcatacacaaacgcctgagccctatctattactctcatcgctacctccctgacaagcgcctatagcactcgaataatccttctcaccctaacaggtcaacctcgcttccccacccttactaacattaacgaaaataaccccaccctactaaaccccattaaacgcctggcagccggaagcctattcgcaggatttctcattactaacaacatttcccccgcatcccccttccaaacaacaatccccctctacctaaaactcacagccctcgctgtcactttcctaggacttctaacagccctagacctcaactacctaaccaacaaacttaaaataaaatccccactatgcacattttatttctccaacatactcggattctaccctagcatcacacaccgcacaatcccctatctaggccttcttacgagccaaaacctgcccctactcctcctagacctaacctgactagaaaagctattacctaaaacaatttcacagcaccaaatctccacctccatcatcacctcaacccaaaaaggcataattaaactttacttcctctctttcttcttcccactcatcctaaccctactcctaatcacataacctattcccccgagcaatctcaattacaatatatacaccaacaaacaatgttcaaccagtaactactactaatcaacgcccataatcatacaaagcccccgcaccaataggatcctcccgaatcaaccctgacccctctccttcataaattattcagcttcctacactattaaagtttaccacaaccaccaccccatcatactctttcacccacagcaccaatcctacctccatcgctaaccccactaaaacactcaccaagacctcaacccctgacccccatgcctcaggatactcctcaatagccatcgctgtagtatatccaaagacaaccatcattccccctaaataaattaaaaaaactattaaacccatataacctcccccaaaattcagaataataacacacccgaccacaccgctaacaatcaatactaaacccccataaataggagaaggcttagaagaaaaccccacaaaccccattactaaacccacactcaacagaaacaaagcatacatcattattctcgcacggactacaaccacgaccaatgatatgaaaaaccatcgttgtatttcaactacaagaacaccaatgaccccaatacgcaaaattaaccccctaataaaattaattaaccgctcattcatcgacctccccaccccatccaacatctccgcatgatgaaacttcggctcactccttggcgcctgcctgatcctccaaatcaccacaggactattcctagccatgcactactcaccagacgcctcaaccgccttttcatcaatcgcccacatcactcgagacgtaaattatggctgaatcatccgctaccttcacgccaatggcgcctcaatattctttatctgcctcttcctacacatcgggcgaggcctatattacggatcatttctctactcagaaacctgaaacatcggcattatcctcctgcttgcaactatagcaacagccttcataggctatgtcctcccgtgaggccaaatatcattctgaggggccacagtaattacaaacttactatccgccatcccatacattggggcagacctagttcaatgaatctgaggaggctactcagtagacagtcccaccctcacacgattctttacctttcacttcatcttgcccttcattattgcagccctagcagcactccacctcctattcttgcacgaaacgggatcaaacaaccccctaggaatcacctcccattccgataaaatcaccttccacccttactacacaatcaaagacgccctcggcttacttctcttccttctctccttaatgacattaacactattctcaccagacctcctaggcgacccagacaattataccctagccaaccccttaaacacccctccccacatcaagcccgaatgatatttcctattcgcctacacaattctccgatccgtccctaacaaactaggaggcgtccttgccctattactatccatcctcatcctagcaataatccccatcctccatatatccaaacaacaaagcataatatttcgcccactaagccaatcactttattgactcctagccgcagacctcctcattctaacctgaatcggaggacaaccagtaagctacccttttaccatcattggacaagtagcatccgtactatacttcacaacaatcctaatcctaataccaactatctccctaattgaaaacaaaatactcaaatgggcctgtccttgtagtataaactaatacaccagtcttgtaaaccggagatgaaaacctttttccaaggacaaatcagagaaaaagtctttaactccaccattagcacccaaagctaagattctaatttaaactattctctgttctttcatggggaagcagatttgggtaccacccaagtattgactcacccatcaacaaccgctatgtatttcgtacattactgccagccaccatgaatattgtacggtaccataaatacttgaccacctgtagtacataaaaacccaatccacatcaaaaccccctccccatgcttacaagcaagtacagcaatcaaccctcaactatcacacatcaactgcaactccaaagtcacccctcacccattaggataccaacaaacctacccacccttaacagtacatagtacataaagccatttaccgtacatagcacattacagtcaaatcccttctcgtccccatggatgacccccctcagataggggtcccttggccaccatcctccgtgaaatcaatatcccgcacaagagtgctactctcctcgctccgggcccataacacttgggggtagctaaagtgaactgtatccgacatctggttcctacttcagggtcataaagcctaaatagcccacacgttccccttaaataagacatcacgatg

SEQ ID NO: 140 - DNA, 16568 bp, Homo sapiens mitochondrial
  3106: "n" refers to a nucleotide at position 3107 of the Cambridge Reference Sequence (CRS, Anderson et al. 1981 Nature 290:457-465), later determined to be absent from the human mtDNA sequence according to the revised CRS (rCRS, Andrews et al. 1999 Nature Genetics 23:147); "n" therefore represents a single nucleotide deletion at a position corresponding to nucleotide 3107 of SEQ ID NO:1 as provided herein.
gatcacaggtctatcaccctattaaccactcacgggagctctccatgcatttggtattttcgtttggggggtgtgcacgcgatagcattgcgagacgctggagccggagcaccctatgtcgcagtatctgtctttgattcctgccccatcctattatttatcgcacctacgttcaatattacaggcgaacatacttactaaagtgtgttaattaattaatgcttgtaggacatagtaataacaattgaatgtctgcacagccgctttccacacagacatcataacaaaaaatttccaccaaaccccccctcccccgccttctggccacagcacttaaacacatctctgccaaaccccaaaaacaaagaaccctaacaccagcctaaccagatttcaaattttatcttttggcggtatgcacttttaacagtcaccccccaactaacacattattttcccctcccactcccatactactaatctcatcaatacaacccccgcccatcctacccagcacacacaccgctgctaaccccataccccgaaccaaccaaaccccaaagacaccccccacagtttatgtagcttacctcctcaaagcaatacactgaaaatgtttagacgggctcacatcaccccataaacaaataggtttggtcctggcctttctattagctcttagtaagattacacatgcaagcatccccgttccagtgagttcaccctctaaatcaccacgatcaaaagggacaagcatcaagcacgcagcaatgcagctcaaaacgcttagcctagccacacccccacgggaaacagcagtgattaacctttagcaataaacgaaagtttaactaagctatactaaccccagggttggtcaatttcgtgccagccaccgcggtcacacgattaacccaagtcaatagaagccggcgtaaagagtgttttagatcaccccctccccaataaagctaaaactcacctgagttgtaaaaaactccagttgacacaaaatagactacgaaagtggctttaacatatctgaacacacaatagctaagacccaaactgggattagataccccactatgcttagccctaaacctcaacagttaaatcaacaaaactgctcgccagaacactacgagccacagcttaaaactcaaaggacctggcggtgcttcatatccctctagaggagcctgttctgtaatcgataaaccccgatcaacctcaccacctcttgctcagcctatataccgccatcttcagcaaaccctgatgaaggctacaaagtaagcgcaagtacccacgtaaagacgttaggtcaaggtgtagcccatgaggtggcaagaaatgggctacattttctaccccagaaaactacgatagcccttatgaaacttaagggtcgaaggtggatttagcagtaaactgagagtagagtgcttagttgaacagggccctgaagcgcgtacacaccgcccgtcaccctcctcaagtatacttcaaaggacatttaactaaaacccctacgcatttatatagaggagacaagtcgtaacatggtaagtgtactggaaagtgcacttggacgaaccagagtgtagcttaacacaaagcacccaacttacacttaggagatttcaacttaacttgaccgctctgagctaaacctagccccaaacccactccaccttactaccagacaaccttagccaaaccatttacccagataaagtataggcgatagaaattgaaacctggcgcaatagatatagtaccgcaagggaaagatgaaaaattataaccaagcataatatagcaaggactaacccctataccttctgcataatgaattaactagaaataactttgcaaggagagccaaagctaagacccccgaaaccagacgagctacctaagaacagctaaaagagcacacccgtctatgtagcaaaatagtgggaagatttataggtagaggcgacaaacctaccgagcctggtgatagctggttgtccaagatagaatcttagttcaactttaaatttgcccacagaaccctctaaatccccttgtaaatttaactgttagtccaaagaggaacagctctttggacactaggaaaaaaccttgtagagagagtaaaaaatttaacacccatagtaggcctaaaagcagccaccaattaagaaagcgttcaagctcaacacccactacctaaaaaatcccaaacatataactgaactcctcacacccaattggaccaatctatcaccctatagaagaactaatgttagtataagtaacatgaaaacattctcctccgcataagcctgcgtcagattaaaacactgaactgacaattaacagcccaatatctacaatcaaccaacaagtcattattaccctcactgtcaacccaacacaggcatgctcataaggaaaggttaaaaaaagtaaaaggaactcggcaaatcttaccccgcctgtttaccaaaaacatcacctctagcatcaccagtattagaggcaccgcctgcccagtgacacatgtttaacggccgcggtaccctaaccgtgcaaaggtagcataatcacttgttccttaaatagggacctgtatgaatggctccacgagggttcagctgtctcttacttttaaccagtgaaattgacctgcccgtgaagaggcgggcatgacacagcaagacgagaagaccctatggagctttaatttattaatgcaaacagtacctaacaaacccacaggtcctaaactaccaaacctgcattaaaaatttcggttggggcgacctcggagcagaacccaacctccgagcagtacatgctaagacttcaccagtcaaagcgaactactatactcaattgatccaataacttgaccaacggaacaagttaccctagggataacagcgcaatcctattctagagtccatatcaacaatagggtttacgacctcgatgttggatcaggacatcccgatggtgcagccgctattaaaggttcgtttgttcaacgattaaagtcctacgtgatctgagttcagaccggagtaatccaggtcggtttctatctacnttcaaattcctccctgtacgaaaggacaagagaaataaggcctacttcacaaagcgccttcccccgtaaatgatatcatctcaacttagtattatacccacacccacccaagaacagggtttgttaagatggcagagcccggtaatcgcataaaacttaaaactttacagtcagaggttcaattcctcttcttaacaacatacccatggccaacctcctactcctcattgtacccattctaatcgcaatggcattcctaatgcttaccgaacgaaaaattctaggctatatacaactacgcaaaggccccaacgttgtaggcccctacgggctactacaacccttcgctgacgccataaaactcttcaccaaagagcccctaaaacccgccacatctaccatcaccctctacatcaccgccccgaccttagctctcaccatcgctcttctactatgaacccccctccccatacccaaccccctggtcaacctcaacctaggcctcctatttattctagccacctctagcctagccgtttactcaatcctctgatcagggtgagcatcaaactcaaactacgccctgatcggcgcactgcgagcagtagcccaaacaatctcatatgaagtcaccctagccatcattctactatcaacattactaataagtggctcctttaacctctccacccttatcacaacacaagaacacctctgattactcctgccatcatgacccttggccataatatgatttatctccacactagcagagaccaaccgaacccccttcgaccttgccgaaggggagtccgaactagtctcaggcttcaacatcgaatacgccgcaggccccttcgccctattcttcatagccgaatacacaaacattattataataaacaccctcaccactacaatcttcctaggaacaacatatgacgcactctcccctgaactctacacaacatattttgtcaccaagaccctacttctaacctccctgttcttatgaattcgaacagcatacccccgattccgctacgaccaactcatacacctcctatgaaaaaacttcctaccactcaccctagcattacttatatgatatgtctccatacccattacaatctccagcatcccccctcaaacctaagaaatatgtctgataaaagagttactttgatagagtaaataataggagcttaaacccccttatttctaggactatgagaatcgaacccatccctgagaatccaaaattctccgtgccacctatcacaccccatcctaaagtaaggtcagctaaataagctatcgggcccataccccgaaaatgttggttatacccttcccgtactaattaatcccctggcccaacccgtcatctactctaccatctttgcaggcacactcatcacagcgctaagctcgcactgattttttacctgagtaggcctagaaataaacatgctagcttttattccagttctaaccaaaaaaataaaccctcgttccacagaagctgccatcaagtatttcctcacgcaagcaaccgcatccataatccttctaatagctatcctcttcaacaatatactctccggacaatgaaccataaccaatactaccaatcaatactcatcattaataatcataatggctatagcaataaaactaggaatagccccctttcacttctgagtcccagaggttgcccaaggcacccctctgacatccggcctgcttcttctcacatgacaaaaactagcccccatctcaatcatataccaaatctctccctcactaaacgtaagccttctcctcactctctcaatcttatccatcatagcaggcagttgaggtggattaaaccaaacccagctacgcaaaatcttagcatactcctcaattacccacataggatgaataatagcagttctaccgtacaaccctaacataaccattcttaatttaactatttatattatcctaactactaccgcattcctactactcaacttaaactccagcaccacgaccctactactatctcgcacctgaaacaagctaacatgactaacacccttaattccatccaccctcctctccctaggaggcctgcccccgctaaccggctttttgcccaaatgggccattatcgaagaattcacaaaaaacaatagcctcatcatccccaccatcatagccaccatcaccctccttaacctctacttctacctacgcctaatctactccacctcaatcacactactccccatatctaacaacgtaaaaataaaatgacagtttgaacatacaaaacccaccccattcctccccacactcatcgcccttaccacgctactcctacctatctccccttttatactaataatcttatagaaatttaggttaaatacagaccaagagccttcaaagccctcagtaagttgcaatacttaatttctgtaacagctaaggactgcaaaaccccactctgcatcaactgaacgcaaatcagccactttaattaagctaagcccttactagaccaatgggacttaaacccacaaacacttagttaacagctaagcaccctaatcaactggcttcaatctacttctcccgccgccgggaaaaaaggcgggagaagccccggcaggtttgaagctgcttcttcgaatttgcaattcaatatgaaaatcacctcggagctggtaaaaagaggcctaacccctgtctttagatttacagtccaatgcttcactcagccattttacctcacccccactgatgttcgccgaccgttgactattctctacaaaccacaaagacattggaacactatacctattattcggcgcatgagctggagtcctaggcacagctctaagcctccttattcgagccgagctgggccagccaggcaaccttctaggtaacgaccacatctacaacgttatcgtcacagcccatgcatttgtaataatcttcttcatagtaatacccatcataatcggaggctttggcaactgactagttcccctaataatcggtgcccccgatatggcgtttccccgcataaacaacataagcttctgactcttacctccctctctcctactcctgctcgcatctgctatagtggaggccggagcaggaacaggttgaacagtctaccctcccttagcagggaactactcccaccctggagcctccgtagacctaaccatcttctccttacacctagcaggtgtctcctctatcttaggggccatcaatttcatcacaacaattatcaatataaaaccccctgccataacccaataccaaacgcccctcttcgtctgatccgtcctaatcacagcagtcctacttctcctatctctcccagtcctagctgctggcatcactatactactaacagaccgcaacctcaacaccaccttcttcgaccccgccggaggaggagaccccattctataccaacacctattctgatttttcggtcaccctgaagtttatattcttatcctaccaggcttcggaataatctcccatattgtaacttactactccggaaaaaaagaaccatttggatacataggtatggtctgagctatgatatcaattggcttcctagggtttatcgtgtgagcacaccatatatttacagtaggaatagacgtagacacacgagcatatttcacctccgctaccataatcatcgctatccccaccggcgtcaaagtatttagctgactcgccacactccacggaagcaatatgaaatgatctgctgcagtgctctgagccctaggattcatctttcttttcaccgtaggtggcctgactggcattgtattagcaaactcatcactagacatcgtactacacgacacgtactacgttgtagctcacttccactatgtcctatcaataggagctgtatttgccatcataggaggcttcattcactgatttcccctattctcaggctataccctagaccaaacctacgccaaaatccatttcactatcatattcatcggcgtaaatctaactttcttcccacaacactttctcggcctatccggaatgccccgacgttactcggactaccccgatgcatacaccacatgaaacatcctatcatctgtaggctcattcatttctctaacagcagtaatattaataattttcatgatttgagaagccttcgcttcgaagcgaaaagtcctaatagtagaagaaccctccataaacctggagtgactatatggatgccccccaccctaccacacattcgaagaacccgtatacataaaatctagacaaaaaaggaaggaatcgaaccccccaaagctggtttcaagccaaccccatggcctccatgactttttcaaaaaggtattagaaaaaccatttcataactttgtcaaagttaaattataggctaaatcctatatatcttaatggcacatgcagcgcaagtaggtctacaagacgctacttcccctatcatagaagagcttatcacctttcatgatcacgccctcataatcattttccttatctgcttcctagtcctgtatgcccttttcctaacactcacaacaaaactaactaatactaacatctcagacgctcaggaaatagaaaccgtctgaactatcctgcccgccatcatcctagtcctcatcgccctcccatccctacgcatcctttacataacagacgaggtcaacgatccctcccttaccatcaaatcaattggccaccaatggtactgaacctacgagtacaccgactacggcggactaatcttcaactcctacatacttcccccattattcctagaaccaggcgacctgcgactccttgacgttgacaatcgagtagtactcccgattgaaacccccattcgtataataattacatcacaagacgtcttgcactcatgagctgtccccacattaggcttaaaaacagatgcaattcccggacgtctaaaccaaaccactttcaccgctacacgaccgggggtatactacggtcaatgctctgaaatctgtggagcaaaccacagtttcatgcccatcgtcctagaattaattcccctaaaaatctttgaaatagggcccgtatttaccctatagcaccccctctaccccctctagagcccactgtaaagctaacttagcattaaccttttaagttaaagattaagagaaccaacacctctttacagtgaaatgccccaactaaatactaccgtatggcccaccataattacccccatactccttacactattcctcatcacccaactaaaaatattaaacacaaactaccacctacctccctcaccaaagcccataaaaataaaaaattataacaaaccctgagaaccaaaatgaacgaaaatctgttcgcttcattcattgcccccacaatcctaggcctacccgccgcagtactgatcattctatttccccctctattgatccccacctccaaatatctcatcaacaaccgactaatcaccacccaacaatgactaatcaaactaacctcaaaacaaatgataaccatacacaacactaaaggacgaacctgatctcttatactagtatccttaatcatttttattgccacaactaacctcctcggactcctgccttactcatttacaccaaccacccaactatctataaacctagccatggccatccccttatgagcgggcgcagtgattataggctttcgctctaagattaaaaatgccctagcccacttcttaccacaaggcacacctacaccccttatccccatactagttattatcgaaaccatcagcctactcattcaaccaatagccctggccgtacgcctaaccgctaacattactgcaggccacctactcatgcacctaattggaagcgccaccctagcaatatcaaccattaaccttccctctacacttatcatcttcacaattctaattctactgactatcctagaaatcgctgtcgccttaatccaagcctacgttttcacacttctagtaagcctctacctgcacgacaacacataatgacccaccaatcacatgcctatcatatagtaaaacccagcccatgacccctaacaggggccctctcagccctcctaatgacctccggcctagccatgtgatttcacttccactccataacgctcctcatactaggcctactaaccaacacactaaccatataccaatgatggcgcgatgtaacacgagaaagcacataccaaggccaccacacaccacctgtccaaaaaggccttcgatacgggataatcctatttattacctcagaagtttttttcttcgcaggatttttctgagccttttaccactccagcctagcccctaccccccaattaggagggcactggcccccaacaggcatcaccccgctaaatcccctagaagtcccactcctaaacacatccgtattactcgcatcaggagtatcaatcacctgagctcaccatagtctaatagaaaacaaccgaaaccaaataattcaagcactgcttattacaattttactgggtctctattttaccctcctacaagcctcagagtacttcgagtctcccttcaccatttccgacggcatctacggctcaacattttttgtagccacaggcttccacggacttcacgtcattattggctcaactttcctcactatctgcttcatccgccaactaatatttcactttacatccaaacatcactttggcttcgaagccgccgcctgatactggcattttgtagatgtggtttgactatttctgtatgtctccatctattgatgagggtcttactcttttagtataaatagtaccgttaacttccaattaactagttttgacaacattcaaaaaagagtaataaacttcgccttaattttaataatcaacaccctcctagccttactactaataattattacattttgactaccacaactcaacggctacatagaaaaatccaccccttacgagtgcggcttcgaccctatatcccccgcccgcgtccctttctccataaaattcttcttagtagctattaccttcttattatttgatctagaaattgccctccttttacccctaccatgagccctacaaacaactaacctgccactaatagttatgtcatccctcttattaatcatcatcctagccctaagtctggcctatgagtgactacaaaaaggattagactgaaccgaattggtatatagtttaaacaaaacgaatgatttcgactcattaaattatgataatcatatttaccaaatgcccctcatttacataaatattatactagcatttaccatctcacttctaggaatactagtatatcgctcacacctcatatcctccctactatgcctagaaggaataatactatcgctgttcattatagctactctcataaccctcaacacccactccctcttagccaatattgtgcctattgccatactagtctttgccgcctgcgaagcagcggtgggcctagccctactagtctcaatctccaacacatatggcctagactacgtacataacctaaacctactccaatgctaaaactaatcgtcccaacaattatattactaccactgacatgactttccaaaaaacacataatttgaatcaacacaaccacccacagcctaattattagcatcatccctctactattttttaaccaaatcaacaacaacctatttagctgttccccaaccttttcctccgaccccctaacaacccccctcctaatactaactacctgactcctacccctcacaatcatggcaagccaacgccacttatccagtgaaccactatcacgaaaaaaactctacctctctatactaatctccctacaaatctccttaattataacattcacagccacagaactaatcatattttatatcttcttcgaaaccacacttatccccaccttggctatcatcacccgatgaggcaaccagccagaacgcctgaacgcaggcacatacttcctattctacaccctagtaggctcccttcccctactcatcgcactaatttacactcacaacaccctaggctcactaaacattctactactcactctcactgcccaagaactatcaaactcctgagccaacaacttaatatgactagcttacacaatagcttttatagtaaagatacctctttacggactccacttatgactccctaaagcccatgtcgaagcccccatcgctgggtcaatagtacttgccgcagtactcttaaaactaggcggctatggtataatacgcctcacactcattctcaaccccctgacaaaacacatagcctaccccttccttgtactatccctatgaggcataattataacaagctccatctgcctacgacaaacagacctaaaatcgctcattgcatactcttcaatcagccacatagccctcgtagtaacagccattctcatccaaaccccctgaagcttcaccggcgcagtcattctcataatcgcccacggacttacatcctcattactattctgcctagcaaactcaaactacgaacgcactcacagtcgcatcataatcctctctcaaggacttcaaactctactcccactaatagctttttgatgacttctagcaagcctcgctaacctcgccttaccccccactattaacctactgggagaactctctgtgctagtaaccacgttctcctgatcaaatatcactctcctacttacaggactcaacatactagtcacagccctatactccctctacatatttaccacaacacaatgaggctcactcacccaccacattaacaacataaaaccctcattcacacgagaaaacaccctcatgttcatacacctatcccccattctcctcctatccctcaaccccgacatcattaccgggttttcctcttgtaaatatagtttaaccaaaacatcagattgtgaatctgacaacagaggcttacgaccccttatttaccgagaaagctcacaagaactgctaactcatgcccccatgtctaacaacatggctttctcaacttttaaaggataacagctatccattggtcttaggccccaaaaattttggtgcaactccaaataaaagtaataaccatgcacactactataaccaccctaaccctgacttccctaattccccccatccttaccaccctcgttaaccctaacaaaaaaaactcatacccccattatgtaaaatccattgtcgcatccacctttattatcagtctcttccccacaacaatattcatgtgcctagaccaagaagttattatctcgaactgacactgagccacaacccaaacaacccagctctccctaagcttcaaactagactacttctccataatattcatccctgtagcattgttcgttacatggtccatcatagaattctcactgtgatatataaactcagacccaaacattaatcagttcttcaaatatctactcattttcctaattaccatactaatcttagttaccgctaacaacctattccaactgttcatcggctgagagggcgtaggaattatatccttcttgctcatcagttgatgatacgcccgagcagatgccaacacagcagccattcaagcaatcctatacaaccgtatcggcgatatcggtttcatcctcgccttagcatgatttatcctacactccaactcatgagacccacaacaaatagcccttctaaacgctaatccaagcctcaccccactactaggcctcctcctagcagcagcaggcaaatcagcccaattaggtctccacccctgactcccctcagccatagaaggccccaccccagtctcagccctactccactcaagcactatagttgtagcaggaatcttcttactcatccgcttccaccccctagcagaaaatagcccactaatccaaactctaacactatgcttaggcgctatcaccactctgttcgcagcagtctgcgcccttacacaaaatgacatcaaaaaaatcgtagccttctccacttcaagtcaactaggactcataatagttacaatcggcatcaaccaaccacacctagcattcctgcacatctgtacccacgccttcttcaaagccatactatttatgtgctccgggtccatcatccacaaccttaacaatgaacaagatattcgaaaaataggaggactactcaaaaccatacctctcacttcaacctccctcaccattggcagcctagcattagcaggaatacctttcctcacaggtttctactccaaagaccacatcatcgaaaccgcaaacatatcatacacaaacgcctgagccctatctattactctcatcgctacctccctgacaagcgcctatagcactcgaataattcttctcaccctaacaggtcaacctcgcttccccacccttactaacattaacgaaaataaccccaccctactaaaccccattaaacgcctgacagccggaagcctattcgcaggatttctcattactaacaacatttcccccgcatcccccttccaaacaacaatccccctctacctaaaactcacagccctcgctgtcactttcctaggacttctaacagccctagacctcaactacctaaccaacaaacttaaaataaaatccccactatgcacattttatttctccaacatactcggattctaccctagcatcacacaccgcacaatcccctatctaggccttcttacgagccaaaacctgcccctactcctcctagacctaacctgactagaaaagctattacctaaaacaatttcacagcaccaaatctccacctccatcatcacctcaacccaaaaaggcataattaaactttacttcctctctttcttcttcccactcatcctaaccctactcctaatcacataacctattcccccgagcaatctcaattacaatatatacaccaacaaacaatgttcaaccagtaactactactaatcaacgcccataatcatacaaagcccccgcaccaataggatcctcccgaatcaaccctgacccctctccttcataaattattcagcttcctacactattaaagtttaccacaaccaccaccccatcatactctttcacccacagcaccaatcctacctccatcgctaaccccactaaaacactcaccaagacctcaacccctgacccccatgcctcaggatactcctcaatagccatcgctgtagtatatccaaagacaaccatcattccccctaaataaattaaaaaaactattaaacccatataacctcccccaaaattcagaataataacacacccgaccacaccgctaacaatcaatactaaacccccataaataggagaaggcttagaagaaaaccccacaaaccccattactaaacccacactcaacagaaacaaagcatacatcattattctcgcacggactacaaccacgaccaatgatatgaaaaaccatcgttgtatttcaactacaagaacaccaatgaccccaatacgcaaaattaaccccctaataaaattaattaaccactcattcatcgacctccccaccccatccaacatctccgcatgatgaaacttcggctcactccttggcgcctgcctgatcctccaaatcaccacaggactattcctagccatgcactactcaccagacgcctcaaccgccttttcatcaatcgcccacatcactcgagacgtaaattatggctgaatcatccgctaccttcacgccaatggcgcctcaatattctttatctgcctcttcctacacatcgggcgaggcctatattacggatcatttctctactcagaaacctgaaacatcggcattatcctcctgcttgcaactatagcaacagccttcataggctatgtcctcccgtgaggccaaatatcattctgaggggccacagtaattacaaacttactatccgccatcccatacattgggacagacctagttcaatgaatctgaggaggctactcagtagacagtcccaccctcacacgattctttacctttcacttcatcttgcccttcattattgcagccctagcagcactccacctcctattcttgcacgaaacgggatcaaacaaccccctaggaatcacctcccattccgataaaatcaccttccacccttactacacaatcaaagacgccctcggcttacttctcttccttctctccttaatgacattaacactattctcaccagacctcctaggcgacccagacaattataccctagccaaccccttaaacacccctccccacatcaagcccgaatgatatttcctattcgcctacacaattctccgatccgtccctaacaaactaggaggcgtccttgccctattactatccatcctcatcctagcaataatccccatcctccatatatccaaacaacaaagcataatatttcgcccactaagccaatcactttattgactcctagccgcagacctcctcattctaacctgaatcggaggacaaccagtaagctacccttttaccatcattggacaagtagcatccgtactatacttcacaacaatcctaatcctaataccaactatctccctaattgaaaacaaaatactcaaatgggcctgtccttgtagtataaactaatacaccagtcttgtaaaccggagatgaaaacctttttccaaggacaaatcagagaaaaagtctttaactccaccattagcacccaaagctaagattctaatttaaactattctctgttctttcatggggaagcagatttgggtaccacccaagtattgactcacccatcaacaaccgctatgtatttcgtacattactgccagtcaccatgaatattgtacggtaccataaatacttgaccacctgtagtacataaaaacccaatccacatcaaaaccccccccccatgcttacaagcaagtacagcaatcaaccttcaactatcacacatcaactgcaactccaaagccacccctcacccactaggataccaacaaacctatccacccttaacagtacatagtacataaaaccatttaccgtacataacacattacagtcaaatcccttctcgcccccatggatgacccccctcagataggggtcccttgaccaccatcctccgtgaaatcaatatcccgcacaagagtgctactctcctcgctccgggcccataacacttgggggtagctaaagtgaactgtatccgacatctggttcctacttcagggccataaagcctaaatagcccacacgttccccttaaataagacatcacgatg

SEQ ID NO: 141 - DNA, 16568 bp, Homo sapiens mitochondrial
  3106: "n" refers to a nucleotide at position 3107 of the Cambridge Reference Sequence (CRS, Anderson et al. 1981 Nature 290:457-465), later determined to be absent from the human mtDNA sequence according to the revised CRS (rCRS, Andrews et al. 1999 Nature Genetics 23:147); "n" therefore represents a single nucleotide deletion at a position corresponding to nucleotide 3107 of SEQ ID NO:1 as provided herein.
gatcacaggtctatcaccctattaaccactcacgggagctctccatgcatttggtattttcgtctggggggtgtgcacgcgatagcattgcgagacgctggagccggagcaccctatgtcgcagtatctgtctttgattcctgcctcatcccattatttatcgcacctacgttcaatattacaggcgaacatacttactaaagtgtgttaattaattaatgcttgtaggacataataataacaattgaatgtctgcacagccgctttccacacagacatcataacaaaaaatttccaccaaaccccccctcccccgccttctggccacagcacttaaacacatctctgccaaaccccaaaaacaaagaaccctaacaccagcctaaccagatttcaaattttatcttttggcggtatgcacttttaacagtcaccccccaactaacacattattttcccctcccactcccatactactaatctcatcaatacaacccccgcccatcctacccagcacacacaccgctgctaaccccataccccgaaccaaccaaaccccaaagacaccccccacagtttatgtagcttacctcctcaaagcaatacactgaaaatgtttagacgggctcacatcaccccataaacaaataggtttggtcctagcctttctattagctcttagtaagattacacatgcaagcatccccgttccagtgagttcaccctctaaatcaccacgatcaaaagggacaagcatcaagcacgcagcaatgcagctcaaaacgcttagcctagccacacccccacgggaaacagcagtgattaacctttagcaataaacgaaagtttaactaagctatactaaccccagggttggtcaatttcgtgccagccaccgcggtcacacgattaacccaagccaatagaagccggcgtaaagagtgttttagatcaccccctccccaataaagctaaaactcacctgagttgtaaaaaactccagttgacacaaaatagactacgaaagtggctttaacatatctgaacacacaatagctaagacccaaactgggattagataccccactatgcttagccctaaacctcaacagttaaatcaacaaaactgctcgccagaacactacgagccacagcttaaaactcaaaggacctggcggtgcttcatatccctctagaggagcctgttctgtaatcgataaaccccgatcaacctcaccacctcttgctcagcctatataccgccatcttcagcaaaccctgatgaaggctacaaagtaagcgcaagtacccacgtaaagacgttaggtcaaggtgtagcccatgaggtggcaagaaatgggctacattttctaccccagaaaactacgatagcccttatgaaacttaagggtcgaaggtggatttagcagtaaactgagagtagagtgcttagttgaacagggccctgaagcgcgtacacaccgcccgtcaccctcctcaagtatacttcaaaggacatttaactaaaacccctacgcatttatatagaggagacaagtcgtaacatggtaagtgtactggaaagtgcacttggacgaaccagagtgtagcttaacacaaagcacccaacttacacttaggagatttcaacttaacttgaccgctctgagctaaacctagccccaaacccactccaccttactaccagacaaccttagccaaaccatttacccaaataaagtataggcgatagaaattgaaacctggcgcaatagatatagtaccgcaagggaaagatgaaaaattataaccaagcataatatagcaaggactaacccctataccttctgcataatgaattaactagaaataactttgcaaggagagccaaagctaagacccccgaaaccagacgagctacctaagaacagctaaaagagcacacccgtctatgtagcaaaatagtgggaagatttataggtagaggcgacaaacctaccgagcctggtgatagctggttgtccaagatagaatcttagttcaactttaaatttgcccacagaaccctctaaatccccttgtaaatttaactgttagtccaaagaggaacagctctttggacactaggaaaaaaccttgtagagagagtaaaaaatttaacacccatagtaggcctaaaagcagccaccaattaagaaagcgttcaagctcaacacccactacctaaaaaatcccaaacatataactgaactcctcacacccaattggaccaatctatcaccctatagaagaactaatgttagtataagtaacatgaaaacattctcctccgcataagcctgcgtcagattaaaacactgaactgacaattaacagcccaatatctacaatcaaccaacaagtcattattaccctcactgtcaacccaacacaggcatgctcataaggaaaggttaaaaaaagtaaaaggaactcggcaaatcttaccccgcctgtttaccaaaaacatcacctctagcatcaccagtattagaggcaccgcctgcccagtgacacatgtttaacggccgcggtaccctaaccgtgcaaaggtagcataatcacttgttccttaaatagggacctgtatgaatggctccacgagggttcagctgtctcttacttttaaccagtgaaattgacctgcccgtgaagaggcgggcatgacacagcaagacgagaagaccctatggagctttaatttattaatgcaaacagtacctaacaaacccacaggtcctaaactaccaaacctgcattaaaaatttcggttggggcgacctcggagcagaacccaacctccgagcagtacatgctaagacttcaccagtcaaagcgaactactatactcaattgatccaacaacttgaccaacggaacaagttaccctagggataacagcgcaatcctattctagagtccatatcaacaatagggtttacgacctcgatgttggatcaggacatcccgatggtgcagccgctattaaaggttcgtttgttcaacgattaaagtcctacgtgatctgagttcagaccggagtaatccaggtcggtttctatctacnttcaaattcctccctgtacgaaaggacaagagaaataaggcctacttcacaaagcgccttcccccgtaaatgatatcatctcaacttagtattatgcccacacccacccaagaacagggtttgttaagatggcagagcccggtaatcgcataaaacttaaaactttacagtcagaggttcaattcctcttcttaacaacatacccatggccaacctcctactcctcattgtacccattctaatcgcaatggcattcctaatgcttaccgaacgaaaaattctaggctatatacaactacgcaaaggccccaacgttgtaggcccctacgggctactacaacccttcgctgacgccataaaactcttcaccaaagagcccctaaaacccgccacatctaccatcaccctctacatcaccgccccgaccttagctctcaccatcgctcttctactatgaacccccctccccatacccaaccccctggtcaacctcaacctaggcctcctatttattctagccacctctagcctagccgtttactcaatcctctgatcagggtgagcatcaaactcaaactacgccctgatcggcgcactgcgagcagtagcccaaacaatctcatatgaagtcaccctagccatcattctactatcaacattactaataagtggctcctttaacctctccacccttatcacaacacaagaacacctctgattactcctgccatcatgacccttggccataatatgatttatctccacactagcagagaccaaccgaacccccttcgaccttgccgaaggggagtccgaactagtctcaggcttcaacatcgaatacgccgcaggccccttcgccctattcttcatagccgaatacacaaacattattataataaacaccctcaccactacaatcttcctaggaacaacatatgacgcactctcccctgaactctacacaacatattttgtcaccaagaccctacttctaacctccctgttcttatgaattcgaacagcatacccccgattccgctacgaccaactcatacacctcctatgaaaaaacttcctaccactcaccctagcattacttatatgatatgtctccatacccattacaatctccagcattccccctcaaacctaagaaatatgtctgataaaagagttactttgatagagtaaataataggagcttaaacccccttatttctaggactatgagaatcgaacccatccctgagaatccaaaattctccgtgccacctatcacaccccatcctaaagtaaggtcagctaaataagctatcgggcccataccccgaaaatgttggttatacccttcccgtactaattaatcccctggcccaacccgtcatctactctaccatctttgcaggcacactcatcacagcgctaagctcgcactgattttttacctgagtaggcctagaaataaacatgctagcttttattccagttctaaccaaaaaaataaaccctcgttccacagaagctgccatcaagtatttcctcacgcaagcaaccgcatccataatccttctaatagctatcctcttcaacaatatactctccggacaatgaaccataaccaatactaccaatcaatactcatcattaataatcataatggctatagcaataaaactaggaatagccccctttcacttctgagtcccagaggttacccaaggcacccctctgacatccggcctgcttcttctcacatgacaaaaactagcccccatctcaatcatataccaaatctctccctcactaaacgtaagccttctcctcactctctcaatcttatccatcatagcaggcagttgaggtggattaaaccaaacccagctacgcaaaatcttagcatactcctcaattacccacataggatgaataatagcagttctaccgtacaaccctaacataaccattcttaatttaactatttatattatcctaactactaccgcattcctactactcaacttaaactccagcaccacaaccctactactatctcgcacctgaaacaagctaacatgactaacacccttaattccatccaccctcctctccctaggaggcctgcccccgctaaccggctttttgcccaaatgggccattatcgaagaattcacaaaaaacaatagcctcatcatccccaccatcatagccaccatcaccctccttaacctctacttctacctacgcctaatctactccacctcgatcacactactccccatatctaacaacgtaaaaataaaatgacagtttgaacatacaaaacccaccccattcctccccacactcatcgcccttaccacgctactcctacctatctccccttttatactaataatcttatagaaatttaggttaaatacagaccaagagccttcaaagccctcagtaagttgcaatacttaatttctgtaacagctaaggactgcaaaaccccactctgcatcaactgaacgcaaatcagccactttaattaagctaagcccttactagaccaatgggacttaaacccacaaacacttagttaacagctaagcaccctaatcaactggcttcaatctacttctcccgccgccgggaaaaaaggcgggagaagccccggcaggtttgaagctgcttcttcgaatttgcaattcaatatgaaaatcacctcggagctggtaaaaagaggcctaacccctgtctttagatttacagtccaatgcttcactcagccattttacctcacccccactgatgttcgccgaccgttgactattctctacaaaccacaaagacattggaacactatacctattattcggcgcatgagctggagtcctaggcacagctctaagcctccttattcgagccgagctgggccagccaggcaaccttctaggtaacgaccacatctacaacgttatcgtcacagcccatgcatttgtaataatcttcttcatagtaatacccatcataatcggaggctttggcaactgactagttcccctaataatcggtgcccccgatatggcgtttccccgcataaacaacataagcttctgactcttacctccctctctcctactcctgctcgcatctgctatagtggaggccggagcaggaacaggttgaacagtctaccctcccttagcagggaactactcccaccctggagcctccgtagacctaaccatcttctccttacacctagcaggtgtctcctctatcttaggggccatcaatttcatcacaacaattatcaatataaaaccccctgccataacccaataccaaacgcccctcttcgtctgatccgtcctaatcacagcagtcctacttctcctatctctcccagtcctagctgctggcatcactatactactaacagaccgcaacctcaacaccaccttcttcgaccccgccggaggaggagaccccattctataccaacacctattctgatttttcggtcaccctgaagtttatattcttatcctaccaggcttcggaataatctcccatattgtaacctactactccggaaaaaaagaaccatttggatacataggtatggtctgagctatgatatcaattggcttcctagggtttatcgtgtgagcacaccatatatttacagtaggaatagacgtagacacacgagcatatttcacctccgctaccataatcatcgctatccccaccggcgtcaaagtatttagctgactcgccacactccacggaagcaatatgaaatgatctgctgcagtgctctgagccctaggattcatctttcttttcaccgtaggtggcctgactggcattgtattagcaaactcatcactagacatcgtactacacgacacgtactacgttgtagctcacttccactatgtcctatcaataggagctgtatttgccatcataggaggcttcattcactgatttcccctattctcaggctacaccctagaccaaacctacgccaaaatccatttcactatcatattcatcggcgtaaatctaactttcttcccacaacactttctcggcctatccggaatgccccgacgttactcggactaccccgatgcatacaccacatgaaacatcctatcatctgtaggctcattcatttctctaacagcagtaatattaataattttcatgatttgagaagccttcgcttcgaagcgaaaagtcctaatagtagaagaaccctccataaacctggagtgactatatggatgccccccaccctaccacacattcgaagagcccgtatacataaaatctagacaaaaaaggaaggaatcgaaccccccaaagctggtttcaagccaaccccatggcctccatgactttttcaaaaaggtattagaaaaaccatttcataactttgtcaaagttaaattataggctaaatcctatatatcttaatggcacatgcagcgcaagtaggtctacaagacgctacttcccctatcatagaagagcttatcacctttcatgatcacgccctcataatcattttccttatctgcttcctagtcctgtatgcccttttcctaacactcacaacaaaactaactaatactaacatctcagacgctcaggaaatagaaaccgtctgaactatcctgcccgccatcatcctagtcctcatcgccctcccatccctacgcatcctttacataacagacgaggtcaacgatccctcccttaccatcaaatcaattggccaccaatggtactgaacctacgagtacaccgactacggcggactaatcttcaactcctacatacttcccccattattcctagaaccaggcgacctgcgactccttgacgttgacaatcgagtagtactcccgattgaagcccccattcgtataataattacatcacaagacgtcttgcactcatgagctgtccccacattaggcttaaaaacagatgcaattcccggacgtctaaaccaaaccactttcaccgctacacgaccgggggtatactacggtcaatgctctgaaatctgtggagcaaaccacagtttcatgcccatcgtcctagaattaattcccctaaaaatctttgaaatagggcccgtatttaccctatagcaccccctctaccccctctagagcccactgtaaagctaacttagcattaaccttttaagttaaagattaagagaaccaacacctctttacagtgaaatgccccaactaaatactaccgtatggcccaccataattacccccatactccttacactattcctcatcacccaactaaaaatattaaacacaaactaccacctacctccctcaccaaagcccataaaaataaaaaattataacaaaccctgagaaccaaaatgaacgaaaatctgttcgcttcattcattgcccccacaatcctaggcctacccgccgcagtactgatcattctatttccccctctattgacccccacctccaaatatctcatcaacaaccgactaatcaccacccaacaatgactaatcaaactaacctcaaaacaaatgatagccatacacaacactaaaggacgaacctgatctcttatactagtatccttaatcatttttattgccacaactaacctcctcggactcctgcctcactcatttacaccaaccacccaactatctataaacctagccatggccatccccttatgagcgggcgcagtgattataggctttcgctctaagattaaaaatgccctagcccacttcttaccacaaggcacacctacaccccttatccccatactagttattatcgaaaccatcagcctactcattcaaccaatagccctggccgtacgcctaaccgctaacattactgcaggccacctactcatgcacctaattggaagcgccaccctagcaatatcaaccattaaccttccctctacacttatcatcttcacaatcctaattctactgactatcctagaaatcgctgtcgccttaatccaagcctacgttttcacacttctagtaagcctctacctgcacgacaacacataatgacccaccaatcacatgcctatcatatagtaaaacccagcccatggcccctaacaggggccctctcagccctcctaatgacctccggcctagccatgtgatttcacttccactccataacgctcctcatactaggcctactaaccaacacactaaccatataccaatgatggcgcgatgtaacacgagaaagcacataccaaggccaccacacaccacctgtccaaaaaggccttcgatacgggataatcctatttattacctcagaagtttttttcttcgcaggatttttctgagccttttaccactccagcctagcccctaccccccaactaggagggcactggcccccaacaggcatcaccccgctaaatcccctagaagtcccactcctaaacacatccgtattactcgcatcaggagtatcaatcacctgagctcaccatagtctaatagaaaacaaccgaaaccaaataattcaagcactgcttattacaattttactgggtctctattttactctcctacaagcctcagagtacttcgagtctcccttcaccatttccgacggcatctacggctcaacattttttgtagccacaggcttccacggacttcacgtcattattggctcaactttcctcactatctgcttcatccgccaactaatatttcactttacatccaaacatcactttggcttcgaagccgccgcctgatactgacattttgtagatgtggtttgactatttctgtatgtctccatctattgatgagggtcttactcttttagtataaatagtaccgttaacttccaattaactagttttgacaacattcaaaaaagagtaataaacttcgccttaattttaataatcaacaccctcctagccttactactaataattattacattttgactaccacaactcaacggctacatagaaaaatccaccccttacgagtgcggcttcgaccctatatcccccgcccgcgtccctttctccataaaattcttcttagtagctattaccttcttattatttgatctagaaattgccctccttttacccctaccatgagccctacaaacaactaacctgccactaatagttatgtcatccctcttattaatcatcatcctagccctaagtctggcctatgagtgactacaaaaaggattagactgagccgaattggtatatagtttaaacaaaacgaatgatttcgactcattaaattatgataatcatatttaccaaatgcccctcatttacataaatattatactagcatttaccatctcacttctaggaatactagtatatcgctcacacctcatatcctccctactatgcctagaaggaataatactatcgctgttcattatagctactctcataaccctcaacacccactccctcttagccaatattgtgcctattgccatactagtctttgccgcctgcgaagcagcggtgggcctagccctactagtctcaatctccaacacatatggcctagactacgtacataacctaaacctactccaatgctaaaactaatcgtcccaacaattatattactaccactgacatgactttccaaaaaacacataatttgaatcaacacaaccacccacagcctaattattagcatcatccccctactattttttaaccaaatcaacaacaacctatttagctgttccccaaccttttcctccgaccccctaacaacccccctcctaatactaactacctgactcctacccctcacaatcatggcaagccaacgccacttatccagtgaaccactatcacgaaaaaaactctacctctctatactaatctccctacaaatctccttaattataacattcacagccacagaactaatcatattttatatcttcttcgaaaccacacttatccccaccttggctatcatcacccgatgaggcaaccagccagaacgcctgaacgcaggcacatacttcctattctacaccctagtaggctcccttcccctgctcatcgcactaatttacactcacaacaccctaggctcactaaacattctactactcactctcactgcccaagaactatcaaactcctgagccaacaacttaatatgactagcttacacaatagcttttatagtaaagatacctctttacggactccacttatgactccctaaagcccatgtcgaagcccccatcgctgggtcaatagtacttgccgcagtactcttaaaactaggcggctatggtataatacgcctcacactcattctcaaccccctgacaaaacacatagcctaccccttccttgtactatccctatgaggcataattataacaagctccatctgcctacgacaaacagacctaaaatcgctcattgcatactcttcaatcagccacatagccctcgtagtaacagccattctcatccaaaccccctgaagcttcaccggcgcagtcattctcataatcgcccacggacttacatcctcattactattctgcctagcaaactcaaactacgaacgcactcacagtcgcatcataatcctctctcaaggacttcaaactctactcccactaatagctttttgatgacttctagcaagcctcgctaacctcgccttaccccccactattaacctactgggagaactctctgtgctagtaaccacgttctcctgatcaaatatcactctcctacttacaggactcaacatactagtcacagccctatactccctctacatatttaccacaacacaatggggctcactcacccaccacattaacaacataaaaccctcattcacacgagaaaacaccctcatgttcatacacctatcccccattctcctcctatccctcaaccccgacatcattaccgggttttcctcttgtaaatatagtttaaccaaaacatcagattgtgaatctgacaacagaggcttacgaccccttatttaccgagaaagctcacaagaactgctaactcatgcccccatgtctaacaacatggctttctcaacttttaaaggataacagctatccattggtcttaggccccaaaaattttggtgcaactccaaataaaagtaataaccatgcacactactataaccaccctaaccctgacttccctaattccccccatccttaccaccctcgttaaccctaacaaaaaaaactcatacccccattatgtaaaatccattgtcgcatccacctttattatcagtctcttccccacaacaatattcatgtgcctagaccaagaagttattatctcgaactgacactgagccacaacccaaacaacccagctctccctaagcttcaaactagactacttctccataatattcatccctgtagcattgttcgttacatggtccatcatagaattctcactgtgatatataaactcagacccaaacattaatcagttcttcaaatatctactcattttcctaattaccatactaatcttagttaccgctaacaacctattccaactgttcatcggctgagagggcgtaggaattatatccttcttgctcatcagttgatgatacgcccgagcagatgccaacacagcagccattcaagcaatcctatacaaccgtatcggtgatatcggtttcatcctcgccttagcatgatttatcctacactccaactcatgagacccacaacaaatagcccttctaaacgctaatccaagcctcaccccactactaggcctcctcctagcagcagcaggcaaatcagcccaattaggtctccacccctgactcccctcagccatagaaggccccaccccagtctcagccctactccactcaagcactatagttgtagcaggagtcttcttactcatccgcttccaccccctagcagaaaatagcccactaatccaaactctaacactatgcttaggcgctatcaccactctgttcgcagcagtctgcgcccttacacaaaatgacatcaaaaaaatcgtagccttctccacttcaagtcaactaggactcataatagttacaatcggcatcaaccaaccacacctagcattcctgcacatctgtacccacgccttcttcaaagccatactatttatgtgctccgggtccatcatccacaaccttaacaatgaacaagatattcgaaaaataggaggactactcaaaaccatacctctcacttcaacctccctcaccattggcagcctagcattagcaggaatacctttcctcacaggtttctactccaaagaccacatcatcgaaaccgcaaacatatcgtacacaaacgcctgagccctatctattactctcatcgctacctccctgacaagcgcctatagcactcgaataattcttctcaccctaacaggtcaacctcgcttccccacccttactaacattaacgaaaataaccccaccctactaaaccccattaaacgcctggcagccggaagcctattcgcaggatttctcattactaacaacatttcccccgcatcccccttccaaacaacaatccccctctacctaaaactcacagccctcgctgtcactttcctaggacttctaacagccctagacctcaactacctaaccaacaaacttaaaataaaatccccaccatgcacattttatttctccaacatactcggattctaccctagcatcacacaccgcacaatcccctatctaggccttcttacgagccaaaacctgcccctactcctcctagacctaacctgactagaaaagctattacctaaaacaatttcacagcaccaaatctccacctccatcatcacctcaacccaaaaaggcataattaaactttacttcctctctttcttcttcccactcatcctaaccctactcctaatcacataacctattcccccgagcaatctcaattacaatatatacaccaacaaacaatgttcaaccagtaactactactaatcaacgcccataatcatacaaagcccccgcaccaataggatcctcccgaatcaaccctgacccttctccttcataaattattcagcttcctacactattaaagtttaccacaaccaccaccccatcatactctttcacccacagcaccaatcctacctccatcgctaaccccactaaaacactcaccaagacctcaacccctgacccccatgcctcaggatactcctcaatagccatcgctgtagtatatccaaagacaaccatcattccccctaaataaattaaaaaaactattaaacccatataacctcccccaaaattcagaataataacacacccgaccacaccgctaacaatcaatactaaacccccataaataggagaaggcttagaagaaaaccccacaaaccccattactaaacccacactcaacagaaacaaagcatacatcattattctcgcacggactacaaccacgaccaatgatatgaaaaaccatcgttgtatttcaactacaagaacaccaatgaccccaatacgcaaaattaaccccctaataaaattaattaaccactcattcatcgacctccccaccccatccaacatctccgcatgatgaaacttcggctcactccttggcgcctgcctgatcctccaaatcaccacaggactattcctagccatgcactactcaccagacgcctcaaccgccttttcatcaatcgcccacatcactcgagacgtaaattatggctgaatcatccgctaccttcacgccaatggcgcctcaatattctttatctgcctcttcctacacatcgggcgaggcctatattacggatcatttctctactcagaaacctgaaacatcggcattatcctcctgcttgcaactatagcaacagccttcataggctatgtcctcccgtgaggccaaatatcattctgaggggccacagtaattacaaacttactatccgccatcccatacattgggacagacctagttcaatgaatctgaggaggctactcagtagacagtcccaccctcacacgattctttacctttcacttcatcttacccttcattattgcagccctagcagcactccacctcctattcttgcacgaaacgggatcaaacaaccccctaggaatcacctcccattccgataaaatcaccttccacccttactacacaatcaaagacgccctcggcttacttctcttccttctctccttaatgacattaacactattctcaccagacctcctgggcgacccagacaattataccctagccaaccccttaaacacccctccccacatcaagcccgaatgatatttcctattcgcctacacaattctccgatccgtccctaacaaactaggaggcgtccttgccctattactatccatcctcatcctagcaataatccccatcctccatatatccaaacaacaaagcataatatttcgcccactaagccaatcactttattgactcctagccgcagacctcctcattctaacctgaatcggaggacaaccagtaagctacccttttaccatcattggacaagtagcatccgtactatacttcacaacaatcctaatcctaataccaactatctccctaattgaaaacaaaatactcaaatgggcctgtccttgtagtataaactaatacaccagtcttgtaaaccggagatgaaaacctttttccaaggacaaatcagagaaaaagtctttaactccaccattagcacccaaagctaagattctaatttaaactattctctgttctttcatggggaagcagatttgggtaccacccaagtattgactcacccatcaacaaccgctatgtatctcgtacattactgccagccaccatgaatatcgtacggtaccataaatacttgaccacctgtagtacataaaagcccaatccacatcaaaaccccctccccatgcttacaagcaagtacagcaatcaaccttcaactatcacacatcaactgcaactccaaagccacccctcacccactaggataccaacaaacctacccacccttaacagtacatagtacataaagccatttaccgtacatagcacattacagtcaaatcccttctcgtccccatggatgacccccctcagataggggtcccttgaccaccatcctccgtgaaatcaatatcccgcacaagagtgctactctcctcgctccgggcccataacacttgggggtagctaaagtgaactgtatccgacatctggttcctacttcagggtcataaagcctaaatagcccacacgttccccttaaataagacatcacgatg

SEQ ID NO: 142 - DNA, 16572 bp, Homo sapiens mitochondrial
  3110: "n" refers to a nucleotide at position 3107 of the Cambridge Reference Sequence (CRS, Anderson et al. 1981 Nature 290:457-465), later determined to be absent from the human mtDNA sequence according to the revised CRS (rCRS, Andrews et al. 1999 Nature Genetics 23:147); "n" therefore represents a single nucleotide deletion at a position corresponding to nucleotide 3107 of SEQ ID NO:1 as provided herein.
gatcacaggtctatcaccctattaaccactcacgggagctctccatgcatttggtattttcgtctggggggtgtgcacgcgatagcattgcgagacgctggagccggagcaccctatgtcgcagtatctgtctttgattcctgcctcatcctattatttatcgcacctacgttcaatattacaggcgaacatacttactaaagtgtgttaattaattaatgcttgtaggacataataataacaattgaatgtctgcacagccgctttccacacagacatcataacaaaaaatttccaccaaaccccccctcccccccgcttctggccacagcacttaaacacatctctgccaaaccccaaaaacaaagaaccctaacaccagcctaaccagatttcaaattttatcttttggcggtatgcacttttaacagtcaccccccaactaacacattattttcccctcccactcccatactactaatctcatcaacacaacccccgcccatcctacccagcacacacacaccgctgctaaccccataccccgaaccaaccaaaccccaaagacaccccccaccagtttatgtagcttacctcctcaaagcaatacactgaaaatgtttagacgggctcacatcaccccataaacaaataggtttggtcctagcctttctattagctcttagtaagattacacatgcaagcatccccgttccagtgagttcaccctctaaatcaccacgatcaaaagggacaagcatcaagcacgcagcaatgcagctcaaaacgcttagcctagccacacccccacgggaaacagcagtgattaacctttagcaataaacgaaagtttaactaagctatactaaccccagggttggtcaatttcgtgccagccaccgcggtcacacgattaacccaagtcaatagaagccggcgtaaagagtgttttagatcaccccctccccaataaagctaaaactcacctgagttgtaaaaaactccagttgacacaaaatagactacgaaagtggctttaacatatctgaacacacaatagctaagacccaaactgggattagataccccactatgcttagccctaaacctcaacagttaaatcaacaaaactgctcgccagaacactacgagccacagcttaaaactcaaaggacctggcggtgcttcatatccctctagaggagcctgttctgtaatcgataaaccccgatcaacctcaccacctcttgctcagcctatataccgccatcttcagcaaaccctgatgaaggctacaaagtaagcgcaagtacccacgtaaagacgttaggtcaaggtgtagcccatgaggtggcaagaaatgggctacattttctaccccagaaaactacgatagcccttatgaaacttaagggtcgaaggtggatttagcagtaaactgagagtagagtgcttagttgaacagggccctgaagcgcgtacacaccgcccgtcaccctcctcaagtatacttcaaaggacatttaactaaaacccctacgcatttatatagaggagacaagtcgtaacatggtaagtgtactggaaagtgcacttggacgaaccagagtgtagcttaacacaaagcacccaacttacacttaggagatttcaacttaacttgaccgctctgagctaaacctagccccaaacccactccaccttactaccagacaaccttagccaaaccatttacccaaataaagtataggcgatagaaattgaaacctggcgcaatagatatagtaccgcaagggaaagatgaaaaattataaccaagcataatatagcaaggactaacccctataccttctgcataatgaattaactagaaataactttgcaaggagagccaaagctaagacccccgaaaccagacgagctacctaagaacagctaaaagagcacacccgtctatgtagcaaaatagtgggaagatttataggtagaggcgacaaacctaccgagcctggtgatagctggttgtccaagatagaatcttagttcaactttaaatttgcccacagaaccctctaaatccccttgtaaatttaattgttagtccaaagaggaacagctctttggacactaggaaaaaaccttgtagagagagtaaaaaatttaacacccatagtaggcctaaaagcagccaccaattaagaaagcgttcaagctcaacacccactacctaaaaaatcccaaacatataactgaactcctcacacccaattggaccaatctatcaccctatagaagaactaatgttagtataagtaacatgaaaacattctcctccgcataagcctgcgtcagattaaaacactgaactgacaattaacagcccaatatctacaatcaaccaacaagtcattattaccctcactgtcaacccaacacaggcatgctcataaggaaaggttaaaaaaagtaaaaggaactcggcaaatcttaccccgcctgtttaccaaaaacatcacctctagcatcaccagtattagaggcaccgcctgcccagtgacacatgtttaacggccgcggtaccctaaccgtgcaaaggtagcataatcacttgttccttaaatagggacctgtatgaatggctccacgagggttcagctgtctcttacttttaaccagtgaaattgacctgcccgtgaagaggcgggcatgacacagcaagacgagaagaccctatggagctttaatttattaatgcaaacagtacctaacaaacccacaggtcctaaactaccaaacctgcattaaaaatttcggttggggcgacctcggagcagaacccaacctccgagcagtacatgctaagacttcaccagtcaaagcgaactactatactcaattgatccaataacttgaccaacggaacaagttaccctagggataacagcgcaatcctattctagagtccatatcaacaatagggtttacgacctcgatgttggatcaggacatcccaatggtgcagccgctattaaaggttcgtttgttcaacgattaaagtcctacgtgatctgagttcagaccggagtaatccaggtcggtttctatctacnttcaaattcctccctgtacgaaaggacaagagaaataaggcctacttcacaaagcgccttcccccgtaaatgatatcatctcaacttagtattatacccacacccacccaagaacagggtttgttaagatggcagagcccggtaatcgcataaaacttaaaactttacagtcagaggttcaattcctcttcttaacaacatacccatggccaacctcctactcctcattgtacccattctaatcgcaatggcattcctaatgcttaccgaacgaaaaattctaggctatatacaactacgcaaaggccccaacgttgtaggcccctacgggctactacaacccttcgctgacgccataaaactcttcaccaaagagcccctaaaacccgccacatctaccatcaccctctacatcaccgccccgaccttagctctcaccatcgctcttctactatgaacccccctccccatacccaaccccctggtcaacctcaacctaggcctcctatttattctagccacctctagcctagccgtttactcaatcctctgatcagggtgagcatcaaactcaaactacgccctgatcggcgcactgcgagcagtagcccaaacaatctcatatgaagtcaccctagccatcattctactatcaacattactaataagtggctcctttaacctctccacccttatcacaacacaagaacacctctgattactcctgccatcatgacccttggccataatatgatttatctccacactagcagagaccaaccgaacccccttcgaccttgccgaaggggagtccgaactagtctcaggcttcaacatcgaatacgccgcaggccccttcgccctattcttcatagccgaatacacaaacattattataataaacaccctcaccactacaatcttcctaggaacaacatatgacgcactctcccctgaactctacacaacatattttgtcaccaagaccctacttctaacctccctgttcttatgaattcgaacagcatacccccgattccgctacgaccaactcatacacctcctatgaaaaaacttcctaccactcaccctagcattacttatatgatatgtctccatacccattacaatctccagcattccccctcaaacctaagaaatatgtctgataaaagagttactttgatagagtaaataataggagcttaaacccccttatttctaggactatgagaatcgaacccatccctgagaatccaaaattctccgtgccacctatcacaccccatcctaaagtaaggtcagctaaataagctatcgggcccatgccccgaaaatgttggttatacccttcccgtactaattaatcccctggcccaacccgtcatctactctaccatctttgcaggcacactcatcacagcgctaagctcgcactgattttttacctgagtaggcctagaaataaacatgctagcttttattccagttctaaccaaaaaaataaaccctcgttccacagaagctgccatcaagtatttcctcacgcaagcaaccgcatccataatccttctaatagctatcctcttcaacaatatactctccggacaatgaaccataaccaatactaccaatcaatactcatcattaataatcataatggctatagcaataaaactaggaatagccccctttcacttctgagtcccagaggttacccaaggcacccctctgacatccggcctgcttcttctcacatgacaaaaactagcccctatctcaatcatataccaaatctctccctcactaaacgtaagccttctcctcactctctcaatcttatccatcatagcaggcagttgaggtggattaaaccaaacccagctacgcaaaatcttagcatactcctcaattacccacataggatgaataatagcagttctaccgtacaaccctaacataaccattcttaatttaactatttatattatcctaactactaccgcattcctactactcaacttaaactccagcaccacgaccctactactatctcgcacctgaaacaagataacatgactaacacccttaattccatccaccctcctctccctaggaggcctgcccccgctaaccggctttttgcccaaatgggccattatcgaagaattcacaaaaaacaatagcctcatcatccccaccatcatagccaccatcaccctccttaacctctacttctacctacgcctaatctactccacctcaatcacactactccccatatctaacaacgtaaaaataaaatgacagtttgaacatacaaaacccaccccattcctccccacactcatcgcccttaccacgctactcctacctatctccccttttatactaataatcttatagaaatttaggttaaatacagaccaagagccttcaaagccctcagtaagttgcaatacttaatttctgtaacagctaaggactgcaaaaccccactctgcatcaactgaacgcaaatcagccactttaattaagctaagcccttactagaccaatgggacttaaacccacaaacacttagttaacagctaagcaccctaatcaactggcttcaatctacttctcccgccgccgggaaaaaaggcgggagaagccccggcaggtttgaagctgcttcttcgaatttgcaattcaatatgaaaatcacctcggaactggtaaaaagaggcctaacccctgtctttagatttacagtccaatgcttcactcagccattttacctcacccccactgatgttcgccgaccgttgactattctctacaaaccacaaagacattggaacactatacctattattcggcgcatgagctggagtcctaggcacagctctaagcctccttattcgagccgagctgggccagccaggcaaccttctaggtaacgaccacatctacaacgttatcgtcacagcccatgcatttgtaataatcttcttcatagtaatacccatcataatcggaggctttggcaactgactagttcccctaataatcggtgcccccgatatggcgtttccccgcataaacaacataagcttctgactcttacctccctctctcctactcctgctcgcatctgctatagtggaggccggagcaggaacaggttgaacagtctaccctcccttagcagggaactactcccaccctggagcctccgtagacctaaccatcttctccttacacctagcaggtgtctcctctatcttaggggccatcaatttcatcacaacaattatcaatataaaaccccctgccataacccaataccaaacgcccctcttcgtctgatccgtcctaatcacagcagtcctacttctcctatctctcccagtcctagctgctggcatcactatactactaacagaccgcaacctcaacaccaccttcttcgaccccgccggaggaggagaccccattctataccaacacctattctgatttttcggtcaccctgaagtttatattcttatcctaccaggcttcggaataatctcccatattgtaacttactactccggaaaaaaagaaccatttggatacataggtatggtctgagctatgatatcaattggcttcctagggtttatcgtgtgagcacaccatatatttacagtaggaatagacgtagacacacgagcatatttcacctccgctaccataatcatcgctatccccaccggcgtcaaagtatttagctgactcgccacactccacggaagcaatatgaaatgatctgctgcagtgctctgagccctaggattcatctttcttttcaccataggtggcctgactggcattgtattagcaaactcatcactagacatcgtactacacgacacgtactacgttgtagctcacttccactatgtcctatcaataggagctgtatttgccatcataggaggcttcattcactgatttcccctattctcaggctacaccctagaccaaacctacgccaaaatccatttcactatcatattcatcggcgtaaatctaactttcttcccacaacactttctcggcctatccggaatgccccgacgttactcggactaccccgatgcatacaccacatgaaacatcctatcatctgtaggctcattcatttctctaacagcagtaatattaataattttcatgatttgagaagccttcgcttcgaagcgaaaagtcctaatagtagaagaaccctccataaacctggagtgactatatggatgccccccaccctaccacacattcgaagaacccgtatacataaaatctagacaaaaaaggaaggaatcgaaccccccaaagctggtttcaagccaaccccatggcctccatgactttttcaaaaaggtattagaaaaaccatttcataactttgtcaaagttaaattataggctaaatcctatatatcttaatggcacatgcagcgcaagtaggtctacaagacgctacttcccctatcatagaagagcttatcacctttcatgatcacgccctcataatcattttccttatctgcttcctagtcctgtatgcccttttcctaacactcacaacaaaactaactaatactaacatctcagacgctcaggaaatagaaaccgtctgaactatcctgcccgccatcatcctagtcctcatcgccctcccatccctacgcatcctttacataacagacgaggtcaacgatccctcccttaccatcaaatcaattggccaccaatggtactgaacctacgagtacaccgactacggcggactaatcttcaactcctacatacttcccccattattcctagaaccaggcgacctgcgactccttgacgttgacaatcgagtagtactcccgattgaagcccccattcgtataataattacatcacaagacgtcttgcactcatgagctgtccccacattaggcttaaaaacagatgcaattcccggacgtctaaaccaaaccactttcaccgctacacgaccgggggtatactacggtcaatgctctgaaatctgtggagcaaaccacagtttcatgcccatcgtcctagaattaattcccctaaaaatctttgaaatagggcccgtatttaccctatagcaccccctctaccccctctagagcccactgtaaagctaacttagcattaaccttttaagttaaagattaagagaaccaacacctctttacagtgaaatgccccaactaaatactaccgtatggcccaccataattacccccatattccttacactattcctcatcacccaactaaaaatattaaacacaaactaccacctacctccctcaccaaagcccataaaaataaaaaattataacaaaccctgagaaccaaaatgaacgaaaatctgttcgcttcattcattgcccccacaatcctaggcctacccgccgcagtactgatcattctatttccccctctattgatccccacctccaaatatctcatcaacaaccgactaatcaccacccaacaatgactaatcaaattaacctcaaaacaaatgatagccatacacaacactaaaggacgaacctgatctcttatactagtatccttaatcatttttattgccacaactaacctcctcggactcctgcctcactcatttacaccaaccacccaactatctataaacctagccatggccatccccttatgagcgggcgcagtgattataggctttcgctctaagattaaaaatgccctagcccacttcttaccacaaggcacacctacaccccttatccccatactagttattatcgaaaccatcagcctactcattcaaccaatagccctggccgtacgcctaaccgctaacattactgcaggccacctactcatgcacctaattggaagcgccaccctagcaatatcaaccattaaccttccctctacacttatcatcttcacaattctaattctactgactatcctagaaatcgctgtcgccttaatccaagcctacgttttcacacttctagtaagcctctacctgcacgacaacacataatgacccaccaatcacatgcctatcatatagtaaaacccagcccatgacccctaacaggggccctctcagccctcctaatgacctccggcctagccatgtgatttcacttccactccataacgctcctcatactaggcctactaaccaacacactaaccatataccaatgatggcgcgatgtaacacgagaaagcacataccaaggccaccacacaccacctgtccaaaaaggccttcgatacgggataatcctatttattacctcagaagtttttttcttcgcaggatttttctgagccttttaccactccagcctagcccctaccccccaactaggagggcactggcccccaacaggcatcaccccgctaaatcccctagaagtcccactcctaaacacatccgtattactcgcatcaggagtatcaatcacctgagctcaccatagtctaatagaaaacaaccgaaaccaaataattcaagcactgcttattacaattttactgggtctctattttaccctcctacaagcctcagagtacttcgagtctcccttcaccatttccgacggcatctacggctcaacattttttgtagccacaggcttccacggacttcacgtcattattggctcaactttcctcactatctgcttcatccgccaactaatatttcactttacatccaaacatcactttggcttcgaagccgccgcctgatactggcattttgtagatgtggtttgactatttctgtatgtctccatctattgatgagggtcttactcttttagtataaatagtaccgttaacttccaattaactagttttgacaacattcaaaaaagagtaataaacttcgccttaattttaataatcaacaccctcctagccttactactaataattattacattttgactaccacaactcaacggctacatagaaaaatccaccccttacgagtgcggcttcgaccctatatcccccgcccgcgtccctttctccataaaattcttcttagtagctattaccttcttattatttgatctagaaattgccctccttttacccctaccatgagccctacaaacaactaacctgccactaatagttatgtcatccctcttattaatcatcatcctagccctaagtctggcctatgagtgactacaaaaaggattagactgagctgaattggtatatagtttaaacaaaacgaatgatttcgactcattaaattatgataatcatatttaccaaatgcccctcatttacataaatattatactagcatttaccatctcacttctaggaatactagtatatcgctcacacctcatatcctccctactatgcctagaaggaataatactatcgctgttcattatagctactctcataaccctcaacacccactccctcttagccaatattgtgcctattgccatactagtctttgccgcctgcgaagcagcggtgggcctagccctactagtctcaatctccaacacatatggcctagactacgtacataacctaaacctactccaatgctaaaactaatcgtcccaacaattatattactaccactgacatgactttccaaaaaacacataatttgaatcaacacaaccacccacagcctaattattagcatcatccccctactattttttaaccaaatcaacaacaacctatttagctgttccccaaccttttcctccgaccccctaacaacccccctcctaatactaactacctgactcctacccctcacaatcatggcaagccaacgccacttatccagtgaaccactatcacgaaaaaaactctacctctctatactaatctccctacaaatctccttaattataacattcacagccacagaactaatcatattttatatcttcttcgaaaccacacttatccccaccttggctatcatcacccgatgaggcaaccagccagaacgcctgaacgcaggcacatacttcctattctacaccctagtaggctcccttcccctactcatcgcactaatttacactcacaacaccctaggctcactaaacattctactactcactctcactgcccaagaactatcaaactcctgagccaacaacttaatatgactagcttacacaatagcttttatagtaaagatacctctttacggactccacttatgactccctaaagcccatgtcgaagcccccatcgctgggtcaatagtacttgccgcagtactcttaaaactaggcggctatggtataatacgcctcacactcattctcaaccccctgacaaaacacatagcctaccccttccttgtactatccctatgaggcataattataacaagctccatctgcctacgacaaacagacctaaaatcgctcattgcatactcttcaatcagccacatagccctcgtagtaacagccattctcatccaaaccccctgaagcttcaccggcgcagtcattctcataatcgcccacggacttacatcctcattactattctgcctagcaaactcaaactacgaacgcactcacagtcgcatcataatcctctctcaaggacttcaaactctactcccactaatagctttttgatgacttctagcaagcctcgctaacctcgccttaccccccactattaacctactgggagaactctctgtgctagtaaccacgttctcctgatcaaatatcactctcctacttacaggactcaacatactagtcacagccctatactccctctacatatttaccacaacacaatggggctcactcacccaccacattaacaacataaaaccctcattcacacgagaaaacaccctcatgttcatacacctatcccccattctcctcctatccctcaaccccgacatcattaccgggttttcctcttgtaaatatagtttaaccaaaacatcagattgtgaatctgacaacagaggcttacgaccccttatttaccgagaaagctcacaagaactgctaactcatgcccccatgtctaacaacatggctttctcaacttttaaaggataacagctatccattggtcttaggccccaaaaattttggtgcaactccaaataaaagtaataaccatgcacactactataaccaccctaaccctgacttccctaattccccccatccttaccaccctcgttaaccctaacaaaaaaaactcatacccccattatgtaaaatccattgtcgcatccacctttattatcagtctcttccccacaacaatattcatgtgcctagaccaagaagttattatctcgaactgacactgagccacaacccaaacaacccagctctccctaagcttcaaactagactacttctccataatattcatccctgtagcattgttcgttacatggtccatcatagaattctcactgtgatatataaactcagacccaaacattaatcagttcttcaaatatctactcattttcctaattaccatactaatcttagttaccgctaacaacctattccaactgttcatcggctgagagggcgtaggaattatatccttcttgctcatcagttgatgatacgcccgagcagatgccaacacagcagccattcaagcaatcctatacaaccgtatcggcgatatcggtttcatcctcgccttagcatgatttatcctacactccaactcatgagacccacaacaaatagcccttctaaacgctaatccaagcctcaccccactactaggcctcctcctagcagcagcaggcaaatcagcccaattaggtctccacccctgactcccctcagccatagaaggccccaccccagtctcagccctactccactcaagcactatagttgtagcaggaatcttcttactcatccgcttccaccccctagcagaaaatagcccactaatccaaactctaacactatgcttaggcgctatcaccactctgttcgcagcagtctgcgcccttacacaaaatgacatcaaaaaaatcgtagccttctccacttcaagtcaactaggactcataatagttacaatcggcatcaaccaaccacacctagcattcctgcacatctgtacccacgccttcttcaaagccatactatttatgtgctccgggtccatcatccacaaccttaacaatgaacaagatattcgaaaaataggaggactactcaaaaccatacctctcacttcaacctccctcaccattggcagcctagcattagcaggaatacctttcctcacaggtttctactccaaagaccacatcatcgaaaccgcaaacatatcatacacaaacgcctgagccctatctattactctcatcgctacctccctgacaagcgcctatagcactcgaataattcttctcaccctaacaggtcaacctcgcttccccacccttactaacattaacgaaaataaccccaccctactaaaccccattaaacgcctggcagccggaagcctattcgcaggatttctcattactaacaacatttcccccgcatcccccttccaaacaacaatccccctctacctaaaactcacagccctcgctgtcactttcctaggacttctaacagccctagacctcaactacctaaccaacaaacttaaaataaaatccccactatgcacattttatttctccaacatactcggattctaccctagcatcacacaccgcacaatcccctatctaggccttcttacgagccaaaacctgcccctactcctcctagacctaacctgactagaaaagctattacctaaaacaatttcacagcaccaaatctccacctccatcatcacctcaacccaaaaaggcataattaaactttacttcctctctttcttcttcccactcatcctaaccctactcctaatcacataacctattcccccgagcaatctcaattacaatatatacaccaacaaacaatgttcaaccagtaactactactaatcaacgcccataatcatacaaagcccccgcaccaataggatcctcccgaatcaaccctgacccctctccttcataaattattcagcttcctacactattaaagtttaccacaaccaccaccccatcatactctttcacccacagcaccaatcctacctccatcgctaaccccactaaaacactcaccaagacctcaacccctgacccccatgcctcaggatactcctcaatagccatcgctgtagtatatccaaagacaaccatcattccccctaaataaattaaaaaaactattaaacccatataacctcccccaaaattcagaataataacacacccgaccacaccgctaacaatcaatactaaacccccataaataggagaaggcttagaagaaaaccccacaaaccccattactaaacccacactcaacagaaacaaagcatatatcattattctcgcacggactacagccacgaccaatgatatgaaaaaccatcgttgtatttcaactacaagaacaccaatgaccccaatacgcaaaattaaccccctaataaaactaattaaccactcattcatcgacctccccaccccatccaacatctccgcatgatgaaacttcggctcactccttggcgcctgcctgatcctccaaatcaccacaggactattcctagccatgcactactcaccagacgcctcaaccgccttttcatcaatcgcccacatcactcgagacgtaaattatggctgaatcatccgctaccttcacgccaatggcgcctcaatattctttatctgcctcttcctacacatcggacgaggcctatattacggatcatttctctactcagaaacctgaaacatcggcattatcctcctgcttgcaactatagcaacagccttcataggctatgtcctcccgtgaggccaaatatcattctgaggggccacagtaattacaaacttactatccgccatcccatacattgggacagacctagttcaatgaatctgaggaggctactcagtagacagtcccgccctcacacgattctttacctttcacttcatcttacccttcattattgcagccctagcagcactccacctcctattcttgcacgaaacgggatcaaacaaccccctaggaatcacctcccattccgataaaatcaccttccacccttactacacaatcaaagacgccctcggcttacttctcttccttctctccttaatgacattaacactattctcaccagacctcctaggcgacccagacaattataccctagccaaccccttaaacacccctccccacatcaagcccgaatgatatttcctattcgcctacacaattctccgatccgtccctaacaaactaggaggcgtccttgccctattactatccatcctcatcctagcaataatccccatcctccatatatccaaacaacaaagcataatatttcgcccactaagccaatcactttattgactcctagccgcagacctcctcattctaacctgaatcggaggacaaccagtaagctacccttttaccatcattggacaagtagcatccgtactatacttcacaacaatcctaatcctaataccaactatctccctaattgaaaacaaaatactcaaatgggcctgtccttgtagtataaactaatacaccagtcttgtaaaccggagatgaaaacctttttccaaggacaaatcagagaaaaagtctttaactccaccattagcacccaaagctaagattctaatttaaactattctctgttctttcatggggaagcagatttgggtaccacccaagtattgactcacccatcaacaaccgctatgtatttcgtacattactgccagccaccatgaatattgtacggtaccataaatacttgaccacctgtagtacataaaaacccaatccacatcaaaaccccccccccatgcttacaagcaagtacagcaatcaaccttcaactatcacacatcaactgcaactccaaagccacccctcacccactaggataccaacaaacctacccacccttaacagtacatagtacataaagccattcaccgtacatagcacattacagtcaaatcccttctcgcccccatggatgacccccctcagataggggtcccttgaccaccatcctccgtgaaatcaatatcccgcacaagagtgctactctcctcgctccgggcccataacacttgggggtagctaaagtgaactgtatccgacatctggttcctacttcagggccataaagcctaaatagcccacacgttccccttaaataagacatcacgatg

SEQ ID NO: 143 - DNA, 16570 bp, Homo sapiens mitochondrial
  3108: "n" refers to a nucleotide at position 3107 of the Cambridge Reference Sequence (CRS, Anderson et al. 1981 Nature 290:457-465), later determined to be absent from the human mtDNA sequence according to the revised CRS (rCRS, Andrews et al. 1999 Nature Genetics 23:147); "n" therefore represents a single nucleotide deletion at a position corresponding to nucleotide 3107 of SEQ ID NO:1 as provided herein.
gatcacaggtctatcaccctattaaccactcacgggagctctccatgcatttggtattttcgtctggggggtgtgcacgcgatagcattgcgagacgctggagccggagcaccctatgtcgcagtatctgtctttgattcctgccccatcccattatttatcgcacctacgttcaatattacaggcgaacatacctactaaagtgtgttaattaattaatgcttgtaggacataataataacaattgaatgtctgcacagccgctttccacacagacatcataacaaaaaatttccaccaaaccccccctcccccgccttctggccacagcacttaaacacatctctgccaaaccccaaaaacaaagaaccctaacaccagcctaaccagatttcaaattttatcttttggcggtatgcacttttaacagtcaccccccaactaacacattattttcccctcccactcccatactactaatctcatcaatacaacccccgcccatcctacccagcacacacacaccgctgctaaccccataccccgaaccaaccaaaccccaaagacaccccccacagtttatgtagcttacctcctcaaagcaatacactgaaaatgtttagacgggctcacatcaccccataaacaaataggtttggtcctagcctttctattagctcttagtaagattacacatgcaagcatccccgttccagtgagttcaccctctaaatcaccacgatcaaaagggacaagcatcaagcacgcaacaatgcagctcaaaacgcttagcctagccacacccccacgggaaacagcagtgattaacctttagcaataaacgaaagtttaactaagctatactaaccccagggttggtcaatttcgtgccagccaccgcggtcacacgattaacccaagtcaatagaagccggcgtaaagagtgttttagatcaccccctccccaataaagctaaaactcacctgagttgtaaaaaactccagttgacacaaaataaactacgaaagtggctttaacatatctgaacacacaatagctaagacccaaactgggattagataccccactatgcttagccctaaacctcaacagttaaatcaacaaaactgctcgccagaacactacgagccacagcttaaaactcaaaggacctggcggtgcttcatatccctctagaggagcctgttctgtaatcgataaaccccgatcaacctcaccacctcttgctcagcctatataccgccatcttcagcaaaccctgatgaaggctacaaagtaagcgcaagtacccacgtaaagacgttaggtcaaggtgtagcccatgaggtggcaagaaatgggctacattttctaccccagaaaactacgatagcccttatgaaacttaagggtcgaaggtggatttagcagtaaactgagagtagagtgcttagttgaacagggccctgaagcgcgtacacaccgcccgtcaccctcctcaagtatacttcaaaggacatttaactaaaacccctacgcatttatatagaggagacaagtcgtaacatggtaagtgtactggaaagtgcacttggacgaaccagagtgtagcttaacacaaagcacccaacttacacttaggagatttcaacttaacttgaccgctctgagctaaacctagccccaaacccactccaccttactaccagacaaccttagccaaaccatttacccaaataaagtataggcgatagaaattgaaacctggcgcaatagatatagtaccgcaagggaaagatgaaaaattataaccaagcataatatagcaaggactaacccctataccttctgcataatgaattaactagaaataactttgcaaggagagccaaagctaagacccccgaaaccagacgagctacctaagaacagctaaaagagcacacccgtctatgtagcaaaatagtgggaagatttataggtagaggcgacaaacctaccgagcctggtgatagctggttgtccaagatagaatcttagttcaactttaaatttgcccacagaaccctctaaatccccttgtaaatttaactgttagtccaaagaggaacagctctttggacactaggaaaaaaccttgtagagagagtaaaaaatttaacacccatagtaggcctaaaagcagccaccaattaagaaagcgttcaagctcaacacccactacctaaaaaatcccaaacatataactgaactcctcacacccaattggaccaatctatcaccctatagaagaactaatgttagtataagtaacatgaaaacattctcctccgcataagcctgcgtcagattaaaacactgaactgacaattaacagcccaatatctacaatcaaccaacaagtcattattacccccactgtcaacccaacacaggcatgctcataaggaaaggttaaaaaaagtaaaaggaactcggcaaatcttaccccgcctgtttaccaaaaacatcacctctagcatcaccagtattagaggcaccgcctgcccagtgacacatgtttaacggccgcggtaccctaaccgtgcaaaggtagcataatcacttgttccttaaatagggacctgtatgaatggctccacgagggttcagctgtctcttacttttaaccagtgaaattgacctgcccgtgaagaggcgggcatgacacagcaagacgagaagaccctatggagctttaatttattaatgcaaacagtacctaacaaacccacaggtcctaaactactaaacctgcattaaaaatttcggttggggcgacctcggagcagaacccaacctccgagcagtacatgctaagacttcaccagtcaaagcgaactactatactcaattgatccaataacttgaccaacggaacaagttaccctagggataacagcgcaatcctattctagagtccatatcaacaatagggtttacgacctcgatgttggatcaggacatcccgatggtgcagccgctattaaaggttcgtttgttcaacgattaaagtcctacgtgatctgagttcagaccggagtaatccaggtcggtttctatctacnttcaaattcctccctgtacgaaaggacaagagaaataaggcctacttcacaaagcgccttcccccgtaaatgatatcatctcaacttagtattatacccacacccacccaagaacagggtttgttaagatggcagagcccggtaatcgcataaaacttaaaactttacagtcagaggttcaattcctcttcttaacaacatacccatggccaacctcctactcctcattgtacccattctaatcgcaatggcattcctaatgcttaccgaacgaaaaattctaggctatatacaactacgcaaaggccccaacgttgtaggcccctacgggctactacaacccttcgctgacgccataaaactcttcaccaaagagcccctaaaacccgccacatctaccatcaccctctacatcaccgccccgaccttagctctcaccatcgctcttctactatgaacccccctccccatacccaaccccctggttaacctcaacctaggcctcctatttattctagccacctctagcctagccgtttactcaatcctctgatcagggtgagcatcaaactcaaactacgccctgatcggcgcactgcgagcagtagcccaaacaatctcatatgaagtcaccctagccatcattctactatcaacattactaataagtggctcctttaacctctccacccttatcacaacacaagaacacctctgattactcctgccatcatgacccttggccataatatgatttatctccacactagcagagaccaaccgaacccccttcgaccttgccgaaggggaatccgaactagtctcaggcttcaacatcgaatacgccgcaggccccttcgccctattcttcatagccgaatacacaaacattattataataaacaccctcaccactacaatcttcctaggaacaacatatgacgcactctcccctgaactctacacaacatattttgtcaccaagaccctacttctgacctccctgttcttatgaattcgaacagcatacccccgattccgctacgaccaactcatacacctcctatgaaaaaacttcctaccactcaccctagcattacttatatgatatgtctccatacccattacaatctccagcattccccctcaaacctaagaaatatgtctgataaaagagttactttgatagagtaaataataggagcttaaacccccttatttctaggactatgagaatcgaacccatccctgagaatccaaaattctccgtgccacctatcacaccccatcctaaagtaaggtcagctaaataagctatcgggcccataccccgaaaatgttggttatacccttcccgtactaattaatcccctggcccaacccgtcatctactctaccatctttgcaggcacactcatcacagcgctaagctcgcactgattttttacctgagtaggcctagaaataaacatgctagcttttattccagttctaaccaaaaaaataaaccctcgttccacagaagctgccatcaagtatttcctcacgcaagcaaccgcatccataatccttctaatagctatcctcttcaacaatatactctccggacaatgaaccataaccaatactaccaatcaatactcatcattaataatcataatggctatagcaataaaactaggaatagccccctttcacttctgagtcccagaggttacccaaggcacccctctgacatccggcctgcttcttctcacatgacaaaaactagcccccatctcaatcatataccaaatctctccctcactaaacgtaagccttctcctcactctctcaatcttatccatcatagcaggcagttgaggtggattaaaccaaacccagctacgcaaaatcttagcatactcctcaattacccacataggatgaataatagcagttctaccgtacaaccctaacataaccattcttaatttaactatttatattatcctaactactaccgcattcctactactcaacttaaactccagcaccacgaccctactactatctcgcacctgaaacaagctaacatgactaacacccttaattccatccaccctcctctccctaggaggcctgcccccgctaaccggctttttgcccaaatgggccattatcgaagaattcacaaagaacaatagcctcatcatccccaccatcatagccaccatcaccctccttaacctctacttctacctacgcctaatctactccacctcaatcacactactccccatatctaacaacgtaaaaataaaatgacagtttgaacatacaaaacccaccccattcctccccacactcatcgcccttaccacgctactcctacctatctccccttttatactaataatcttatagaaatttaggttaaatacagaccaagagccttcaaagccctcagtaagttgcaatacttaatttctgtaacagctaaggactgcaaaaccccactctgcatcaactgaacgcaaatcagccactttaattaagctaagcccttactagaccaatgggacttaaacccacaaacacttagttaacagctaagcaccctaatcaactggcttcaatctacttctcccgccgccgggaaaaaaggcgggagaagccccggcaggtttgaagctgcttcttcgaatttgcaattcaatatgaaaatcacctcggagctggtaaaaagaggcctaacccctgtctttagatttacagtccaatgcttcactcagccattttacctcacccccactgatgttcgccgaccgttgactattctctacaaaccacaaagacattggaacactatacctattattcggcgcatgagctggagtcctaggcacagctctaagcctccttattcgagccgagctgggccagccaggcaaccttctaggtaacgaccacatctacaacgttatcgtcacagcccatgcatttgtaataatcttcttcatagtaatacccatcataatcggaggctttggcaactgactagttcccctaataatcggtgcccccgatatggcgtttccccgcataaacaacataagcttctgactcttacctccctctctcctactcctgctcgcatctgctatagtggaggccggagcaggaacaggttgaacagtctaccctcccttagcagggaactactcccaccctggagcctccgtagacctaaccatcttctccttacacctagcaggtgtctcctctatcttaggggccatcaatttcatcacaacaattatcaatataaaaccccctgccataacccaataccaaacgcccctcttcgtctgatccgtcctaatcacagcagtcctacttctcctatctctcccagtcctagctgctggcatcactatactactaacagaccgcaacctcaacaccaccttcttcgaccccgccggaggaggagaccccattctataccaacacctattctgatttttcggtcaccctgaagtttatattcttatcctaccaggcttcggaataatctcccatattgtaacttactactccggaaaaaaagaaccatttggatacataggtatggtctgagctatgatatcaattggcttcctagggtttatcgtgtgagcacaccatatatttacagtaggaatagacgtagacacacgagcatatttcacctccgctaccataatcatcgctatccccaccggcgtcaaagtatttagctgactcgccacactccacggaagcaatatgaaatgatctgctgcagtgctctgagccctaggattcatctttcttttcaccgtaggtggcctgactggcattgtattagcaaactcatcactagacatcgtactacacgacacgtactacgttgtagctcacttccactatgtcctatcaataggagctgtatttgccatcataggaggcttcattcactgatttcccctattctcaggctacaccctagaccaaacctacgccaaaatccatttcactatcatattcatcggcgtaaatctaaccttcttcccacaacactttctcggcctatccggaatgccccgacgttactcggactaccccgatgcatacaccacatgaaatatcctatcatctgtaggttcactcatttctctaacagcagtaatattaataattttcatgatttgagaagccttcgcttcgaagcgaaaagtcctaatagtagaagaaccctccataaacctggagtgactatatggatgccccccaccctaccacacattcgaagaacccgtatacataaaatctagacaaaaaaggaaggaatcgaaccccccaaagctggtttcaagccaaccccatggcctccatgactttttcaaaaagatattagaaaaaccatttcataactttgtcaaagttaaattataggctaaatcctatatatcttaatggcacatgcagcgcaagtaggtctacaagacgctacttcccctatcatagaagagcttatcacctttcatgatcacgccctcataatcattttccttatctgcttcctagtcctgtatgcccttttcctaacactcacaacaaaactaactaatactaacatctcagacgctcaggaaatagagaccgtctgaactatcctgcccgccatcatcctagtcctcatcgccctcccatccctacgcatcctttacataacagacgaggtcaacgatccctcccttaccatcaaatcaattggccaccaatggtactgaacctacgagtacaccgactacggcggactaatcttcaactcctacatacttcccccattattcctagaaccaggcgacctgcgactccttgacgttgacaatcgagtagtactcccgattgaagcccccattcgtataataattacatcacaagacgtcttgcactcatgagctgtccccacattaggcttaaaaacagatgcaattcccggacgtctaaaccaaaccactttcaccgctacacgaccgggggtatactacggtcaatgctctgaaatctgtggagcaaaccacagtttcatacccatcgtcctagaattaattcccctaaaaatctttgaaatagggcccgtatttaccctatagcaccccctctaccccctctagagcccactgtaaagctaacttagcattaaccttttaagttaaagattaagagaaccaacacctctttacagtgaaatgccccaactaaatactaccgtatggcccaccataattacccccatactccttacactattcctcatcacccaactaaaaatattaaacacaaactaccacctacctccctcaccaaagcccataaaaataaaaaattataacaaaccctgagaaccaaaatgaacgaaaatctgttcgcttcattcattgcccccacaatcctaggcctacccgccgcagtactgatcattctatttccccctctattgatccccacctccaaatatctcatcaacaaccgactaatcaccacccaacaatgactaatcaaactaacctcaaaacaaatgatagccatacacaacactaaaggacgaacctgatctcttatactagtatccttaatcatttttattgccacaactaacctcctcggactcctgcctcactcatttacaccaaccacccaactatctataaacctagccatggccatccccttatgagcgggcgcagtgattataggctttcgctctaagattaaaaatgccctagcccacttcttaccacaaggcacacctacaccccttatccccatactagttattatcgaaaccatcagcctactcattcaaccaatagccctggccgtacgcctaaccgctaacattactgcaggccacctactcatgcacctaattggaagcgccaccctagcaatatcaaccattaaccttccctctacacttatcatcttcacaattctaattctactgactatcctagaaatcgctgtcgccttaatccaagcctacgttttcacacttctagtaagcctctacctgcacgacaacacataatgacccaccaatcgcatgcctatcatatagtaaaacccagcccatgacccctaacaggggccctctcagccctcctaatgacctccggcctagccatgtgatttcacttccactccataacgctcctcatactaggcctactaaccaacacactaaccatataccaatgatggcgcgatgtaacacgagaaagcacataccaaggccaccacacaccacctgtccaaaaaggccttcgatacgggataatcctatttattacctcagaagtttttttcttcgcaggatttttctgagccttttaccactccagcctagcccctaccccccaactaggagggcactggcccccaacaggcatcaccccgctaaatcccctagaagtcccactcctaaacacatccgtattactcgcatcaggagtatcaatcacctgagctcaccatagtctaatagaaaacaaccgaaaccaaataattcaagcactgcttattacaattttactgggtctctattttaccctcctacaagcctcagagtacttcgagtctcccttcaccatttccgacggcatctacggctcaacattttttgtagccacaggcttccacggacttcacgtcattattggctcaactttcctcactatctgcttcatccgccaactaatatttcactttacatccaaacatcactttggcttcgaagccgccgcctgatactggcattttgtagatgtggtttgactatttctgtatgtctccatctattgatgagggtcttactcttttagtataaatagtaccgttaacttccaattaactagttttgacaacattcaaaaaagagtaataaacttcgccttaattttaataatcaacaccctcctagccttactactaataatcattacattttgactaccacaactcaacggctacatagaaaaatccaccccttacgagtgcggcttcgaccctatatcccccgcccgcgtccctttctccataaaattcttcttagtagctattaccttcttattatttgatctagaaattgccctccttttacccctaccatgagccctacaaacaactaacctgccactaatagttatgtcatccctcttattaatcatcatcctagccctaagtctggcctatgagtgactacaaaaaggattagactgagccgaattggtatatagtttaaacaaaacgaatgatttcgactcattaaattatgacaatcatatttaccaaatgcccctcatttacataaatattatactagcatttaccatctcacttctaggaatactagtatatcgctcacacctcatatcctccctactatgcctagaaggaataatactatcgctgttcattatagctactctcataaccctcaacacccactccctcttagccaatattgtgcctattgccatactagtctttgccgcctgcgaagcagcggtgggcctagccctactagtctcaatctccaacacatatggcctagactacgtacataacctaaacctactccaatgctaaaactaatcgtcccaacaattatattactaccactgacatgactttccaaaaaacacataatttgaatcaacacaaccacccacagcctaattattagcatcatccccctactattttttaaccaaatcaacaacaacctatttagctgttccccaaccttttcctccgaccccctaacaacccccctcctaatactaactacctgactcctacccctcacaatcatggcaagccaacgccacttatccagtgaaccactatcacgaaaaaaactctacctctctatactaatctccctacaaatctccttaattataacattcacagccacagaactaatcatattttatatcttcttcgaaaccacacttatccccaccttggctatcatcacccgatgaggcaaccagccagaacgcctgaacgcaggcacatacttcctattctacaccctagtaggctcccttcccctactcatcgcactaatttacactcacaacaccctaggctcactaaacattctactactcactctcactgcccaagaactatcaaactcctgagccaacaacttaatatgactagcttacacaatagcttttatagtaaagatacctctttacggactccacttatgactccctaaagcccatgtcgaagcccccatcgctgggtcaatagtacttgccgcagtactcttaaaactaggcggctatggtataatacgcctcacactcattctcaaccccctgacaaaacacatagcctaccccttccttgtactatccctatgaggcataattataacaagctccatctgcctacgacaaacagacctaaaatcgctcattgcatactcttcaatcagccacatagccctcgtagtaacagccattctcatccaaaccccctgaagcttcaccggcgcagtcattctcataatcgcccacggacttacatcctcattactattctgcctagcaaactcaaactacgaacgcactcacagtcgcatcataatcctctctcaaggacttcaaactctactcccactaatagctttttgatgacttctagcaagcctcgctaacctcgccttaccccccactattaacctactgggagaactctctgtgctagtaaccacattctcctgatcaaatatcactctcctactcacaggactcaacatactagtcacagccctatactccctctacatatttaccacaacacaatggggctcactcacccaccacattaacaacataaaaccctcattcacacgagaaaacaccctcatgttcatacacctatcccccattctcctcctatccctcaaccccgacatcattaccgggttttcctcttgtaaatatagtttaaccaaaacatcagattgtgaatctgacaacagaggcttacgaccccttatttaccgagaaagctcacaagaactgctaactcatgcccccatgtctaacaacatggctttctcaacttttaaaggataacagctatccattggtcttaggccccaaaaattttggtgcaactccaaataaaagtaataaccatgcacactactataaccaccctaaccctgacttccctaattccccccatccttaccaccctcgttaaccctaacaaaaaaaactcatacccccattatgtaaaatccattgtcgcatccacctttattatcagtctcttccccacaacaatattcatgtgcctagaccaagaagttattatctcgaactgacactgagccacaacccaaacaacccagctctccctaagcttcaaactagactacttctccataatattcatccctgtagcattgttcgttacatggtccatcatagaattctcactgtgatatataaactcagacccaaacattaatcagttcttcaagtatctactcattttcctaattaccatactaatcttagttaccgctaacaacctattccaactgttcatcggctgagagggcgtaggaattatatccttcttgctcatcagttgatgatacgcccgagcagatgccaacacagcagccattcaagcaatcctatacaaccgtatcggcgatatcggtttcatcctcgccttagcatgatttatcctacactccaactcatgagacccacaacaaatagcccttctaaacgctaatccaagcctcaccccactactaggcctcctcctagcagcagcaggcaaatcagcccaattaggtctccacccctgactcccctcagccatagaaggccccaccccagtctcagccctactccactcaagcactatagttgtagcaggaatcttcttactcatccgcttccaccccctagcagaaaatagcccactaatccaaactctaacactatgcttaggcgctatcaccactctgttcgcagcagtctgcgcccttacacaaaatgacatcaaaaaaatcgtagccttctccacttcaagtcaactaggactcataatagttacaatcggcatcaaccaaccacacctagcattcctgcacatctgtacccacgccttcttcaaagccatactatttatgtgctccgggtccatcatccacaaccttaacaatgaacaagatattcgaaaaataggaggactactcaaaaccatacctctcacttcaacctccctcaccattggcagcctagcattagcaggaatacctttcctcacaggtttctactccaaagaccacatcatcgaaaccgcaaacatatcatacacaaacgcctgagccctatctattactctcatcgctacctccctaacaagcgcctatagcactcgaataattcttctcaccctaacaggtcaacctcgcttccctacccttactaacattaacgaaaataaccccaccctactaaaccccattaaacgcctggcagccggaagcctattcgcaggatttctcattactaacaacatttcccccgcatcccccttccaaacaacaatccccctctacctaaaactcacggccctcgctgtcactttcctaggacttctaacagccctagacctcaactacctaaccaacaaacttaaaataaaatccccactatgcacattttatttctccaacatactcggattctaccctagcatcacacaccgcacaatcccctatctaggccttcttacgagccaaaacctgcccctactcctcctagacctaacctgactagaaaagctattacctaaaacaatttcacagcaccaaatctccacctccatcatcacctcaacccaaaaaggcataattaaactttacttcctctctttcttcttcccactcatcctaaccctactcctaatcacataacctattcccccgagcaatctcaattacaatatatacaccaacaaacaatgttcaaccagtaactactactaatcaacgcccataatcatacaaagcccccgcaccaataggatcctcccgaatcaaccctgacccctctccttcataaattattcagcttcctacactattaaagtttaccacaaccaccaccccatcatactctttcacccacagcaccaatcctacctccatcgctaaccccactaaaacactcaccaagacctcaacccctgacccccatgcctcaggatactcctcaatagccatcgctgtagtatatccaaagacaaccatcattccccctaaataaattaaaaaaactattaaacccatataacctcccccaaaattcagaataataacacacccgaccacgccgctaacaatcaatactaaacccccataaataggagaaggcttagaagaaaaccccacaaaccccattactaaacccacactcaacagaaacaaagcatacatcattattctcgcacggactacaaccacgaccaatgatatgaaaaaccatcgttgtatttcaactacaagaacaccaatgaccccaatacgcaaaattaaccccctaataaaattaattaaccactcattcatcgacctccccaccccatccaacatctccgcatgatgaaacttcggctcactccttggcgcctgcctgatcctccaaatcaccacaggactattcctagccatgcactactcaccagacgcctcaaccgccttttcatcaatcgcccacatcactcgagacgtaaattatggctgaatcatccgctaccttcacgccaatggcgcctcaatattctttatctgcctcttcctacacatcgggcgaggcctatattacggatcatttctctactcagaaacctgaaacatcggcattatcctcctgcttgcaactatagcaacagccttcataggctatgtcctcccgtgaggccaaatatcattctgaggggccacagtaattacaaacttactatccgccatcccatatattgggacagacctagttcaatgaatctgagggggctactcagtagacagtcccaccctcacacgattctttacctttcacttcatcttacccttcattattgcagccctagcagcactccacctcctattcttgcacgaaacgggatcaaacaaccccctaggaatcacctcccattccgataaaatcaccttccacccttactacacgatcaaagacgccctcggcttacttctcttccttctctccttaatgacattaacactattctcaccagacctcctaggcgacccagacaattataccctagccaaccccttaaacacccctccccacatcaagcccgaatgatatttcctattcgcctacacaattctccgatccgtccctaacaaactaggaggcgtccttgccctactactatccatcctcatcctagcaataatccccatcctccatatatccaaacaacaaagcataatatttcgcccactaagccaatcactttattgactcctagccgcagacctcctcattctaacctgaatcggaggacaaccagtaagctacccctttaccatcattggacaagtagcatccgtactatacttcacaacaatcctaatcctaataccaactatctccctaattgaaaacaaaatactcaaatgggcctgtccttgtagtataaactaatacaccagtcttgtaaaccggagatgaaaacctttttccaaggacaaatcagagaaaaagtctttaactccaccattagcacccaaagctaagattctaatttaaactattctctgttctttcatggggaagcagatttgggtaccacccaagtattgactcacccatcaacaaccgctatgtatttcgtacattactgccagccaccatgaatattgtacggtaccataaatacttgaccacctgtagtacataaaaacccaatccacatcaaaaccccctccccatgcttacaagcaagtacagcaatcaaccttcaactatcacacatcaactgcaactccaaagccacccctcacccactaggatatcaacaaacctacccatccttaacagtacatggtacataaagccatttaccgtacatagcacattacagtcaaatcccttctcgtccccatggatgacccccctcagataggagtcccttgaccaccatcctccgtgaaatcaatatcccgcacaagagtgctactctcctcgctccgggcccataacacttgggggtagctaaagtgaactgtatccgacatctggttcctacttcagggccataaagcctaaatagcccacacgttccccttaaataagacatcacgatg

SEQ ID NO: 144 - DNA, 16570 bp, Homo sapiens mitochondrial
  3108: "n" refers to a nucleotide at position 3107 of the Cambridge Reference Sequence (CRS, Anderson et al. 1981 Nature 290:457-465), later determined to be absent from the human mtDNA sequence according to the revised CRS (rCRS, Andrews et al. 1999 Nature Genetics 23:147); "n" therefore represents a single nucleotide deletion at a position corresponding to nucleotide 3107 of SEQ ID NO:1 as provided herein.
gatcacaggtctatcaccctattaaccactcacgggagctctccatgcatttggtattttcgtctggggggtatgcacgcgatagcattgcgagacgctggagccggagcaccctatgtcgcagtatctgtctttgattcctgcctcatcccattatttatcgcacctacgttcaatattacaggcgaacatacttactaaagtgtgttaattaattaatgcttgtaggacataataataacaattgaatgtctgcacagccgctttccacacagacatcataacaaaaaatttccaccaaaccccccctcccccgccttctggccacagcacttaaacacatctctgccaaaccccaaaaacaaagaaccctaacaccagcctaaccagatttcaaattttatcttttggcggtatgcacttttaacagtcaccccccaactaacacattattttcccctcccactcccatactactaatctcatcaatacaacccccgcccatcctacccagcacacacacaccgctgctaaccccataccccgaaccaaccaaaccccaaagacaccccccacagtttatgtagcttacctcctcaaagcaatacactgaaaatgtttagacgggctcacatcaccccataaacaaataggtttggtcctagcctttctattagctcttagtaagattacacatgcaagcatccccgttccagtgagttcaccctctaaatcaccacgatcaaaagggacaagcatcaagcacgcagcaatgcagctcaaaacgcttagcctagccacacccccacgggaaacagcagtgattaacctttagcaataaacgaaagtttaactaagctatactaaccccagggttggtcaatttcgtgccagccaccgcggtcacacgattaacccaagtcaatagaagccggcgtaaagagtgttttagatcaccccctccccaataaagctaaaactcacctgagttgtaaaaaactccagttgacacaaaatagactacgaaagtggctttaacatatctgaacacacaatagctaagacccaaactgggattagataccccactatgcttagccctaaacctcaacagttaaatcaacaaaactgctcgccagaacactacgagccacagcttaaaactcaaaggacctggcggtgcttcatatccctctagaggagcctgttctgtaatcgataaaccccgatcaacctcaccacctcttgctcagcctatataccgccatcttcagcaaaccctgatgaaggctacaaagtaagcgcaagtacccacgtaaagacgttaggtcaaggtgtagcccatgaggtggcaagaaatgggctacattttctaccccagaaaactacgatagcccttatgaaacttaagggtcgaaggtggatttagcagtaaactgagagtagagtgcttagttgaacagggccctgaagcgcgtacacaccgcccgtcaccctcctcaagtatacttcaaaggacatttaactaaaacccctacgcatttatatagaggagacaagtcgtaacatggtaagtgtactggaaagtgcacttggacgaaccagagtgtagcttaacacaaagcacccaacttacacttaggagatttcaacttaacttgaccgctctgagctaaacctagccccaaacccactccaccttactaccagacaaccttagccaaaccatttacccaaataaagtataggcgatagaaattgaaacctggcgcaatagatatagtaccgcaagggaaagatgaaaaattataaccaagcataatatagcaaggactaacccctataccttctgcataatgaattaactagaaataactttgcaaggagagccaaagctaagacccccgaaaccagacgagctacctaagaacagctaaaagagcacacccgtctatgtagcaaaatagtgggaagatttataggtagaggcgacaaacctaccgagcctggtgatagctggttgtccaagatagaatcttagttcaactttaaatttgcccacagaaccctctaaatccccttgtaaatttaactgttagtccaaagaggaacagctctttggacactaggaaaaaaccttgtagagagagtaaaaaatttaacacccatagtaggcctaaaagcagccaccaattaagaaagcgttcaagctcaacacccactacctaaaaaatcccaaacatataactgaactcctcacacccaattggaccaatctatcaccctatagaagaactaatgttagtataagtaacatgaaaacattctcctccgcataagcctgcgtcagattaaaacactgaactgacaattaacagcccaatatctacaatcaaccaacaagtcattattaccctcactgtcaacccaacacaggcatgctcataaggaaaggttaaaaaaagtaaaaggaactcggcaaatcttaccccgcctgtttaccaaaaacatcacctctagcatcaccagtattagaggcaccgcctgcccagtgacacatgtttaacggccgcggtaccctaaccgtgcaaaggtagcataatcacttgttccttaaatagggacctgtatgaatggctccacgagggttcagctgtctcttacttttaaccagtgaaattgacctgcccgtgaagaggcgggcataacacagcaagacgagaagaccctatggagctttaatttattaatgcaaacagtacctaacaaacccacaggtcctaaactaccaaacctgcattaaaaatttcggttggggcgacctcggagcagaacccaacctccgagcagtacatgctaagacttcaccagtcaaagcgaactactatactcaattgatccaataacttgaccaacggaacaagttaccctagggataacagcgcaatcctattctagagtccatatcaacaatagggtttacgacctcgatgttggatcaggacatcccgatggtgcagccgctattaaaggttcgtttgttcaacgattaaagtcctacgtgatctgagttcagaccggagtaatccaggtcggtttctatctacnttcaaattcctccctgtacgaaaggacaagagaaataaggcctacttcacaaagcgccttcccccgtaaatgatatcatctcaacttagtattatacccacacccacccaagaacagggtttgttaagatggcagagcccggtaatcgcataaaacttaaaactttacagtcagaggttcaattcctcttcttaacaacatacccatggccaacctcctactcctcattgtacccattctaatcgcaatggcattcctaatgcttaccgaacgaaaaattctaggctatatacaactacgcaaaggccccaacgttgtaggcccctacgggctactacaacccttcgctgacgccataaaactcttcaccaaagagcccctaaaacccgccacatctaccatcaccctctacatcaccgccccgaccttagctctcaccatcgctcttctactatgaacccccctccccatacccaaccccctggtcaacctcaacctaggcctcctatttattctagccacctctagcctagccgtttactcaatcctctgatcagggtgagcatcaaactcaaactacgccctgatcggcgcactgcgagcagtagcccaaacaatctcatatgaagtcaccctagccatcattctactatcaacattactaataagtggctcctttaacctctccacccttatcacaacacaagaacacctctgattactcctgccatcatgacccttggccataatatgatttatctccacactagcagagaccaaccgaacccccttcgaccttgccgaaggggagtccgaactagtctcaggcttcaacatcgaatacgccgcaggccccttcgccctattcttcatagccgaatacacaaacattattataataaacaccctcaccactacaatcttcctaggaacaacatatgacgcactctcccctgaactctacacaacatattttgtcaccaagaccctacttctaacctccctgttcttatgaattcgaacagcatacccccgattccgctacgaccaactcatacacctcctatgaaaaaacttcctaccactcaccctagcattacttatatgatatgtctccatacccattacaatctccagcattccccctcaaacctaagaaatatgtctgataaaagagttactttgatagagtaaataataggagcttaaacccccttatttctaggactatgagaatcgaacccatccctgagaatccaaaattctccgtgccacctaccacaccccatcctaaagtaaggtcagctaaataagctatcgggcccataccccgaaaatgttggttatacccttcccgtactaattaatcccctggcccaacccgtcatctactctaccatctttgcaggcacactcatcacagcgctaagctcgcactgattttttacctgagtaggcctagaaataaacatgctagcttttattccagttctaaccaaaaaaataaaccctcgttccacagaagctgccatcaagtatttcctcacgcaagcaaccgcatccataatccttctaatagctatcctcttcaacaatatactctccggacaatgaaccataaccaatactaccaatcaatactcatcattaataatcataatggctatagcaataaaactaggaatagccccctttcacttctgagtcccagaggttacccaaggcacccctctgacatccggcctgcttcttctcacatgacaaaaactagcccccatctcaatcatataccaaatctctccctcactaaacgtaagccttctcctcactctctcaatcttatccatcatagcaggcagttgaggtggattaaaccaaacccagctacgcaaaatcttagcatactcctcaattacccacataggatgaataatagcagttctaccgtacaaccctaacataaccattcttaatttaactatttatattatcctaactactaccgcattcctactactcaacttaaactccagcaccacgaccctactactatctcgcacctgaaacaagctaacatgactaacacccttaattccatccaccctcctctccctaggaggcctgcccccgctaaccggctttttgcccaaatgggccattatcgaagaattcacaaaaaacaatagcctcatcatccccaccatcatagccaccatcaccctccttaacctctacttctacctacgcctaatctactccacctcaatcacactactccccatatctaacaacgtaaaaataaaatgacagtttgaacatacaaaacccaccccattcctccccacactcatcgcccttaccacgctactcctacctatctccccttttatactaataatcttatagaaatttaggttaaatacagaccaagagccttcaaagccctcagtaagttgcaatacttaatttctgtaacagctaaggactgcaaaaccccactctgcatcaactgaacgcaaatcagccactttaattaagctaagcccttactagaccaatgggacttaaacccacaaacacttagttaacagctaagcaccctaatcaactggcttcaatctacttctcccgccgccgggaaaaaaggcgggagaagccccggcaggtttgaagctgcttcttcgaatttgcaattcaatatgaaaatcacctcggagctggtaaaaagaggcctaacccctgtctttagatttacagtccaatgcttcactcagccattttacctcacccccactgatgttcgccgaccgttgactattctctacaaaccacaaagacattggaacactatacctattattcggcgcatgagctggagtcctaggcacagctctaagcctccttattcgagccgagctgggccagccaggcaaccttctaggtaacgaccacatctacaacgttatcgtcacagcccatgcatttgtaataatcttcttcatagtaatacccatcataatcggaggctttggcaactgactagttcccctaataatcggtgcccccgatatggcgtttccccgcataaacaacataagcttctgactcttacctccctctctcctactcctgctcgcatctgctatagtggaggccggagcaggaacaggttgaacagtctaccctcccttagcagggaactactcccaccctggagcctccgtagacctaaccatcttctccttacacctagcaggtgtctcctctatcttaggggccatcaatttcatcacaacaattatcaatataaaaccccctgccataacccaataccaaacgcccctcttcgtctgatccgtcctaatcacagcagtcctacttctcctatctctcccagtcctagctgctggcatcactatactactaacagaccgcaacctcaacaccaccttcttcgaccccgccggaggaggagaccccattctataccaacacctattctgatttttcggtcaccctgaagtttatattcttatcctaccaggcttcggaataatctcccatattgtaacttactactccggaaaaaaagaaccatttggatacataggtatggtctgagctatgatatcaattggcttcctagggtttatcgtgtgagcacaccacatatttacagtaggaatagacgtagacacacgagcatatttcacctccgctaccataatcatcgctatccccaccggcgtcaaagtatttagctgactcgccacactccacggaagcaatatgaaatgatctgctgcagtgctctgagccctaggattcatctttcttttcaccgtaggtggcctgactggcattgtattagcaaactcatcactagacatcgtactacacgacacgtactacgttgtagcccacttccactatgtcctatcaataggagctgtatttgccatcataggaggcttcattcactgatttcccctattctcaggctacaccctagaccaaacctacgccaaaatccatttcactatcatattcatcggcgtaaatctaactttcttcccacaacactttctcggcctatccggaatgccccgacgttactcggactaccccgatgcatacaccacatgaaacatcctatcatctgtaggctcattcatttctctaacagcagtaatattaataattttcatgatttgagaagccttcgcttcgaagcgaaaagtcctaatagtagaagaaccctccataaacctggagtgactatatggatgccccccaccctaccacacattcgaagaacccgtatacataaaatctagacaaaaaaggaaggaatcgaaccccccaaagctggtttcaagccaaccccatggcctccatgactttttcaaaaaggtattagaaaaaccatttcataactttgtcaaagttaaattataggctaaatcctatatatcttaatggcacatgcagcgcaagtaggtctacaagacgctacttcccctatcatagaagagcttatcacctttcatgatcacgccctcataatcattttccttatctgcttcctagtcctgtatgcccttttcctaacactcacaacaaaactaactaatactaacatctcagacgctcaggaaatagaaaccgtctgaactatcctgcccgccatcatcctagtcctcatcgccctcccatccctacgcatcctttacataacagacgaggtcaacgatccctcccttaccatcaaatcaattggccaccaatggtactgaacctacgagtacaccgactacggcggactaatcttcaactcctacatacttcccccattattcctagaaccaggcgacctgcgactccttgacgttgacaatcgagtagtactcccgattgaagcccccattcgtataataattacatcacaagacgtcttgcactcatgagctgtccccacattaggcttaaaaacagatgcaattcccggacgtctaaaccaaaccactttcaccgctacacgaccgggggtatactacggtcaatgctctgaaatctgtggagcaaaccacagtttcatgcccatcgtcctagaattaattcccctaaaaatctttgaaatagggcccgtatttaccctatagcaccccctctaccccctctagagcccactgtaaagctaacttagcattaaccttttaagttaaagattaagagaaccaacacctctttacagtgaaatgccccaactaaatactaccgtatggcccaccataattacccccatactccttacactattcctcatcacccaactaaaaatattaaacacaaactaccacctacctccctcaccaaagcccataaaaataaaaaattataacaaaccctgagaaccaaaatgaacgaaaatctgttcgcttcattcattgcccccacaatcctaggcctacccgccgcagtactgatcattctatttccccctctattgatccccacctccaaatatctcatcaacaaccgactaatcaccacccaacaatgactaatcaaactaacctcaaaacaaatgataaccatacacaacactaaaggacgaacctgatctcttatactagtatccttaatcatttttattgccacaactaacctcctcggactcctgcctcactcatttacaccaaccacccaactatctataaacctagccatggccatccccttatgagcgggcgcagtgattataggctttcgctctaagattaaaaatgccctagcccacttcttaccacaaggcacacctacaccccttatccccatactagttattatcgaaaccatcagcctactcattcaaccaatagccctggccgtacgcctaaccgctaacattactgcaggccacctactcatgcacctaattggaagcgccaccctagcaatatcaaccattaaccttccctctacacttatcatcttcacaattctaattctactgactatcctagaaatcgctgtcgccttaatccaagcctacgttttcacacttctagtaagcctctacctgcacgacaacacataatgacccaccaatcacatgcctatcatatagtaaaacccagcccatgacccctaacaggggccctctcagccctcctaatgacctccggcctagccatgtgatttcacttccactccataacgctcctcatactaggcctactaaccaacacactaaccatataccaatgatggcgcgatgtaacacgagaaagcacataccaaggccaccacacaccacctgtccaaaaaggccttcgatacgggataatcctatttattacctcagaagtttttttcttcgcaggatttttctgagccttttaccactccagcctagcccctaccccccaattaggagggcactggcccccaacaggcatcaccccgctaaatcccctagaagtcccactcctaaacacatccgtattactcgcatcaggagtatcaatcacctgagctcaccatagtctaatagaaaacaaccgaaaccaaataattcaagcactgcttattacaattttactgggtctctattttaccctcctacaagcctcagagtacttcgagtctcccttcaccatttccgacggcatctacggctcaacattttttgtagccacaggcttccacggacttcacgtcattattggctcaactttcctcactatctgcttcatccgccaactaatatttcactttacatccaaacatcactttggcttcgaagccgccgcctgatactggcattttgtagatgtggtttgactatttctgtatgtctccatctattgatgagggtcttactcttttagtataaatagtaccgttaacttccaattaactagttttgacaacattcaaaaaagagtaataaacttcgccttaattttaataatcaacaccctcctagccttactactaataattattacattttgactaccacaactcaacggctacatagaaaaatccaccccttacgagtgcggcttcgaccctatatcccccgcccgcgtccctttctccataaaattcttcttagtagctattaccttcttattatttgatctagaaattgccctccttttacccctaccatgagccctacaaacaactaacctgccactaatagttatgtcatccctcttattaatcatcatcctagccctaagtctggcctatgagtgactacaaaaaggattagactgaaccgaattggtatatagtttaaacaaaacgaatgatttcgactcattaaattatgataatcatatttaccaaatgcccctcatttacataaatattatactagcatttaccatctcacttctaggaatactagtatatcgctcacacctcatatcctccctactatgcctagaaggaataatactatcgctgttcattatagctactctcataaccctcaacacccactccctcttagccaatattgtgcctattgccatactagtctttgccgcctgcgaagcagcggtgggcctagccctactagtctcaatctccaacacatatggcctagactacgtacataacctaaacctactccaatgctaaaactaatcgtcccaacaattatattactaccactgacatgactttccaaaaaacacataatttgaatcaacacaaccacccacagcctaattattagcatcatccctctactattttttaaccaaatcaacaacaacctatttagctgttccccaaccttttcctccgaccccctaacaacccccctcctaatactaactacctgactcctacccctcacaatcatggcaagccaacgccacttatccagtgaaccactatcacgaaaaaaactctacctctctatactaatctccctacaaatctccttaattataacattcacagccacagaactaatcatattttatatcttcttcgaaaccacacttatccccaccttggctatcatcacccgatgaggcaaccagccagaacgcctgaacgcaggcacatacttcctattctacaccctagtaggctcccttcccctactcatcgcactaatttacactcacaacaccctaggctcactaaacattctactactcactctcactgcccaagaactatcaaactcctgagccaacaacttaatatgactagcttacacaatagcttttatagtaaagatacctctttacggactccacttatgactccctaaagcccatgtcgaagcccccatcgctgggtcaatagtacttgccgcagtactcttaaaactaggcggctatggtataatacgcctcacactcattctcaaccccctgacaaaacacatagcctaccccttccttgtactatccctatgaggcataattataacaagctccatctgcctacgacaaacagacctaaaatcgctcattgcatactcttcaatcagccacatagccctcgtagtaacagccattctcatccaaaccccctgaagcttcaccggcgcagtcattctcataatcgcccacgggcttacatcctcattactattctgcctagcaaactcaaactacgaacgcactcacagtcgcatcataatcctctctcaaggacttcaaactctactcccactaatagctttttgatgacttctagcaagcctcgctaacctcgccttaccccccactattaacctactgggagaactctctgtgctagtaaccacgttctcctgatcaaatatcactctcctacttacaggactcaacatactagtcacagccctatactccctctacatatttaccacaacacaatggggctcactcacccaccacattaacaacataaaaccctcattcacacgagaaaacaccctcatgttcatacacctatcccccattctcctcctatccctcaaccccgacatcattaccgggttttcctcttgtaaatatagtttaaccaaaacatcagattgtgaatctgacaacagaggcttacgaccccttatttaccgagaaagctcacaagaactgctaactcatgcccccatgtctaacaacatggctttctcaacttttaaaggataacagctatccattggtcttaggccccaaaaattttggtgcaactccaaataaaagtaataaccatgcacactactataaccaccctaaccctgacttccctaattccccccatccttaccaccctcgttaaccctaacaaaaaaaactcatacccccattatgtaaaatccattgtcgcatccacctttattatcagtctcttccccacaacaatattcatgtgcctagaccaagaagttattatctcgaactgacactgagccacaacccaaacaacccagctctccctaagcttcaaactagactacttctccataatattcatccctgtagcattgttcgttacatggtccatcatagaattctcactgtgatatataaactcagacccaaacattaatcagttcttcaaatatctactcatcttcctaattaccatactaatcttagttaccgctaacaacctattccaactgttcatcggctgagagggcgtaggaattatatccttcttgctcatcagttgatgatacgcccgagcagatgccaacacagcagccattcaagcaatcctatacaaccgtatcggcgatatcggtttcatcctcgccttagcatgatttatcctacactccaactcatgagacccacaacaaatagcccttctaaacgctaatccaagcctcaccccactactaggcctcctcctagcagcagcaggcaaatcagcccaattaggtctccacccctgactcccctcagccatagaaggccccaccccagtctcagccctactccactcaagcactatagttgtagcaggaatcttcttactcatccgcttccaccccctagcagaaaatagcccactaatccaaactctaacactatgcttaggcgctatcaccactctgttcgcagcagtctgcgcccttacacaaaatgacatcaaaaaaatcgtagccttctccacttcaagtcaactaggactcataatagttacaatcggcatcaaccaaccacacctagcattcctgcacatctgtacccacgccttcttcaaagccatactatttatgtgctccgggtccatcatccacaaccttaacaatgaacaagatattcgaaaaataggaggactactcaaaaccatacctctcacttcaacctccctcaccattggcagcctagcattagcaggaatacctttcctcacaggtttctactccaaagaccacatcatcgaaaccgcaaacatatcatacacaaacgcctgagccctatctattactctcatcgctacctccctgacaagcgcctatagcactcgaataattcttctcaccctaacaggtcaacctcgcttccccacccttactaacattaacgaaaataaccccaccctactaaaccccattaaacgcctggcagccggaagcctattcgcaggatttctcattactaacaacatttcccccgcatcccccttccaaacaacaatccccctctacctaaaactcacagccctcgctgtcactttcctaggacttctaacagccctagacctcaactacctaaccaacaaacttaaaataaaatccccactatgcacattttatttctccaacatactcggattctaccctagcatcacacaccgcacaatcccctatctaggccttcttacgagccaaaacctgcccctactcctcctagacctaacctgactagaaaagctattacctaaaacaatttcacagcaccaaatctccacctccatcatcacctcaacccaaaaaggcataattaaactttacttcctctctttcttcttcccactcatcctaaccctactcctaatcacataacctattcccccgagcaatctcaattacaatatatacaccaacaaacaatgttcaaccagtaactactactaatcaacgcccataatcatacaaagcccccgcaccaataggatcctcccgaatcaaccctgacccctctccttcataaattattcagcttcctacactattaaagtttaccacaaccaccaccccatcatactctttcacccacagcaccaatcctacctccatcgctaaccccactaaaacactcaccaagacctcaacccctgacccccatgcctcaggatactcctcaatagccatcgctgtagtatatccaaagacaaccatcattccccctaaataaattaaaaaaactattaaacccatataacctcccccaaaattcagaataataacacacccgaccacaccgctaacaatcaatactaaacccccataaataggagaaggcttagaagaaaaccccacaaaccccattactaaacccacactcaacagaaacaaagcatacatcattattctcgcacggactacaaccacgaccaatgatatgaaaaaccatcgttgtatttcaactacaagaacaccaatgaccccaatacgcaaaactaaccccctaataaaattaattaaccactcattcatcgacctccccaccccatccaacatctccgcatgatgaaacttcggctcactccttggcgcctgcctgatcctccaaatcaccacaggactattcctagccatgcactactcaccagacgcctcaaccgccttttcatcaatcgcccacatcactcgagacgtaaattatggctgaatcatccgctaccttcacgccaatggcgcctcaatattctttatctgcctcttcctacacatcgggcgaggcctatattacggatcatttctctactcagaaacctgaaacatcggcattatcctcctgcttgcaactatagcaacagccttcataggctatgtcctcccgtgaggccaaatatcattctgaggggccacagtaattacaaacttactatccgccatcccatacattgggacagacctagttcaatgaatctgaggaggctactcagtagacagtcccaccctcacacgattctttacctttcacttcatcttgcccttcattattgcagccctagcagcactccacctcctattcttgcacgaaacgggatcaaacaaccccctaggaatcacctcccattccgataaaatcaccttccacccttactacacaatcaaagacgccctcggcttacttctcttccttctctccttaatgacattaacactattctcaccagacctcctaggcgacccagacaattataccctagccaaccccttaaacacccctccccacatcaagcccgaatgatatttcctattcgcctacacaattctccgatccgtccctaacaaactaggaggcgtccttgccctattactatccatcctcatcctagcaataatccccatcctccatatatccaaacaacaaagcataatatttcgcccactaagccaatcactttattgactcctagccgcagacctcctcattctaacctgaatcggaggacaaccagtaagctacccttttaccatcattggacaagtagcatccgtactatacttcacaacaatcctaatcctaataccaactatctccctaattgaaaacaaaatactcaaatgggcctgtccttgtagtataaactaatacaccagtcttgtaaaccggagatgaaaacctttttccaaggacaaatcagagaaaaagtctttaactccaccattagcacccaaagctaagattctaatttaaactattctctgttctttcatggggaagcagatttgggtaccacccaagtattgactcacccatcaacaaccgctatgtatttcgtacattactgccagccaccatgaatattgcacggtaccataaatacttgaccacctgtagtacataaaaacccaatccacatcaaaaccccctccccatgcttacaagcaagtacagcaatcaaccctcaactatcacacatcaactgcaactccaaagccacccctcacccactaggataccaacaaacctacccacccttaacagtacatagtacataaagccatttaccgtacatagcacattacagtcaaatcccttctcgtccccatggatgacccccctcagataggggtcccttgaccaccatcctccgtgaaatcaatatcccgcacaagagtgctactctcctcgctccgggcccataacacttgggggtagctaaagtgaactgtatccgacatctggttcctacttcagggccataaagcctaaatagcccacacgttccccttaaataagacatcacgatg

SEQ ID NO: 145 - DNA, 16561 bp, Homo sapiens mitochondrial
  3108: "n" refers to a nucleotide at position 3107 of the Cambridge Reference Sequence (CRS, Anderson et al. 1981 Nature 290:457-465), later determined to be absent from the human mtDNA sequence according to the revised CRS (rCRS, Andrews et al. 1999 Nature Genetics 23:147); "n" therefore represents a single nucleotide deletion at a position corresponding to nucleotide 3107 of SEQ ID NO:1 as provided herein.
gatcacaggtctatcaccctattaaccactcacgggagctctccatgcatttggtattttcgtctggggggtgtgcacgcgatagcattgcgagacgctggagccggagcaccctatgtcgcagtatctgtctttgattcctgcctcatcctattatttatcgcacctacgttcaatattacaggcgaacatacttactaaagtgtgttaattaattaatgcttgtaggacataataataacaattgaatgtctgcacagccgctttccacacagacatcataacaaaaaatttccaccaaaccccccctcccccgccttctggccacagcacttaaacacatctctgccaaaccccaaaaacaaagaaccctaacaccagcctaaccagatttcaaattttatcttttggcggtatgcacttttaacagtcaccccccaactaacacattattttcccctcccactcccatactactaatctcatcaatacaacccccgcccatcctacccagcacacacacaccgctgctaaccccataccccgaaccaaccaaaccccaaagacaccccccacagtttatgtagcttacctcctcaaagcaatacactgaaaatgtttagacgggctcacatcaccccataaacaaataggtttggtcctagcctttctattagctcttagtaagattacacatgcaagcatccccattccagtgagttcaccctctaaatcaccacgatcaaaagggacaagcatcaagcacgcagcaatgcagctcaaaacgcttagcctagccacacccccacgggaaacagcagtgattaacctttagcaataaacgaaagtttaactaagctatactaaccccagggttggtcaatttcgtgccagccaccgcggtcacacgattaacccaagtcaatagaagccggcgtaaagagtgttttagatcaccccctccccaataaagctaaaactcacctgagttgtaaaaaactccagttgacacaaaatagactacgaaagtggctttaacatatctgaacacacaatagctaagacccaaactgggattagataccccactatgcttagccctaaacctcaacagttaaatcaacaaaactgctcgccagaacactacgagccacagcttaaaactcaaaggacctggcggtgcttcatatccctctagaggagcctgttctgtaatcgataaaccccgatcaacctcaccacctcttgctcagcctatataccgccatcttcagcaaaccctgatgaaggctacaaagtaagcgcaagtacccacgtaaagacgttaggtcaaggtgtagcccatgaggtggcaagaaatgggctacattttctaccccagaaaactacgatagcccttatgaaacttaagggtcgaaggtggatttagcagtaaactgagagtagagtgcttagttgaacagggccctgaagcgcgtacacaccgcccgtcaccctcctcaagtatacttcaaaggacatttaactaaaacccctacgcatttatatagaggagacaagtcgtaacatggtaagtgtactggaaagtgcacttggacgaaccagagtgtagcttaacacaaagcacccaacttacacttaggagatttcaacttaacttgaccgctctgagctaaacctagccccaaacccactccaccttactaccagacaaccttagccaaaccatttacccaaataaagtataggcgatagaaattgaaacctggcgcaatagatatagtaccgcaagggaaagatgaaaaattataaccaagcataatatagcaaggactaacccctataccttctgcataatgaattaactagaaataactttgcaaggagaaccaaagctaagacccccgaaaccagacgagctacctaagaacagctaaaagagcacacccgtctatgtagcaaaatagtgggaagatttataggtagaggcgacaaacctaccgagcctggtgatagctggttgtccaagatagaatcttagttcaactttaaatttgcccacagaaccctctaaatccccttgtaaatttaactgttagtccaaagaggaacagctctttggacactaggaaaaaaccttgtagagagagtaaaaaatttaacacccatagtaggcctaaaagcagccaccaattaagaaagcgttcaagctcaacacccactacctaaaaaatcccaaacatataactgaactcctcacacccaattggaccaatctatcaccctatagaagaactaatgttagtataagtaacatgaaaacattctcctccgcataagcctgcgtcagattaaaacactgaactgacaattaacagcccaatatctacaatcaaccaacaagtcattattaccctcactgtcaacccaacacaggcatgctcataaggaaaggttaaaaaaagtaaaaggaactcggcaaatcttaccccgcctgtttaccaaaaacatcacctctagcatcaccagtattagaggcaccgcctgcccagtgacacatgtttaacggccgcggtaccctaaccgtgcaaaggtagcataatcacttgttccttaaatagggacctgtatgaatggctccacgagggttcagctgtctcttacttttaaccagtgaaattgacctgcccgtgaagaggcgggcatgacacagcaagacgagaagaccctatggagctttaatttattaatgcaaacagtacctaacaaacccacaggtcctaaactaccaaacctgcattaaaaatttcggttggggcgacctcggagcagaacccaacctccgagcagtacatgctaagacttcaccagtcaaagcgaactactatactcaattgatccaataacttgaccaacggaacaagttaccctagggataacagcgcaatcctattctagagtccatatcaacaatagggtttacgacctcgatgttggatcaggacatcccgatggtgcagccgctattaaaggttcgtttgttcaacgattaaagtcctacgtgatctgagttcagaccggagtaatccaggtcggtttctatctacnttcaaattcctccctgtacgaaaggacaagagaaataaggcctacttcacaaagcgccttcccccgtaaatgatatcatctcaacttagtattatacccacacccacccaagaacagggtttgttaagatggcagagcccggtaatcgcataaaacttaaaactttacagtcagaggttcaattcctcttcttaacaacatacccatggccaacctcctactcctcattgtacccattctaatcgcaatggcattcctaatgcttaccgaacgaaaaattctaggctatatacaactacgcaaaggccccaacgttgtaggcccctacgggctactacaacccttcgctgacgccataaaactcttcaccaaagagcccctaaaacccgccacatctaccatcaccctctacatcaccgccccgaccttagctctcaccatcgctcttctactatgaacccccctccccatacccaaccccctggtcaacctcaacctaggcctcctatttattctagccacctctagcctagccgtttactcaatcctctgatcagggtgagcatcaaactcaaactacgccctgatcggcgcactgcgagcagtagcccaaacaatctcatatgaagtcaccctagccatcattctactatcaacattactaataagtggctcctttaacctctccacccttatcacaacacaagaacacctctgattactcctgccatcatgacccttggccataatatgatttatctccacactagcagagaccaaccgaacccccttcgaccttgccgaaggggagtccgaactagtctcaggcttcaacatcgaatacgccgcaggccccttcgccctattcttcatagccgaatacacaaacattattataataaacaccctcaccactacaatcttcctaggaacaacatatgacgcactctcccctgaactctacacaacatattttgtcaccaagaccctacttctaacctccctgttcttatgaattcgaacagcatacccccgattccgctacgaccaactcatacacctcctatgaaaaaacttcctaccactcaccctagcattacttatatgacatgtctccatacccattacaatctccagcattccccctcaaacctaagaaatatgtctgataaaagagttactttgatagagtaaataataggagcttaaacccccttatttctaggactatgagaatcgaacccatccctgagaatccaaaattctccgtgccacctatcacaccccatcctaaagtaaggtcagctaaataagctatcgggcccataccccgaaaatgttggttatacccttcccgtactaattaatcccctggcccaacccgtcatctactctaccatctttgcaggcacactcatcacagcgctaagctcgcactgattttttacctgagtaggcctagaaataaacatgctagcttttattccagttctaaccaaaaaaataaaccctcgttccacagaagctgccatcaagtatttcctcacgcaagcaaccgcatccataatccttctaatagctatcctcttcaacaatatactctccggacaatgaaccataaccaatactaccaatcaatactcatcattaataatcataatggctatagcaataaaactaggaatagccccctttcacttctgagtcccagaggttacccaaggcacccctctgacatccggcctgcttcttctcacatgacaaaaactagcccccatctcaatcatataccaaatctctccctcactagacgtaagccttctcctcactctctcaatcttatccatcatagcaggcagttgaggtggattaaaccaaacccagctacgcaaaatcttagcatactcctcaattacccacataggatgaataatagcagttctaccgtacaaccctaacataaccattcttaatttaactatttatattatcctaactactaccgcattcctactactcaacttaaactccagcaccacgaccctactactatctcgcacctgaaacaagctaacatgactaacacccttaattccatccaccctcctctccctaggaggcctgcccccgctaaccggctttttgcccaaatgggccattatcgaagaattcacaaaaaacaatagcctcatcatccccaccatcatagccaccatcaccctccttaacctctacttctacctacgcctaatctactccacctcaatcacactactccccatatctaacaacgtaaaaataaaatgacagtttgaacatacaaaacccaccccattcctccccacactcatcgcccttaccacgctactcctacctatctccccttttatactaataatcttatagaaatttaggttaaatacagaccaagagccttcaaagccctcagtaagttgcaatacttaatttctgtaacagctaaggactgcaaaaccccactctgcatcaactgaacgcaaatcagccactttaattaagctaagcccttactagaccaatgggacttaaacccacaaacacttagttaacagctaagcaccctaatcaactggcttcaatctacttctcccgccgccgggaaaaaaggcgggagaagccccggcaggtttgaagctgcttcttcgaatttgcaattcaatatgaaaatcacctcggagctggtaaaaagaggcctaacccctgtctttagatttacagtccaatgcttcactcagccattttacctcacccccactgatgttcgccgaccgttgactattctctacaaaccacaaagacattggaacactatacctattattcggcgcatgagctggagtcctaggcacagctctaagcctccttattcgagccgagctgggccagccaggcaaccttctaggtaacgaccacatctacaacgttatcgtcacagcccatgcatttgtaataatcttcttcatagtaatacccatcataatcggaggctttggcaactgactagttcccctaataatcggtgcccccgatatggcgtttccccgcataaacaacataagcttctgactcttacctccctctctcctactcctgctcgcatctgctatagtggaggccggagcaggaacaggttgaacagtctaccctcccttagcagggaactactcccaccctggagcctccgtagacctaaccatcttctccttacacctagcaggtgtctcctctatcttaggggccatcaacttcatcacaacaattatcaatataaaaccccctgccataacccaataccaaacgcccctcttcgtctgatccgtcctaatcacagcagtcctacttctcctatctctcccagtcctagctgctggcatcactatactactaacagaccgcaacctcaacaccaccttcttcgaccccgccggaggaggagaccccattctataccaacacctattctgatttttcggtcaccctgaagtttatattcttatcctaccaggcttcggaataatctcccatattgtaacttactactccggaaaaaaagaaccatttggatacataggtatggtctgagctatgatatcaattggcttcctagggtttatcgtgtgagcacaccatatatttacagtaggaatagacgtagacacacgagcatatttcacctccgctaccataatcatcgctatccccaccggcgtcaaagtatttagctgactcgccacactccacggaagcaatatgaaatgatctgctgcagtgctctgagccctaggattcatctttcttttcaccgtaggtggcctgactggcattgtattagcaaactcatcactagacatcgtactacacgacacgtactacgttgtagctcacttccactatgtcctatcaataggagctgtatttgccatcataggaggcttcattcactgatttcccctattctcaggctacaccctagaccaaacctacgccaaaatccatttcactatcatattcatcggcgtaaatctaactttcttcccacaacactttctcggcctatccggaatgccccgacgttactcggactaccccgatgcatacaccacatgaaacatcctatcatctgtaggctcattcatttctctaacagcagtaatattaataattttcatgatttgagaagccttcgcttcgaagcgaaaagtcctaatagtagaagaaccctccataaacctggagtgactatatggatgccccccaccctaccacacattcgaagaacccgtatacataaaatctagacaaaaaaggaaggaatcgaaccccccaaagctggtttcaagccaaccccatggcctccatgactttttcaaaaaggtattagaaaaaccatttcataactttgtcaaagttaaattataggctaaatcctatatatcttaatggcacatgcagcgcaagtaggtctacaagacgctacttcccctatcatagaagagcttatcacctttcatgatcacgccctcataatcattttccttatctgcttcctagtcctgtatgcccttttcctaacactcacaacaaaactaactaatactaacatctcagacgctcaggaaatagaaaccgtctgaactatcctgcccgccatcatcctagtcctcatcgccctcccatccctacgcatcctttacataacagacgaggtcaacgatccctcccttaccatcaaatcaattggccaccaatggtactgaacctacgagtacaccgactacggcggactaatcttcaactcctacatacttcccccattattcctagaaccaggcgacctgcgactccttgacgttgacaatcgagtagtactcccgattgaagcccccattcgtataataattacatcacaagacgtcttgcactcatgagctgtccccacattaggcttaaaaacagatgcaattcccggacgtctaaaccaaaccactttcaccgctacacgaccgggggtatactacggtcaatgctctgaaatctgtggagcaaaccacagtttcatgcccatcgtcctagaattaattcccctaaaaatctttgaaatagggcccgtatttaccctatagtaccccctctagagcccactgtaaagctaacttagcattaaccttttaagttaaagattaagagaaccaacacctctttacagtgaaatgccccaactaaatactaccgtatggcccaccataattacccccatactccttacactattcctcatcacccaactaaaaatattaaacacaaactaccacctacctccctcaccaaagcccataaaaataaaaaattataacaaaccctgagaaccaaaatgaacgaaaatctgttcgcttcattcattgcccccacaatcctaggcctacccgccgcagtactgatcattctatttccccctctattgatccccacctccaaatatctcatcaacaaccgactaatcaccacccaacaatgactaatcaaactaacctcaaaacaaataataaccatacacaacactaaaggacgaacctgatctcttatactagtatccttaatcatttttattgccacaactaacctcctcggactcctgcctcactcatttacaccaaccacccaactatctataaacctagccatggccatccccttatgagcgggcgcagtgattataggctttcgctctaagattaaaaatgccctagcccacttcttaccacaaggcacacctacaccccttatccccatactagttattatcgaaaccatcagcctactcattcaaccaatagccctggccgtacgcctaaccgctaacattactgcaggccacctactcatgcacctaattggaagcgccaccctagcaatatcaaccattaaccttccctctacacttatcatcttcacaattctaattctactgactatcctagaaatcgctgtcgccttaatccaagcctacgttttcacacttctagtaagcctctacctgcacgacaacacataatgacccaccaatcacatgcctatcatatagtaaaacccagcccatgacccctaacaggggccctctcagccctcctaatgacctccggcctagccatgtgatttcacttccactccataacgctcctcatactaggcctactaaccaacacactaaccatataccaatgatggcgcgatgtaacacgagaaagcacataccaaggccaccacacaccacctgtccaaaaaggccttcgatacgggataatcctatttattacctcagaagtttttttcttcgcaggatttttctgagccttttaccactccagcctagcccctaccccccaattaggagggcactggcccccaacaggcatcaccccgctaaatcccctagaagtcccactcctaaacacatccgtattactcgcatcaggagtatcaatcacctgagctcaccatagtctaatagaaaacaaccgaaaccaaataattcaagcactgcttattacaattttactgggtctctattttaccctcctacaagcctcagagtacttcgagtctcccttcaccatttccgacggcatctacggctcaacattttttgtagccacaggcttccacggacttcacgtcattattggctcaactttcctcactatctgcttcatccgccaactaatatttcactttacatccaaacatcactttggcttcgaagccgccgcctgatactggcattttgtagatgtggtttgactatttctgtatgtctccatctattgatgagggtcttactcttttagtataaatagtaccgttaacttccaattaactagttttgacaacattcaaaaaagagtaataaacttcgccttaattttaataatcaacaccctcctagccttactactaataattattacattttgactaccacaactcaacggctacatagaaaaatccaccccttacgagtgcggcttcgaccctatatcccccgcccgcgtccctttctccataaaattcttcttagtagctattaccttcttattatttgatctagaaattgccctccttttacccctaccatgagccctacaaacaactaacctgccactaatagttatgtcatccctcttattaatcatcatcctagccctaagtctggcctatgagtgactacaaaaaggattagactgaaccgaattggtatatagtttaaacaaaacgaatgatttcgactcattaaattatgataatcatatctaccaaatgcccctcatttacataaatattatactagcatttaccatctcacttctaggaatactagtatatcgctcacacctcatatcctccctactatgcctagaaggaataatactatcgctgttcattatagctactctcataaccctcaacacccactccctcttagccaatattgtgcctattgccatactagtctttgccgcctgcgaagcagcggtgggcctagccctactagtctcaatctccaacacatatggcctagactacgtacataacctaaacctactccaatgctaaaactaatcgtcccaacaattatattactaccactgacatgactttccaaaaaacacataatttgaatcaacacaaccacccacagcctaattattagcatcatccctctactattttttaaccaaatcaacaacaacctatttagctgttccccaaccttttcctccgaccccctaacaacccccctcctaatactaactacctgactcctacccctcacaatcatggcaagccaacgccacttatccagtgaaccactatcacgaaaaaaactctacctctctatactaatctccctacaaatctccttaattataacattcacagccacagaactaatcatattttatatcttcttcgaaaccacacttatccccaccttggctatcatcacccgatgaggcaaccagccagaacgcctgaacgcaggcacatacttcctattctacaccctagtaggctcccttcccctactcatcgcactgatttacactcacaacaccctaggctcactaaacattctactactcactctcactgcccaagaactatcaaactcctgagccaacaacttaatatgactagcttacacaatagcttttatagtaaagatacctctttacggactccacttatgactccctaaagcccatgtcgaagcccccatcgctgggtcaatagtacttgccgcagtactcttaaaactaggcggctatggtataatacgcctcacactcattctcaaccccctgacaaaacacatagcctaccccttccttgtactatccctatgaggcataattataacaagctccatctgcctacgacaaacagacctaaaatcgctcattgcatactcttcaatcagccacatagccctcgtagtaacagccattctcatccaaaccccctgaagcttcaccggcgcagtcattctcataatcgcccacggacttacatcctcattactattctgcctagcaaactcaaactacgaacgcactcacagtcgcatcataatcctctctcaaggacttcaaactctgctcccactaatagctttttgatgacttctagcaagcctcgctaacctcgccttaccccccactattaacctactgggagaactctctgtgctagtaaccacgttctcctgatcaaatatcactctcctacttacaggactcaacatactagtcacagccctatactccctctacatatttaccacaacacaatggggctcactcacccaccacattaacaacataaaaccctcattcacacgagaaaacaccctcatgttcatacacctatcccccattctcctcctatccctcaaccccgacatcattaccgggttttcctcttgtaaatatagtttaaccaaaacatcagattgtgaatctgacaacagaggcttacgaccccttatttaccgagaaagctcacaagaactgctaactcatgcccccatgtctaacaacatggctttctcaacttttaaaggataacagctatccattggtcttaggccccaaaaattttggtgcaactccaaataaaagtaataaccatgcacactactataaccaccctaaccctgacttccctaattccccccatccttaccaccctcgttaaccctaacaaaaaaaactcatacccccattatgtaaaatccattgtcgcatccacctttattatcagtctcttccccacaacaatattcatgtgcctagaccaagaagttattatctcgaactgacactgagccacaacccaaacaacccagctctccctaagcttcaaactagactacttctccataatattcatccctgtagcattgttcgttacatggtccatcatagaattctcactgtgatatataaactcagacccaaacattaatcagttcttcaaatatctactcatcttcctaattaccatactaatcttagttaccgctaacaacctattccaactgttcatcggctgagagggcgtaggaattatatccttcttgctcatcagttgatgatacgcccgagcagatgccaacacagcagccattcaagcaatcctatacaaccgtatcggcgatatcggtttcatcctcgccttagcatgatttatcctacactccaactcatgagacccacaacaaatagcccttctaaacgctaatccaagcctcaccccactactaggcctcctcctagcagcagcaggcaaatcagcccaattaggtctccacccctgactcccctcagccatagaaggccccaccccagtctcagccctactccactcaagcactatagttgtagcaggaatcttcttactcatccgcttccaccccctagcagaaaatagcccactaatccaaactctaacactatgcttaggcgctatcaccactctgttcgcagcagtctgcgcccttacacaaaatgacatcaaaaaaatcgtagccttctccacttcaagtcaactaggactcataatagttacaatcggcatcaaccaaccacacctagcattcctgcacatctgtacccacgccttcttcaaagccatactatttatgtgctccggatccatcatccacaaccttaacaatgaacaagatattcgaaaaataggaggactactcaaaaccatacctctcacttcaacctccctcaccattggcagcctagcattagcaggaatacctttcctcacaggtttctactccaaagaccacatcatcgaaaccgcaaacatatcatacacaaacgcctgagccctatctattactctcatcgctacctccctgacaagcgcctatagcactcgaataattcttctcaccctaacaggtcaacctcgcttccccacccttactaacattaacgaaaataaccccaccctactaaaccccattaaacgcctggcagccggaagcctattcgcaggatttctcattactaacaacatttcccccgcatcccccttccaaacaacaatccccctctacctaaaactcacagccctcgctgtcactttcctaggacttctaacagccctagacctcaactacctaaccaacaaacttaaaataaaatccccactatgcacattttatttctccaacatactcggattctaccctagcatcacacaccgcacaatcccctatctaggccttcttacgagccaaaacctgcccctactcctcctagacctaacctgactagaaaagctattacctaaaacaatttcacagcaccaaatctccacctccatcatcacctcaacccaaaaaggcataattaaactttacttcctctctttcttcttcccactcatcctaaccctactcctaatcacataacctattcccccgagcaatctcaattacaatatatacaccaacaaacaatgttcaaccagtaactactactaatcaacgcccatagtcatacaaagcccccgcaccaataggatcctcccgaatcaaccctgacccctctccttcataaattattcagcttcctacactattaaagtttaccacaaccaccaccccatcatactctttcacccacagcaccaatcctacctccatcgctaaccccactaaaacactcaccaagacctcaacccctgacccccatgcctcaggatactcctcaatagccatcgctgtagtatatccaaagacaaccatcattccccctaaataaattaaaaaaactattaaacccatataacctcccccaaaattcagaataataacacacccgaccacaccgctaacaatcaatactaaacccccataaataggagaaggcttagaagaaaaccccacaaaccccattactaaacccacactcaacagaaacaaagcatacatcattattctcgcacggactacaaccacgaccaatgatatgaaaaaccatcgttgtatttcaactacaagaacaccaatgaccccaatacgcaaaattaaccccctaataaaattaattaaccactcattcatcgacctccccaccccatccaacatctccgcatgatgaaacttcggctcactccttggcgcctgcctgatcctccaaatcaccacaggactattcctagccatacactactcaccagacgcctcaaccgccttttcatcaatcgcccacatcactcgagacgtaaattatggctgaatcatccgctaccttcacgccaatggcgcctcaatattctttatctgcctcttcctacacatcgggcgaggcctatattacggatcatttctctactcagaaacctgaaacatcggcattatcctcctgcttgcaactatagcaacagccttcataggctatgtcctcccgtgaggccaaatatcattctgaggggccacagtaattacaaacttactatccgccatcccatacattgggacagacctagttcaatgaatctgaggaggctactcagtagacagtcccaccctcacacgattctttacctttcacttcatcttgcccttcattattgcagccctagcagcactccacctcctattcttgcacgaaacgggatcaaacaaccccctaggaatcacctcccattccgataaaatcaccttccacccttactacacaatcaaagacgccctcggcttacttctcttcattctctccttaatgacattaacactattctcaccagacctcctaggcgacccagacaattataccctagccaaccccttaaacacccctccccacatcaagcccgaatgatatttcctattcgcctacacaattctccgatccgtccctaacaagctaggaggcgtccttgccctattactatccatcctcatcctagcaataatccccatcctccatatatccaaacaacaaagcataatatttcgcccactaagccaatcactttattgactcctagccgcagacctcctcattctaacctgaatcggaggacaaccagtaagctacccttttaccatcattggacaagtagcatccgtactatacttcacaacaatcctaatcctaataccaactatctccctaattgaaaacaaaatactcaaatgggcctgtccttgtagtataaactaatacaccagtcttgtaaaccgaagatgaaaacctttttccaaggacaaatcagagaaaaagtctttaactccaccattagcacccaaagctaagattctaatttaaactattctctgttctttcatggggaagcagatttgggtaccacccaagtattgactcacccatcaacaaccgctatgtatttcgtacattactgccagccaccatgaatattgcacggtaccataaatacttgaccacctgtagtacataaaaacccaatccacatcaaacccccccccccatgcttacaagcaagtacagcaatcaaccctcaactatcacacatcaactgcaactccaaagccatccctcacccactaggataccaacaaacctacccatctttaacagtacatagtacataaagccatttaccgtacatagcacattacagtcaaatcccttctcgtccccatggatgacccccctcagataggggtcccttgaccaccatcctccgtgaaatcaatatcccgcacaagagtgctactctcctcgctccgggcccataacacttgggggtagctaaagtgaactgtatccgacatctggttcctacttcagggccataaagcctaaatagcccacacgttccccttaaataagacatcacgatg

SEQ ID NO: 146 - DNA, 16565 bp, Homo sapiens mitochondrial
  3103: "n" refers to a nucleotide at position 3107 of the Cambridge Reference Sequence (CRS, Anderson et al. 1981 Nature 290:457-465), later determined to be absent from the human mtDNA sequence according to the revised CRS (rCRS, Andrews et al. 1999 Nature Genetics 23:147); "n" therefore represents a single nucleotide deletion at a position corresponding to nucleotide 3107 of SEQ ID NO:1 as provided herein.
gatcacaggtctatcaccctattaaccactcacgggagctctccatgcatttggtattttcgtctggggggtgtgcacgcgatagcattgcgagacgctggagccggagcaccctatgtcgcagtatctgtctttgattcctgcctcatcctattatttatcgcacctacgttcaatattacaggcgaacatacttactaaagtgtgttaattaattaatgcttgtaggacataataataacaattgatgtctgcacagccactttccacacagacatcataacaaaatttccaccaaaccccccctcccccgccttctggccacagcacttaaacacatctctgccaaaccccaaaaacaaagaaccctaacaccagcctaaccagatttcaaattttatcttttggcggtatgcacttttaacagtcaccccccaactaacacattattttcccctcccactcccatactactaatctcatcaacacagcccccgcccatcctacccagcacacacaccgctgctaaccccataccccgaaccaaccaaaccccaaagacaccccccacagtttatgtagcttacctcctcaaagcaatacactgaaaatgtttagacgggctcacatcaccccataaacaaataggtttggtcctagcctttctattagctcttagtaagattacacatgcaagcatccccgttccagtgagttcaccctctaaatcaccacgatcaaaagggacaagcatcaagcacgcagcaatgcagctcaaaacgcttagcctagccacacccccacgggaaacagcagtgattaacctttagcaataaacgaaagtttaactaagctatactaaccccagggttggtcaatttcgtgccagccaccgcggtcacacgattaacccaagtcaatagaagccggcgtaaagagtgttttagatcaccccctccccaataaagctaaaactcacctgagttgtaaaaaactccagttgacacaaaatagactacgaaagtggctttaacatatctgaacacacaatagctaagacccaaactgggattagataccccactatgcttagccctaaacctcaacagttaaatcaacaaaactgctcgccagaacactacgagccacagcttaaaactcaaaggacctggcggtgcttcatatccctctagaggagcctgttctgtaatcgataaaccccgatcaacctcaccacctcttgctcagcctatataccgccatcttcagcaaaccctgatgaaggctacaaagtaagcgcaagtacccacgtaaagacgttaggtcaaggtgtagcccatgaggtggcaagaaatgggctacattttctaccccagaaaactacgatagcccttatgaaacttaagggtcgaaggtggatttagcagtaaactgagagtagagtgcttagttgaacagggccctgaagcgcgtacacaccgcccgtcaccctcctcaagtatacttcaaaggacatttaactaaaacccctacgcatttatatagaggagacaagtcgtaacatggtaagtgtactggaaagtgcacttggacgaaccagagtgtagcttaacacaaagcacccaacttacacttaggagatttcaacttaacttgaccgctctgagctaaacctagccccaaacccactccaccttactaccagacaaccttagccaaaccatttacccaaataaagtataggcgatagaaattgaaacctggcgcaatagatatagtaccgcaagggaaagatgaaaaattataaccaagcataatatagcaaggactaacccctataccttctgcataatgaattaactagaaataactttgcaaggagagccaaagctaagacccccgaaaccagacgagctacctaagaacagctaaaagagcacacccgtctatgtagcaaaatagtgggaagatttataggtagaggcgacaaacctaccgagcctggtgatagctggttgtccaagatagaatcttagttcaactttaaatttgcccacagaaccctctaaatccccttgtaaatttaactgttagtccaaagaggaacagctctttggacactaggaaaaaaccttgtagagagagtaaaaaatttaacacccatagtaggcctaaaagcagccaccaattaagaaagcgttcaagctcaacacccactacctaaaaaatcccaaacatataactgaactcctcacacccaattggaccaatctatcaccctatagaagaactaatgttagtataagtaacatgaaaacattctcctccgcataagcctgcgtcagattaaaacactgaactgacaattaacagcccaatatctacaatcaaccaacaagtcattattaccctcactgtcaacccaacacaggcatgctcataaggaaaggttaaaaaaagtaaaaggaactcggcaaatcttaccccgcctgtttaccaaaaacatcacctctagcatcaccagtattagaggcaccgcctgcccagtgacacatgtttaacggccgcggtaccctaaccgtgcaaaggtagcataatcacttgttccttaaatagggacctgtatgaatggctccacgagggttcagctgtctcttacttttaaccagtgaaattgacctgcccgtgaagaggcgggcatgacacagcaagacgagaagaccctatggagctttaatttattaatgcaaacagtacctaacaaacccacaggtcctaaactaccaaacctgcattaaaaatttcggttggggcgacctcggagcagaacccaacctccgagcagtacatgctaagacttcaccagtcaaagcgaactactatactcaattgatccaataacttgaccaacggaacaagttaccctagggataacagcgcaatcctattctagagtccatatcaacaatagggtttacgacctcgatgttggatcaggacatcccgatggtgcagccgctattaaaggttcgtttgttcaacgattaaagtcctacgtgatctgagttcagaccggagtaatccaggtcggtttctatctacnttcaaattcctccctgtacgaaaggacaagagaaataaggcctacttcacaaagcgccttcccccgtaaatgatatcatctcaacttagtattatacccacacccacccaagaacagggtttgttaagatggcagagcccggtaatcgcataaaacttaaaactttacagtcagaggttcaattcctcttcttaacaacatacccatggccaacctcctactcctcattgtacccattctaatcgcaatggcattcctaatgcttaccgaacgaaaaattctaggctatatacaactacgcaaaggccccaacgttgtaggcccctacgggctactacaacccttcgctgacgccataaaactcttcaccaaagagcccctaaaacccgccacatctaccatcaccctctacatcaccgccccgaccttagctctcaccatcgcacttctactatgaacccccctccccatacccaaccccctggtcaacctcaacctaggcctcctatttattctagccacctctagcctagccgtttactcaatcctctgatcagggtgagcatcaaactcaaactacgccctgatcggcgcactgcgagcagtagcccaaacaatctcatatgaagtcaccctagccatcattctactatcaacattactaataagtggctcctttaacctctccacccttatcacaacacaagaacacctctgattactcctgccatcatgacccttggccataatatgatttatctccacactagcagagaccaaccgaacccccttcgaccttgccgaaggggagtccgaactagtctcaggcttcaacatcgaatacgccgcaggccccttcgccctattcttcatagccgaatacacaaacattattataataaacaccctcaccactacaatcttcctaggaacaacatatgacgcactctcccctgaactctacacaacatattttgtcaccaagaccctacttctaacctccctgttcttatgaattcgaacagcatacccccgattccgctacgaccaactcatacacctcctatgaaaaaacttcctaccactcaccctagcattacttatatgatatgtctccatacccattacaatctctagcattccccctcaaacctaagaaatatgtctgataaaagagttactttgatagagtaaataataggagcttaaacccccttatttctaggactatgagaatcgaacccatccctgagaatccaaaattctccgtgccacctatcacaccccatcctaaagtaaggtcagctaaataagctatcgggcccataccccgaaaatgttggttatacccttcccgtactaattaatcccctggcccaacccgtcatctactctaccatctttgcaggcacactcatcacagcgctaagctcgcactgattttttacctgagtaggcctagaaataaacatgctagcttttattccagttctaaccaaaaaaataaaccctcgttccacagaagctgccatcaagtatttcctcacgcaagcaaccgcatccataatccttctaatagctatcctcttcaacaatatactctccgggcaatgaaccataaccaatactaccaatcaatactcatcattaataatcataatggctatagcaataaaactaggaatagccccctttcacttctgagtcccagaggttacccaaggcacccctctgacatccggcctgcttcttctcacatgacaaaaactagcccccatctcaatcatataccaaatctctccctcactaaacgtaagccttctcctcactctctcaatcttatccatcatagcaggcagttgaggtggattaaaccaaacccagctacgcaaaatcttagcatactcctcaattacccacataggatgaataatagcagttctaccgtacaaccctaacataaccattcttaatttaactatttatattatcctaactactaccgcattcctactactcaacttaaactccagcaccacgaccctactactatctcgcacctgaaacaagctaacatgactaacacccttaattccatccaccctcctctccctaggaggcctgcccccgctaaccggctttttgcccaaatgggccattatcgaagaattcacaaaaaacaatagcctcatcatccccaccatcatagccaccatcaccctccttaacctctacttctacctacgcctaatctactccacctcaatcacactactccccatatctaacaacgtaaaaataaaatgacagtttgaacatacaaaacccaccccattcctccccacactcatcgcccttaccacgctactcctacctatctccccttttatactaataatcttatagaaatttaggttaaatacagaccaagagccttcaaagccctcagtaagttgcaatacttaatttctgtaacagctaaggactgcaaaaccccactctgcatcaactgaacgcaaatcagccactttaattaagctaagcccttactagaccaatgggacttaaacccacaaacacttagttaacagctaagcaccctaatcaactggcttcaatctacttctcccgccgccgggaaaaaaggcgggagaagccccggcaggtttgaagctgcttcttcgaatttgcaattcaatatgaaaatcacctcggagctggtaaaaagaggcctaacccctgtctttagatttacagtccaatgcttcactcagccattttacctcacccccactgatgttcgccgaccgttgactattctctacaaaccacaaagacattggaacactatacctattattcggcgcatgagctggagtcctaggcacagctctaagcctccttattcgagccgagctgggccagccaggcaaccttctaggtaacgaccacatctacaacgttatcgtcacagcccatgcatttgtaataatcttcttcatagtaatacccatcataatcggaggctttggcaactgactagttcccctaataatcggtgcccccgatatggcgtttccccgcataaacaacataagcttctgactcttacctccctctctcctactcctgctcgcatctgctatagtggaggccggagcaggaacaggttgaacagtctaccctcccttagcagggaactactcccaccctggagcctccgtagacctaaccatcttctccttacacctagcaggtgtctcctctatcttaggggccatcaatttcatcacaacaattatcaatataaaaccccctgccataacccaataccaaacgcccctcttcgtctgatccgtcctaatcacagcagtcctacttctcctatctctcccagtcctagctgctggcatcactatactactaacagaccgcaacctcaacaccaccttcttcgaccccgccggaggaggagaccccattctataccaacacctattctgatttttcggtcaccctgaagtttatattcttatcctaccaggcttcggaataatctcccatattgtaacttactactccggaaaaaaagaaccatttggatacataggtatggtctgagctatgatatcaattggcttcctagggtttatcgtgtgagcacaccatatatttacagtaggaatagacgtagacacacgagcatatttcacctccgctaccataatcatcgctatccccaccggcgtcaaagtatttagctgactcgccacactccacggaagcaatatgaaatgatctgctgcagtgctctgagccctaggattcatctttcttttcaccgtaggtggcctgactggcattgtattagcaaactcatcactagacatcgtactacacgacacatactacgttgtagctcacttccactatgtcctatcaataggagctgtatttgccatcataggaggcttcattcactgatttcccctattctcaggctacaccctagaccaaacctacgccaaaatccatttcactatcatattcatcggcgtaaatctaactttcttcccacaacactttctaggcctatccggaatgccccgacgttactcggactaccccgatgcatacaccacatgaaacatcctatcatctgtaggctcattcatttctctaacagcagtaatattaataattttcatgatttgagaagccttcgcttcgaagcgaaaagtcctaatagtagaagaaccctccataaacctggagtgactatatggatgccccccaccctaccacacattcgaagaacccgtatacataaaatctagacaaaaaaggaaggaatcgaaccccccaaagctggtttcaagccaaccccatggcctccatgactttttcaaaaaggtattagaaaaaccatttcataactttgtcaaagttaaattataggctaaatcctatatatcttaatggcacatgcagcgcaagtaggtctacaagacgctacttcccctatcatagaagagcttatcacctttcatgatcacgccctcataatcattttccttatctgcttcctagtcctgtatgcccttttcctaacactcacaacaaaactaactaatactaacatctcagacgctcaggaaatagaaaccgtctgaactatcctgcccgccatcatcctagtcctcatcgccctcccatccctacgcatcctttacataacagacgaggtcaacgatccctcccttaccatcaaatcaattggccaccaatggtactgaacctacgagtacaccgactacggcggactaatcttcaactcctacatacttcccccattattcctagaaccaggcgacctgcgactccttgacgttgacaatcgagtagtactcccgattgaagcccccattcgtataataattacatcacaagacgtcttgcactcatgagctgtccccacattaggcttaaaaacagatgcaattcccggacgtctaaaccaaaccactttcaccgctacacgaccgggggtatactacggtcaatgctctgaaatctgtggagcaaaccacagtttcatgcccatcgtcctagaattaattcccctaaaaatctttgaaatagggcccgtatttaccctatagcaccccctctaccccctctagagcccactgtaaagctaacttagcattaaccttttaagttaaagattaagagaaccaacacctctttacagtgaaatgccccaactaaatactaccgtatggcccaccataattacccccatactccttacactattcctcatcacccaactaaaaatattaaacacaaactaccacctacctccctcaccaaagcccataaaaataaaaaattataacaaaccctgagaaccaaaatgaacgaaaatctgttcgcttcattcattgcccccacaatcctaggcctacccgccacagtactgatcattctatttccccctctattgatccccacctccaaatatctcatcaacaaccgactaatcaccacccaacaatgactaatcaaactaacctcaaaacaaatgatagccatacacaacactaaaggacgaacctgatctcttatactagtatccttaatcatttttattgccacaactaacctcctcggactcctgcctcactcatttacaccaaccacccaactatctataaacctagccatggccatccccttatgagcgggcgcagtgattataggctttcgctctaagattaaaaatgccctagcccacttcttaccacaaggcacacctacaccccttatccccatactagttattatcgaaaccatcagcctactcattcaaccaatagccctggccgtacgcctaaccgctaacattactgcaggccacctactcatgcacctaattggaagcgccaccctagcaatatcaaccattaaccttccctctacacttatcatcttcacaattctaattctactgactatcctagaaatcgctgtcgccttaatccaagcctacgttttcacacttctagtaagcctctacctgcacgacaacacataatgacccaccaatcacatgcctatcatatagtaaaacccagcccatgacccctaacaggggccctctcagccctcctaatgacctccggcctagccatgtgatttcacttccactccataacgctcctcatactaggcctactaaccaacacactaaccatataccaatgatggcgcgatgtaacacgagaaagcacataccaaggccaccacacaccacctgtccaaaaaggccttcgatacgggataatcctatttattacctcagaagtttttttcttcgcaggatttttctgagccttttaccactccagcctagcccctaccccccaactaggggggcactggcctccaacaggcatcaccccgctaaatcccctagaagtcccactcctaaacacatccgtattactcgcatcaggagtatcaatcacctgagctcaccatagtctaatagaaaacaaccgaaaccaaataattcaagcactgcttattacaattttactgggtctctattttaccctcctacaagcctcagagtacttcgagtctcccttcaccatttccgacggcatctacggctcaacattttttgtagccacaggcttccacggacttcacgtcattattggctcaactttcctcactatctgcttcatccgccaactaatatttcactttacatccaaacatcactttggcttcgaagccgccgcctgatactggcattttgtagatgtggtttgactatttctgtatgtctccatctattgatgagggtcttactcttttagtataaatagtaccgttaacttccaattaactagttttgacaacattcaaaaaagagtaataaacttcgccttaattttaataatcaacaccctcctagccttactactaataattattacattttgactaccacaactcaacggctacatagaaaaatccaccccttacgagtgcggcttcgaccctatatcccccgcccgcgtccctttctccataaaattcttcttagtagctattaccttcttattatttgatctagaaattgccctccttttacccctaccatgagccctacaaacaactaacctgccactaatagttatgtcatccctcttattaatcatcatcctagccctaagtctggcctatgagtgactacaaaaaggattagactgagctgaattggtatatagtttaaacaaaacgaatgatttcgactcattaaattatgataatcatatttaccaaatgcccctcatttacataaatattatactagcatttaccatctcacttctaggaatactagtatatcgctcacacctcatatcctccctactatgcctagaaggaataatactatcgctgttcattatagctactctcataaccctcaacacccactccctcttagccaatattgtgcctattgccatactagtctttgccgcctgcgaagcagcggtgggcctagccctactagtctcaatctccaacacatatggcctagactacgtacataacctaaacctactccaatgctaaaactaatcgtcccaacaattatattactaccactgacatgactttccaaaaaacacataatttgaatcaacacaaccacccacagcctaattattagcatcatccccctactattttttaaccaaatcaacaacaacctatttagctgttccccaaccttttcctccgaccccctaacaacccccctcctaatactaactacctgactcctacccctcacaatcatggcaagccaacgccacttatccagtgaaccactatcacgaaaaaaactctacctctctatactaatctccctacaaatctccttaattataacattcacagccacagaactaatcatattttatatcttcttcgaaaccacacttatccccaccttggctatcatcacccgatgaggcaaccagccagaacgcctgaacgcaggcacatacttcctattctacaccctagtaggctcccttcccctactcatcgcactaatttacactcacaacaccctaggctcactaaacattctactactcactctcactgcccaagaactatcaaactcctgagccaacaacttaatatgactagcttacacaatagcttttatagtaaagatacctctttacggactccacttatgactccctaaagcccatgtcgaagcccccatcgctgggtcaatagtacttgccgcagtactcttaaaactaggcggctatggtataatacgcctcacactcattctcaaccccctgacaaaacacatagcctaccccttccttgtactatccctatgaggcataattataacaagctccatctgcctacgacaaacagacctaaaatcgctcattgcatactcttcaatcagccacatagccctcgtagtaacagccattctcatccaaaccccctgaagcttcaccggcgcagtcattctcataatcgcccacggacttacatcctcattactattctgcctagcaaactcaaactacgaacgcactcacagtcgcatcataatcctctctcaaggacttcaaactctactcccactaatagctttttgatgacttctagcaagcctcgctaacctcgccttaccccccactattaacctactgggagaactctctgtgctagtaaccacattctcctgatcaaatatcactctcctacttacaggactcaacatactagtcacagccctatactccctctacatatttaccacaacacaatggggctcactcacccaccacattaacaacataaaaccctcattcacacgagaaaacaccctcatgttcatacacctatcccccattctcctcctatccctcaaccccgacatcattaccgggttttcctcttgtaaatatagtttaaccaaaacatcagattgtgaatctgacaacagaggcttacgaccccttatttaccgagaaagctcacaagaactgctaactcatgcccccatgtctaacaacatggctttctcaacttttaaaggataacagctatccattggtcttaggccccaaaaattttggtgcaactccaaataaaagtaataaccatgcacactactataaccaccctaaccctgacttccctaattccccccatccttaccaccctcgttaaccctaacaaaaaaaactcatacccccattatgtaaaatccattatcgcatccacctttattatcagtctcttccccacaacaatattcatgtgcctagaccaagaagttattatctcgaactgacactgagccacaacccaaacaacccagctctccctaagcttcaaactagactacttctccataatattcatccctgtagcattgttcgttacatggtccatcatagaattctcactgtgatatataaactcagacccaaacattaatcagttcttcaaatatctactcattttcctaattaccatactaatcttagttaccgctaacaacctattccaactgttcatcggctgagagggcgtaggaattatatccttcttgctcatcagttgatgatacgcccgagcagatgccaacacagcagccattcaagcaatcctatacaaccgtatcggcgatatcggtttcatcctcgccttagcatgatttatcctacactccaactcatgagacccacaacaaatagcccttctaaacgctaatccaagcctcaccccactactaggcctcctcctagcagcagcaggcaaatcagcccaattaggtctccacccctgactcccctcagccatagaaggccccaccccagtctcagccctactccactcaagcactatagttgtagcaggaatcttcttactcatccgcttccaccccctagcagaaaatagcccactaatccaaactctaacactatgcttaggcgctatcaccactctgttcgcagcagtctgcgcccttacacaaaatgacatcaaaaaaatcgtagccttctccacttcaagtcagctaggactcataatagttacaatcggcatcaaccaaccacacctagcattcctgcacatctgtacccacgccttcttcaaagccatactatttatgtgctccgggtccatcatccacaaccttaacaatgaacaagatattcgaaaaataggaggactactcaaaaccatacctctcacttcaacctccctcaccattggcagcctagcattagcaggaatacctttcctcacaggtttctactccaaagaccacatcatcgaaaccgcaaacatatcatacacaaacgcctgagccctatctattactctcatcgctacctccctgacaagcgcctatagcactcgaataattcttctcaccctaacaggtcaacctcgcttccccacccttactaacattaacgaaaataaccccaccctactaaaccccattaaacgcctggcagccggaagcctattcgcaggatttctcattactaacaacatttcccccgcatcccccttccaaacaacaatccccctctacctaaaactcacagccctcgctgtcactttcctaggacttctaacagccctagacctcaactacctaaccaacaaacttaaaataaaatccccactatgcacattttatttctccaacatactcggattctaccctagcatcacacaccgcacaatcccctatctaggccttcttacgagccaaaacctgcccctactcctcctagacctaacctgactagaaaagctattacctaaaacaatttcacagcaccaaatctccacctccatcatcacctcaacccaaaaaggcataattaaactttacttcctctctttcttcttcccactcatcctaaccctactcctaatcacataacctattcccccgagcaatctcaattacaatatatacaccaacaaacaatgttcaaccagtaactactactaatcaacgcccataatcatacaaagcccccgcaccaataggatcctcccgaatcaaccctgacccctctccttcataaattattcagcttcctacactactaaagtttaccacaaccaccaccccatcatactctttcacccacagcaccaatcctacctccatcgctaaccccactaaaacactcaccaagacctcaacccctgacccccatgcctcaggatactcctcaatagccatcgctgtagtatatccaaagacaaccatcattccccctaaataaattaaaaaaactattaaacccatataacctcccccaaaattcagaataataacacacccgaccacaccgctaacaatcaatactaaacccccataaataggagaaggcttagaagaaaaccccacaaaccccattactaaacccacactcaacagaaacaaagcatacatcattattctcgcacggactacaaccacgaccaatgatatgaaaaaccatcgttgtatttcaactacaagaacaccaatgaccccaatacgcaaaattaaccccctaataaaactaattaaccactcattcatcgacctccccaccccatccaacatctccgcatgatgaaacttcggctcactccttggcgcctgcctgatcctccaaatcaccacaggactattcctagccatgcactactcaccagacgcctcaaccgccttttcatcaatcgcccacatcactcgagacgtaaattatggctgaatcatccgctaccttcacgccaatggcgcctcaatattctttatctgcctcttcctacacatcggacgaggcctatattacggatcatttctctactcagaaacctgaaacatcggcattatcctcctgcttgcaactatagcaacagccttcataggctatgtcctcccgtgaggccaaatatcattctgaggggccacagtaattacaaacttactatccgccatcccatacattgggacagacctagttcaatgaatctgaggaggctactcagtagacagtcccaccctcacacgattctttacctttcacttcatcttacccttcattattgcagccctagcagcactccacctcctattcttgcacgaaacgggatcaaacaaccccctaggaatcacctcccattccgataaaatcaccttccacccttactacacaatcaaagacgccctcggcttacttctcttccttctctccttaatgacattaacactattctcacctgacctcctaggcgacccagacaattataccctagccaaccccttaaacacccctccccacatcaagcccgaatgatatttcctattcgcctacacaattctccgatccgtccctaacaaactaggaggcgtccttgccctattactatccatcctcatcctagcaataatccccatcctccatatatccaaacaacaaagcataatatttcgcccactaagccaatcactttattgactcctagccgcagacctcctcattctaacctgaatcggaggacaaccagtaagctacccttttaccatcattggacaagtagcatccgtactatacttcacaacaatcctaatcctaataccaactatctccctaattgaaaacaaaatactcaaatgggcctgtccttgtagtataaactaatacaccagtcttgtaaaccggagatgaaaacctttttccaaggacaaatcagagaaaaagtctttaactccaccattagcacccaaagctaagattctaatttaaactattctctgttctttcatggggaagcagatttgggtaccacccaagtattgactcacccatcaacaaccgctatgtatttcgtacattactgccagccaccatgaatattgtacggtaccataaatacttgaccacctgtagtacataaaaacccaatccacatcaaaaccccctccccatgcttacaagcaagtacagcaatcaaccttcaactatcacacatcaactgcaactccaaagccacccctcacccactaggataccaacaaacctacccaccctcaacagtacatagcacataaagccattcatcgtacatagcacattacagtcaaatcccttctcgtccccatggatgacccccctcagataggggtcccttgaccaccatcctccgtgaaatcaatatcccgcacaagagtgctactctcctcgctccgggcccataacacttgggggtagctaaagtgaactgtatccgacatctggttcctacttcagggccataaagcctaaatagcccacacgttccccttaaataagacatcacgatg

SEQ ID NO: 147 - DNA, 16570 bp, Homo sapiens mitochondrial
  3108: "n" refers to a nucleotide at position 3107 of the Cambridge Reference Sequence (CRS, Anderson et al. 1981 Nature 290:457-465), later determined to be absent from the human mtDNA sequence according to the revised CRS (rCRS, Andrews et al. 1999 Nature Genetics 23:147); "n" therefore represents a single nucleotide deletion at a position corresponding to nucleotide 3107 of SEQ ID NO:1 as provided herein.
gatcacaggtctatcaccctattaaccactcacgggagctctccatgcatttggtattttcgtctggggggtatgcacgcgatagcattgcgagacgctggagccggagcaccctatgtcgcagtatctgtctttgattcctgcctcatcctattatttatcgcacctacgttcaatattacaggcgaacatacttactaaagtgtgttaattaattaatgcttgtaggacataataataacaattggatgtctgcacagccgctttccacacagacatcataacaaaaaatttccaccaaaccccccctcccccgccttctggccacagcacttaaacacatctctgccaaaccccaaaaacaaagaaccctaacaccagcctaaccagatttcaaattttatcttttggcggtatgcacttttaacagtcaccccccaactaacacattattttcccctcccactcccatactactaatctcatcaatacaacccccgcccatcctacccagcacacacacaccgctgctaaccccataccccgaaccaaccaaaccccaaagacaccccccacagtttatgtagcttacctcctcaaagcaatacactgaaaatgtttagacgggctcacatcaccccataaacaaataggtttggtcctagcctttctattagctcttagtaagattacacatgcaagcatccccgttccagtgagttcaccctctaaatcaccacgatcaaaagggacaagcatcaagcacgcagcaatgcagctcaaaacgcttagcctagccacacccccacgggaaacagcagtgattaacctttagcaataaacgaaagtttaactaagctatactaaccccagggttggtcaatttcgtgccagccaccgcggtcacacgattaacccaagtcaatagaagccggcgtaaagagtgttttagatcaccccctccccaataaagctaaaactcacctgagttgtaaaaaactccagttgacacaaaatagactacgaaagtggctttaacatatctgaacacacaatagctaagacccaaactgggattagataccccactatgcttagccctaaacctcaacagttaaatcaacaaaactgctcgccagaacactacgagccacagcttaaaactcaaaggacctggcggtgcttcatatccctctagaggagcctgttctgtaatcgataaaccccgatcaacctcaccacctcttgctcagcctatataccgccatcttcagcaaaccctgatgaaggctacaaagtaagcgcaagtacccacgtaaagacgttaggtcaaggtgtagcccatgaggtggcaagaaatgggctacattttctaccccagaaaactacgatagcccttatgaaacttaagggtcgaaggtggatttagcagtaaactgagagtagagtgcttagttgaacagggccctgaagcgcgtacacaccgcccgtcaccctcctcaagtatacttcaaaggacatttaactaaaacccctacgcatttatatagaggagacaagtcgtaacatggtaagtgtactggaaagtgcacttggacgaaccagagtgtagcttaacacaaagcacccaacttacacttaggagatttcaacttaacttgaccgctctgagctaaacctagccccaaacccactccaccttactaccagacaaccttagccaaaccatttacccaaataaagtataggcgatagaaattgaaacctggcgcaatagatatagtaccgcaagggaaagatgaaaaattataaccaagcataatatagcaaggactaacccctataccttctgcataatgaattaactagaaataactttgcaaggagagccaaagctaagacccccgaaaccagacgagctacctaagaacagctaaaagagcacacccgtctatgtagcaaaatagtgggaagatttataggtagaggcgacaaacctaccgagcctggtgatagctggttgtccaagatagaatcttagttcaactttaaatttgcccacagaaccctctaaatccccttgtaaatttaactgttagtccaaagaggaacagctctttggacactaggaaaaaaccttgtagagagagtaaaaaatttaacacccatagtaggcctaaaagcagccaccaattaagaaagcgttcaagctcaacacccactacctaaaaaatcccaaacatataactgaactcctcacacccaattggaccaatctatcaccctatagaagaactaatgttagtataagtaacatgaaaacattctcctccgcataagcctgcgtcagattaaaacactgaactgacaattaacagcccaatatctacaatcaaccaacaagtcattattaccctcactgtcaacccaacacaggcatgctcataaggaaaggttaaaaaaagtaaaaggaactcggcaaatcttaccccgcctgtttaccaaaaacatcacctctagcatcaccagtattagaggcaccgcctgcccagtgacacatgtttaacggccgcggtaccctaaccgtgcaaaggtagcataatcacttgttccttaaatagggacctgtatgaatggctccacgagggttcagctgtctcttacttttaaccagtgaaattgacctgcccgtgaagaggcgggcataacacagcaagacgagaagaccctatggagctttaatttattaatgcaaacagtacctaacaaacccacaggtcctaaactaccaaacctgcattaaaaatttcggttggggcgacctcggagcagaacccaacctccgagcagtacatgctaagacttcaccagtcaaagcgaactactatactcaattgatccaataacttgaccaacggaacaagttaccctagggataacagcgcaatcctattctagagtccatatcaacaatagggtttacgacctcgatgttggatcaggacatcccgatggtgcagccgctattaaaggttcgtttgttcaacgattaaagtcctacgtgatctgagttcagaccggagtaatccaggtcggtttctatctacnttcaaattcctccctgtacgaaaggacaagagaaataaggcctacttcacaaagcgccttcccccgtaaatgatatcatctcaacttagtattatacccacacccacccaagaacagggtttgttaagatggcagagcccggtaatcgcataaaacttaaaactttacagtcagaggttcaattcctcttcttaacaacatacccatggccaacctcctactcctcattgtacccattctaatcgcaatggcattcctaatgcttaccgaacgaaaaattctaggctatatacaactacgcaaaggccccaacgttgtaggcccctacgggctactacaacccttcgctgacgccataaaactcttcaccaaagagcccctaaaacccgccacatctaccatcaccctctacatcaccgccccgaccttagctctcaccatcgctcttctactatgaacccccctccccatacccaaccccctggtcaacctcaacctaggcctcctatttattctagccacctctagcctagccgtttactcaatcctctgatcagggtgagcatcaaactcaaactacgccctgatcggcgcactgcgagcagtagcccaaacaatctcatatgaagtcaccctagccatcattctactatcaacattactaataagtggctcctttaacctctccacccttatcacaacacaagaacacctctgattactcctgccatcatgacccttggccataatatgatttatctccacactagcagagaccaaccgaacccccttcgaccttgccgaaggggagtccgaactagtctcaggcttcaacatcgaatacgccgcaggccccttcgccctattcttcatagccgaatacacaaacattattataataaacaccctcaccactacaatcttcctaggaacaacatatgacgcactctcccctgaactctacacaacatattttgtcaccaagaccctacttctaacctccctgttcttatgaattcgaacagcatacccccgattccgctacgaccaactcatacacctcctatgaaaaaacttcctaccactcaccctagcattacttatatgatatgtctccatacccattacaatctccagcattccccctcaaacctaagaaatatgtctgataaaagagttactttgatagagtaaataataggagcttaaacccccttatttctaggactatgagaatcgaacccatccctgagaatccaaaattctccgtgccacctatcacaccccatcctaaagtaaggtcagctaaataagctatcgggcccataccccgaaaatgttggttatacccttcccgtactaattaatcccctggcccaacccgtcatctactctaccatctttgcaggcacactcatcacagcgctaagctcgcactgattttttacctgagtaggcctagaaataaacatgctagcttttattccagttctaaccaaaaaaataaaccctcgttccacagaagctgccatcaagtatttcctcacgcaagcaaccgcatccataatccttctaatagctatcctcttcaacaatatactctccggacaatgaaccataaccaatactaccaatcaatactcatcattaataatcataatggctatagcaataaaactaggaatagccccctttcacttctgagtcccagaggttacccaaggcacccctctgacatccggcctgcttcttctcacatgacaaaaactagcccccatctcaatcatataccaaatctctccctcactaaacgtaagccttctcctcactctctcaatcttatccatcatagcaggcagttgaggtggattaaaccaaacccagctacgcaaaatcttagcatactcctcaattacccacataggatgaataatagcagttctaccgtacaaccctaacataaccattcttaatttaactatttatattatcctaactactaccgcattcctactactcaacttaaactccagcaccacgaccctactactatctcgcacctgaaacaagctaacatgactaacacccttaattccatccaccctcctctccctaggaggcctgcccccgctaaccggctttttgcccaaatgggccattatcgaagaattcacaaaaaacaatagcctcatcatccccaccatcatagccaccatcaccctccttaacctctacttctacctacgcctaatctactccacctcaatcacactactccccatatctaacaacgtaaaaataaaatgacagtttgaacatacaaaacccaccccattcctccccacactcatcgcccttaccacgctactcctacctatctccccttttatactaataatcttatagaaatttaggttaaatacagaccaagagccttcaaagccctcagtaagttgcaatacttaatttctgtaacagctaaggactgcaaaaccccactctgcatcaactgaacgcaaatcagccactttaattaagctaagcccttactagaccaatgggacttaaacccacaaacacttagttaacagctaagcaccctaatcaactggcttcaatctacttctcccgccgccgggaaaaaaggcgggagaagccccggcaggtttgaagctgcttcttcgaatttgcaattcaatatgaaaatcacctcggagctggtaaaaagaggcctaacccctgtctttagatttacagtccaatgcttcactcagccattttacctcacccccactgatgttcgccgaccgttgactattctctacaaaccacaaagacattggaacactatacctattattcggcgcatgagctggagtcctaggcacagctctaagcctccttattcgagccgagctgggccagccaggcaaccttctaggtaacgaccacatctacaacgttatcgtcacagcccatgcatttgtaataatcttcttcatagtaatacccatcataatcggaggctttggcaactgactagttcccctaataatcggtgcccccgatatggcgtttccccgcataaacaacataagcttctgactcttacctccctctctcctactcctgctcgcatctgctatagtggaggccggagcaggaacaggttgaacagtctaccctcccttagcagggaactactcccaccctggagcctccgtagacctaaccatcttctccttacacctagcaggtgtctcctctatcttaggggccatcaatttcatcacaacaattatcaatataaaaccccctgccataacccaataccaaacgcccctcttcgtctgatccgtcctaatcacagcagtcctacttctcctatctctcccagtcctagctgctggcatcactatactactaacagaccgcaacctcaacaccaccttcttcgaccccgccggaggaggagaccccattctataccaacacctattctgatttttcggtcaccctgaagtttatattcttatcctaccaggcttcggaataatctcccatattgtaacttactactccggaaaaaaagaaccatttggatacataggtatggtctgagctatgatatcaattggcttcctagggtttatcgtgtgagcacaccacatatttacagtaggaatagacgtagacacacgagcatatttcacctccgctaccataatcatcgctatccccaccggcgtcaaagtatttagctgactcgccacactccacggaagcaatatgaaatgatctgctgcagtgctctgagccctaggattcatctttcttttcaccgtaggtggcctgactggcattgtattagcaaactcatcactagacatcgtactacacgacacgtactacgttgtagcccacttccactatgtcctatcaataggagctgtatttgccatcataggaggcttcattcactgatttcccctattctcaggctacaccctagaccaaacctacgccaaaatccatttcactatcatattcatcggcgtaaatctaactttcttcccacaacactttctcggcctatccggaatgccccgacgttactcggactaccccgatgcatacaccacatgaaacatcctatcatctgtaggctcattcatttctctaacagcagtaatattaataattttcatgatttgagaagccttcgcttcgaagcgaaaagtcctaatagtagaagaaccctccataaacctggagtgactatatggatgccccccaccctaccacacattcgaagaacccgtatacataaaatctagacaaaaaaggaaggaatcgaaccccccaaagctggtttcaagccaaccccatggcctccatgactttttcaaaaaggtattagaaaaaccatttcataactttgtcaaagttaaattataggctaaatcctatatatcttaatggcacatgcagcgcaagtaggtctacaagacgctacttcccctatcatagaagagcttatcacctttcatgatcacgccctcataatcattttccttatctgcttcctagtcctgtatgcccttttcctaacactcacaacaaaactaactaatactaacatctcagacgctcaggaaatagaaaccgtctgaactatcctgcccgccatcatcctagtcctcatcgccctcccatccctacgcatcctttacataacagacgaggtcaacgatccctcccttaccatcaaatcaattggccaccaatggtactgaacctacgagtacaccgactacggcggactaatcttcaactcctacatacttcccccattattcctagaaccaggcgacctgcgactccttgacgttgacaatcgagtagtactcccgattgaagcccccattcgtataataattacatcacaagacgtcttgcactcatgagctgtccccacattaggcttaaaaacagatgcaattcccggacgtctaaaccaaaccactttcaccgctacacgaccgggggtatactacggtcaatgctctgaaatctgtggagcaaaccacagtttcatgcccatcgtcctagaattaattcccctaaaaatctttgaaatagggcccgtatttaccctatagcaccccctctaccccctctagagcccactgtaaagctaacttagcattaaccttttaagttaaagattaagagaaccaacacctctttacagtgaaatgccccaactaaatactaccgtatggcccaccataattacccccatactccttacactattcctcatcacccaactaaaaatattaaacacaaactaccacctacctccctcaccaaagcccataaaaataaaaaattataacaaaccctgagaaccaaaatgaacgaaaatctgttcgcttcattcattgcccccacaatcctaggcctacccgccgcagtactgatcattctatttccccctctattgatccccacctccaaatatctcatcaacaaccgactaatcaccacccaacaatgactaatcaaactaacctcaaaacaaatgataaccatacacaacactaaaggacgaacctgatctcttatactagtatccttaatcatttttattgccacaactaacctcctcggactcctgcctcactcatttacaccaaccacccaactatctataaacctagccatggccatccccttatgagcgggcgcagtgattataggctttcgctctaagattaaaaatgccctagcccacttcttaccacaaggcacacctacaccccttatccccatactagttattatcgaaaccatcagcctactcattcaaccaatagccctggccgtacgcctaaccgctaacattactgcaggccacctactcatgcacctaattggaagcgccaccctagcaatatcaaccattaaccttccctctacacttatcatcttcacaattctaattctactgactatcctagaaatcgctgtcgccttaatccaagcctacgttttcacacttctagtaagcctctacctgcacgacaacacataatgacccaccaatcacatgcctatcatatagtaaaacccagcccatgacccctaacaggggccctctcagccctcctaatgacctccggcctagccatgtgatttcacttccactccataacgctcctcatactaggcctactaaccaacacactaaccatataccaatgatggcgcgatgtaacacgagaaagcacataccaaggccaccacacaccacctgtccaaaaaggccttcgatacgggataatcctatttattacctcagaagtttttttcttcgcaggatttttctgagccttttaccactccagcctagcccctaccccccaattaggagggcactggcccccaacaggcatcaccccgctaaatcccctagaagtcccactcctaaacacatccgtattactcgcatcaggagtatcaatcacctgagctcaccatagtctaatagaaaacaaccgaaaccaaataattcaagcactgcttattacaattttactgggtctctattttaccctcctacaagcctcagagtacttcgagtctcccttcaccatttccgacggcatctacggctcaacattttttgtagccacaggcttccacggacttcacgtcattattggctcaactttcctcactatctgcttcatccgccaactaatatttcactttacatccaaacatcactttggcttcgaagccgccgcctgatactggcattttgtagatgtggtttgactatttctgtatgtctccatctattgatgagggtcttactcttttagtataaatagtaccgttaacttccaattaactagttttgacaacattcaaaaaagagtaataaacttcgccttaattttaataatcaacaccctcctagccttactactaataattattacattttgactaccacaactcaacggctacatagaaaaatccaccccttacgagtgcggcttcgaccctatatcccccgcccgcgtccctttctccataaaattcttcttagtagctattaccttcttattatttgatctagaaattgccctccttttacccctaccatgagccctacaaacaactaacctgccactaatagttatgtcatccctcttattaatcatcatcctagccctaagtctggcctatgagtgactacaaaaaggattagactgaaccgaattggtatatagtttaaacaaaacgaatgatttcgactcattaaattatgataatcatatttaccaaatgcccctcatttacataaatattatactagcatttaccatctcacttctaggaatactagtatatcgctcacacctcatatcctccctactatgcctagaaggaataatactatcgctgttcattatagctactctcataaccctcaacacccactccctcttagccaatattgtgcctattgccatactagtctttgccgcctgcgaagcagcggtgggcctagccctactagtctcaatctccaacacatatggcctagactacgtacataacctaaacctactccaatgctaaaactaatcgtcccaacaattatattactaccactgacatgactttccaaaaaacacataatttgaatcaacacaaccacccacagcctaattattagcatcatccctctactattttttaaccaaatcaacaacaacctatttagctgttccccaaccttttcctccgaccccctaacaacccccctcctaatactaactacctgactcctacccctcacaatcatggcaagccaacgccacttatccagtgaaccactatcacgaaaaaaactctacctctctatactaatctccctacaaatctccttaattataacattcacagccacagaactaatcatattttatatcttcttcgaaaccacacttatccccaccttggctatcatcacccgatgaggcaaccagccagaacgcctgaacgcaggcacatacttcctattctacaccctagtaggctcccttcccctactcatcgcactaatttacactcacaacaccctaggctcactaaacattctactactcactctcactgcccaagaactatcaaactcctgagccaacaacttaatatgactagcttacacaatagcttttatagtaaagatacctctttacggactccacttatgactccctaaagcccatgtcgaagcccccatcgctgggtcaatagtacttgccgcagtactcttaaaactaggcggctatggtataatacgcctcacactcattctcaaccccctgacaaaacacatagcctaccccttccttgtactatccctatgaggcataattataacaagctccatctgcctacgacaaacagacctaaaatcgctcattgcatactcttcaatcagccacatagccctcgtagtaacagccattctcatccaaaccccctgaagcttcaccggcgcagtcattctcataatcgcccacgggcttacatcctcattactattctgcctagcaaactcaaactacgaacgcactcacagtcgcatcataatcctctctcaaggacttcaaactctactcccactaatagctttttgatgacttctagcaagcctcgctaacctcgccttaccccccactattaacctactgggagaactctctgtgctagtaaccacgttctcctgatcaaatatcactctcctacttacaggactcaacatactagtcacagccctatactccctctacatatttaccacaacacaatggggctcactcacccaccacattaacaacataaaaccctcattcacacgagaaaacaccctcatgttcatacacctatcccccattctcctcctatccctcaaccccgacatcattaccgggttttcctcttgtaaatatagtttaaccaaaacatcagattgtgaatctgacaacagaggcttacgaccccttatttaccgagaaagctcacaagaactgctaactcatgcccccatgtctaacaacatggctttctcaacttttaaaggataacagctatccattggtcttaggccccaaaaattttggtgcaactccaaataaaagtaataaccatgcacactactataaccaccctaaccctgacttccctaattccccccatccttaccaccctcgttaaccctaacaaaaaaaactcatacccccattatgtaaaatccattgtcgcatccacctttattatcagtctcttccccacaacaatattcatgtgcctagaccaagaagttattatctcgaactgacactgagccacaacccaaacaacccagctctccctaagcttcaaactagactacttctccataatattcatccctgtagcattgttcgttacatggtccatcatagaattctcactgtgatatataaactcagacccaaacattaatcagttcttcaaatatctactcatcttcctaattaccatactaatcttagttaccgctaacaacctattccaactgttcatcggctgagagggcgtaggaattatatccttcttgctcatcagttgatgatacgcccgagcagatgccaacacagcagccattcaagcaatcctatacaaccgtatcggcgatatcggtttcatcctcgccttagcatgatttatcctacactccaactcatgagacccacaacaaatagcccttctaaacgctaatccaagcctcaccccactactaggcctcctcctagcagcagcaggcaaatcagcccaattaggtctccacccctgactcccctcagccatagaaggccccaccccagtctcagccctactccactcaagcactatagttgtagcaggaatcttcttactcatccgcttccaccccctagcagaaaatagcccactaatccaaactctaacactatgcttaggcgctatcaccactctgttcgcagcagtctgcgcccttacacaaaatgacatcaaaaaaatcgtagccttctccacttcaagtcaactaggactcataatagttacaatcggcatcaaccaaccacacctagcattcctgcacatctgtacccacgccttcttcaaagccatactatttatgtgctccgggtccatcatccacaaccttaacaatgaacaagatattcgaaaaataggaggactactcaaaaccatacctctcacttcaacctccctcaccattggcagcctagcattagcaggaatacctttcctcacaggtttctactccaaagaccacatcatcgaaaccgcaaacatatcatacacaaacgcctgagccctatctattactctcatcgctacctccctgacaagcgcctatagcactcgaataattcttctcaccctaacaggtcaacctcgcttccccacccttactaacattaacgaaaataaccccaccctactaaaccccattaaacgcctggcagccggaagcctattcgcaggatttctcattactaacaacatttcccccgcatcccccttccaaacaacaatccccctctacctaaaactcacagccctcgctgtcactttcctaggacttctaacagccctagacctcaactacctaaccaacaaacttaaaataaaatccccactatgcacattttatttctccaacatactcggattctaccctagcatcacacaccgcacaatcccctatctaggccttcttacgagccaaaacctgcccctactcctcctagacctaacctgactagaaaagctattacctaaaacaatttcacagcaccaaatctccacctccatcatcacctcaacccaaaaaggcataattaaactttacttcctctctttcttcttcccactcatcctaaccctactcctaatcacataacctattcccccgagcaatctcaattacaatatatacaccaacaaacaatgttcaaccagtaactactactaatcaacgcccataatcatacaaagcccccgcaccaataggatcctcccgaatcaaccctgacccctctccttcataaattattcagcttcctacactattaaagtttaccacaaccaccaccccatcatactctttcacccacagcaccaatcctacctccatcgctaaccccactaaaacactcaccaagacctcaacccctgacccccatgcctcaggatactcctcaatagccatcgctgtagtatatccaaagacaaccatcattccccctaaataaattaaaaaaactattaaacccatataacctcccccaaaattcagaataataacacacccgaccacaccgctaacaatcaatactaaacccccataaataggagaaggcttagaagaaaaccccacaaaccccattactaaacccacactcaacagaaacaaagcatacatcattattctcgcacggactacaaccacgaccaatgatatgaaaaaccatcgttgtatttcaactacaagaacaccaatgaccccaatacgcaaaactaaccccctaataaaattaattaaccactcattcatcgacctccccaccccatccaacatctccgcatgatgaaacttcggctcactccttggcgcctgcctgatcctccaaatcaccacaggactattcctagccatgcactactcaccagacgcctcaaccgccttttcatcaatcgcccacatcactcgagacgtaaattatggctgaatcatccgctaccttcacgccaatggcgcctcaatattctttatctgcctcttcctacacatcgggcgaggcctatattacggatcatttctctactcagaaacctgaaacatcggcattatcctcctgcttgcaactatagcaacagccttcataggctatgtcctcccgtgaggccaaatatcattctgaggggccacagtaattacaaacttactatccgccatcccatacattgggacagacctagttcaatgaatctgaggaggctactcagtagacagtcccaccctcacacgattctttacctttcacttcatcttgcccttcattattgcagccctagcagcactccacctcctattcttgcacgaaacgggatcaaacaaccccctaggaatcacctcccattccgataaaatcaccttccacccttactacacaatcaaagacgccctcggcttacttctcttccttctctccttaatgacattaacactattctcaccagacctcctaggcgacccagacaattataccctagccaaccccttaaacacccctccccacatcaagcccgaatgatatttcctattcgcctacacaattctccgatccgtccctaacaaactaggaggcgtccttgccctattactatccatcctcatcctagcaataatccccatcctccatatatccaaacaacaaagcataatatttcgcccactaagccaatcactttattgactcctagccgcagacctcctcattctaacctgaatcggaggacaaccagtaagctacccttttaccatcattggacaagtagcatccgtactatacttcacaacaatcctaatcctaataccaactatctccctaattgaaaacaaaatactcaaatgggcctgtccttgtagtataaactaatacaccagtcttgtaaaccggagatgaaaacctttttccaaggacaaatcagagaaaaagtctttaactccaccattagcacccaaagctaagattctaatttaaactattctctgttctttcatggggaagcagatttgggtaccacccaagtattgactcacccatcaacaaccgctatgtatttcgtacattactgccagccaccatgaatattgtacggtaccataaatacttgaccacctgtagtacataaaaacccaatccacatcaaaaccccctccccatgcttacaagcaagtacagcaatcaaccctcaactatcacacatcaactgcaactccaaagccacccctcacccactaggataccaacaaacctacccacccttaacagtacatagtacataaagccatttaccgtacatagcacattacagtcaaatcccttctcgtccccatggatgacccccctcagataggggtcccttgaccaccatcctccgtgaaatcaatatcccgcacaagagtgctactctcctcgctccgggcccataacacttgggggtagctaaagtgaactgtatccgacatctggttcctacttcagggtcataaagcctaaatagcccacacgttccccttaaataagacatcacgatg

SEQ ID NO: 148 - DNA, 16570 bp, Homo sapiens mitochondrial
  3108: "n" refers to a nucleotide at position 3107 of the Cambridge Reference Sequence (CRS, Anderson et al. 1981 Nature 290:457-465), later determined to be absent from the human mtDNA sequence according to the revised CRS (rCRS, Andrews et al. 1999 Nature Genetics 23:147); "n" therefore represents a single nucleotide deletion at a position corresponding to nucleotide 3107 of SEQ ID NO:1 as provided herein.
gatcacaggtctatcaccctattaaccactcacgggagctctccatgcatttggtattttcgtctggggggtgtgcacgcgatagcattgcgagacgctggagccggagcaccctatgtcgcagtatctgtctttgattcctgcctcatcctattatttatcgcacctacgttcaatattacaggcgagcatatctactaaagcgtattaattaattaatgcttgtaggacataataataacaattgaatgtctgcacagccgctttccacacagacatcataacaaaaaatttccaccaaaccccccctcccccgccttctggccacagcacttaaacacatctctgccaaaccccaaaaacaaagaaccctaacaccagcctaaccagatttcaaattttatcttttggcggtatgcacttttaacagtcaccccccaactaacacattattttcccctcccactcccatactactaatctcatcaatacaacccccgcccatcctacccagcacacacacaccgctgctaaccccataccccgaaccaaccaaaccccaaagacaccccccacagtttatgtagcttacctcctcaaagcaatacactgaaaatgtttagacgggctcacatcaccccataaacaaataggtttggtcctagcctttctattagctcttagtaagattacacatgcaagcatccccattccagtgagttcaccctctaaatcaccacgatcaaaagggacaagcatcaagcacgcagcaatgcagctcaaaacgcttagcctagccacacccccacgggaaacagcagtgattaacctttagcaataaacgaaagtttaactaagctatactaaccccagggttggtcaatttcgtgccagccaccgcggtcacacgattaacccaagtcaatagaagccggcgtaaagagtgttttagatcaccccctccccaataaagctaaaactcacctgagttgtaaaaaactccagttgacacaaaatagactacgaaagtggctttaacatatctgaacacacaatagctaagacccaaactgggattagataccccactatgcttagccctaaacctcaacagttaaatcaacaaaactgctcgccagaacactacgagccacagcttaaaactcaaaggacctggcggtgcttcatatccctctagaggagcctgttctgtaatcgataaaccccgatcaacctcaccaccccttgctcagcctatataccgccatcttcagcaaaccctgatgaaggctacaaagtaagcgcaagtacccacgtaaagacgttaggtcaaggtgtagcccatgaggtggcaagaaatgggctacattttctaccccagaaaactacgatagcccttatgaaacctaagggtcgaaggtggatttagcagtaaactgagagtagagtgcttagttgaacagggccctgaagcgcgtacacaccgcccgtcaccctcctcaagtatacttcaaaggacatttaactaaaacccctacgcatttatatagaggagacaagtcgtaacatggtaagtgtactggaaagtgcacttggacgaaccagagtgtagcttaacacaaagcacccaacttacacttaggagatttcaacttaacttgaccgctctgagctaaacctagccccaaacccactccaccttactaccagacaaccttagccaaaccatttacccaaataaagtataggcgatagaaattgaaacctggcgcaatagatatagtaccgcaagggaaagatgaaaaattataaccaagcataatatagcaaggactaacccctataccttctgcataatgaattaactagaaataactttgcaaggagagccaaagctaagacccccgaaaccagacgagctacctaagaacagctaaaagagcacacccgtctatgtagcaaaatagtgggaagatttataggtagaggcgacaaacctaccgagcctggtgatagctggttgtccaagatagaatcttagttcaactttaaatttgcccacagaaccctctaaatccccttgtaaatttaactgttagtccaaagaggaacagctctttggacactaggaaaaaaccttgtagagagagtaaaaaatttaacacccatagtaggcctaaaagcagccaccaattaagaaagcgttcaagctcaacacccactacctaaaaaatcccaaacatataactgaactcctcacacccaattggaccaatctatcaccctatagaagaactaatgttagtataagtaacatgaaaacattctcctccgcataagcctgcgtcagattaaaacactgaactgacaattaacagcccaatatctacaatcaaccaacaagtcattattaccctcactgtcaacccaacacaggcatgctcataaggaaaggttaaaaaaagtaaaaggaactcggcaaatcttaccccgcctgtttaccaaaaacatcacctctagcatcaccagtattagaggcaccgcctgcccagtgacacatgtttaacggccgcggtaccctaaccgtgcaaaggtagcataatcacttgttccttaaatagggacctgtatgaatggctccacgagggttcagctgtctcttacttttaaccagtgaaattgacctgcccgtgaagaggcgggcatgacacagcaagacgagaagaccctatggagctttaatttattaatgcaaacagtacctaacaaacccacaggtcctaaactaccaaacctgcattaaaaatttcggttggggcgacctcggagcagaacccaacctccgagcagtacatgctaagacttcaccagtcaaagcgaactactatactcaattgatccaataacttgaccaacggaacaagttaccctagggataacagcgcaatcctattctagagtccatatcaacaatagggtttacgacctcgatgttggatcaggacatcccgatggtgcagccgctattaaaggttcgtttgttcaacgattaaagtcctacgtgatctgagttcagaccggagtaatccaggtcggtttctatctacnttcaaattcctccctgtacgaaaggacaagagaaataaggcctacttcacaaagcgccttcccccgtaaatgatatcatctcaacttagtattatacccacacccacccaagaacagggtttgttaagatggcagagcccggtaatcgcataaaacttaaaactttacagtcagaggttcaattcctcttcttaacaacatacccatggccaacctcctactcctcattgtacccattctaatcgcaatggcattcctaatgcttaccgaacgaaaaattctaggctatatacaactacgcaaaggccccaacgttgtaggcccctacgggctactacaacccttcgctgacgccataaaactcttcaccaaagagcccctaaaacccgccacatctgccatcaccctctacatcaccgccccgaccttagctctcaccatcgctcttctactatgaacccccctccccatacccaaccccctggtcaacctcaacctaggcctcctatttattctagccacctctagcctagccgtttactcaatcctctgatcagggtgagcatcaaactcaaactacgccctgatcggcgcactgcgagcagtagcccaaacaatctcatatgaagtcaccctagccatcattctactatcaacattactaataagtggctcctttaacctctccacccttatcacaacacaagaacacctctgattactcctgccatcatgacccttggccataatatgatttatctccacactagcagagaccaaccgaacccccttcgaccttgccgaaggggagtccgaactagtctcaggcttcaacatcgaatacgccgcaggccccttcgccctattcttcatagccgaatacacaaacattattataataaacaccctcaccactacaatcttcctaggaacaacatatgacgcactctcccctgaactctacacaacatattttgtcaccaagaccctacttctaacctccctgttcttatgaattcgaacagcatacccccgattccgctacgaccaactcatacacctcctatgaaaaaacttcctaccactcaccctagcattacttatatgatatgtctccatacccattacaatctccagcattccccctcaaacctaagaaatatgtctgataaaagagttactttgatagagtaaataataggagcttaaacccccttatttctaggactatgagaatcgaacccatccctgagaatccaaaattctccgtgccacctatcacaccccatcctaaagtaaggtcagctaaataagctatcgggcccataccccgaaaatgttggttatacccttcccgtactaattaatcccctggcccaacccgtcatctactctaccatctttgcaggcacactcatcacagcgctaagctcgcactgattttttacctgagtaggcctagaaataaacatgctagcttttattccagttctaaccaaaaaaataaaccctcgttccacagaagctgccatcaagtatttcctcacgcaagcaaccgcatccataatccttctaatagctatcctcttcaacaatatactctccggacaatgaaccataaccaatactaccaatcaatactcatcattaataatcataatggctatagcaataaaactaggaatagccccctttcacttctgagtcccagaggttacccaaggcacccctctgacatccggcctgcttcttctcacatgacaaaaactagcccccatctcaatcatataccaaatctctccctcactaaacgtaagccttctcctcactctctcaatcttatccatcatagcaggcagttgaggtggattaaaccaaacccagctacgcaaaatcttagcatactcctcaattacccacataggatgaataatagcaattctaccgtacaaccctaacataaccattcttaatttaactatttatattatcctaactactaccgcattcctactactcaacttaaactccagcaccacgaccctactactatctcgcacctgaaacaagctaacatgactaacacccttaattccatccaccctcctctccctaggaggcctgcccccgctaaccggctttttgcccaaatgggccattatcgaagaattcacaaaaaacaatagcctcatcatccccaccatcatagccaccatcaccctccttaacctctacttctacctacgcctaatctactccacctcaatcacactactccccatatctaacaacgtaaaaataaaatgacagtttgaacatacaaaacccaccccattcctccccacactcatcacccttaccacgctactcctacctatctccccttttatactaataatcttatagaaatttaggttaaatacagaccaagagccttcaaagccctcagtaagttgcaatacttaatttctgtaacagctaaggactgcaaaaccccactctgcatcaactgaacgcaaatcagccactttaattaagctaagcccttactagaccaatgggacttaaacccacaaacacttagttaacagctaagcaccctaatcaactggcttcaatctacttctcccgccgccgggaaaaaaggcgggagaagccccggcaggtttgaagctgcttcttcgaatttgcaattcaatatgaaaatcacctcggagctggtaaaaagaggcctaacccctgtctttagatttacagtccaatgcttcactcagccattttacctcacccccactgatgttcgccgaccgttgactattctctacaaaccacaaagacattggaacactatacctattattcggcgcatgagctggagtcctaggcacagctctaagcctccttattcgagccgagctgggccagccaggcaaccttctaggtaacgaccacatctacaacgttatcgtcacagcccatgcatttgtaataatcttcttcatagtaatacccatcataatcggaggctttggcaactgactagttcccctaataatcggtgcccccgatatggcgtttccccgcataaacaacataagcttctgactcttacctccctctctcctactcctgctcgcatctgctatagtggaggccggagcaggaacaggttgaacagtctaccctcccttagcagggaactactcccaccctggagcctccgtagacctaaccatcttctccttacacctagcaggtgtctcctctatcttaggggccatcaatttcatcacaacaattatcaatataaaaccccctgccataacccaataccaaacgcccctcttcgtctgatccgtcctaatcacagcagtcctacttctcctatctctcccagtcctagctgctggcatcactatactactaacagaccgcaacctcaacaccaccttcttcgaccccgccggaggaggagaccccattctataccaacacctattctgatttttcggtcaccctgaagtttatattcttatcctaccaggcttcggaataatctcccatattgtaacttactactccggaaaaaaagaaccatttggatacataggtatggtctgagctatgatatcaattggcttcctagggtttatcgtgtgagcacaccatatatttacagtaggaatagacgtagacacacgagcatatttcacctccgctaccataatcatcgctatccccaccggcgtcaaagtatttagctgactcgccacactccacggaagcaatatgaaatgatctgctgcagtgctctgagccctaggattcatctttcttttcaccgtaggtggcctgactggcattgtattagcaaactcatcactagacatcgtactacacgacacgtactacgttgtagctcacttccactatgtcctatcaataggagctgtatttgccatcataggaggcttcattcactgatttcccctattctcaggctacaccctagaccaaacctacgccaaaatccatttcactatcatattcatcggcgtaaatctaactttcttcccacaacactttctcggcctatccggaatgccccgacgttactcggactaccccgatgcatacaccacatgaaacatcctatcatctgtaggctcattcatttctctaacagcagtaatattaataattttcatgatttgagaagccttcgcttcgaagcgaaaagtcctaatagtagaagaaccctccataaacctggagtgactatatggatgccccccaccctaccacacattcgaagaacccgtatacataaaatctagacaaaaaaggaaggaatcgaaccccccaaagctggtttcaagccaaccccatggcctccatgactttttcaaaaaggtattagaaaaaccatttcataactttgtcaaagttaaattataggctaaatcctatatatcttaatggcacatgcagcgcaagtaggtctacaagacgctacttcccctatcatagaagagcttatcacctttcatgatcacgccctcataatcattttccttatctgcttcctagtcctgtatgcccttttcctaacactcacaacaaaactaactaatactaacatctcagacgctcaggaaatagaaaccgtctgaactatcctgcccgccatcatcctagtcctcatcgccctcccatccctacgcatcctttacataacagacgaggtcaacgatccctcccttaccatcaaatcaattggccaccaatggtactgaacctacgagtacaccgactacggcggactaatcttcaactcctacatacttcccccattattcctagaaccaggcgacctgcgactccttgacgttgacaatcgagtagtactcccgattgaagcccccattcgtataataattacatcacaagacgtcttgcactcatgagctgtccccacattaggcttaaaaacagatgcaattcccggacgtctaaaccaaaccactttcaccgctacacgaccgggggtatactacggtcaatgctctgaaatctgtggagcaaaccacagtttcatgcccatcgtcctagaattaattcccctaaaaatctttgaaataggacccgtatttaccctatagcaccccctctaccccctctagagcccactgtaaagctaacttagcattaaccttttaagttaaagattaagagaaccaacacctctttacagtgaaatgccccaactaaatactaccgtatggcccaccataattacccccatactccttacactattcctcatcacccaactaaaaatattaaacacaaactaccacctacctccctcaccaaagcccataaaaataaaaaattataacaaaccctgagagccaaaatgaacgaaaatctgttcgcttcattcattgcccccacaatcctaggcctacccgccgcagtactgatcattctatttccccctctattgatccccacctccaaatatctcatcaacaaccgactaatcaccacccaacaatgactaatcaaactaacctcaaaacaaatgataaccatacacaacactaaaggacgaacctgatctcttatactagtatccttaatcatttttattgccacaactaacctcctcggactcctgcctcactcatttacaccaaccacccaactatctataaacctagccatggccatccccttatgagcgggcgcagtgattataggctttcgctctaagattaaaaatgccctagcccacttcttaccacaaggcacacctacaccccttatccccatactagttattatcgaaaccatcagcctactcattcaaccaatagccctagccgtacgcctaaccgctaacattactgcaggccacctactcatgcacctaattggaagcgccaccctagcaatatcaaccattaaccttccctctacacttatcatcttcacaattctaattctactgactatcctagaaatcgctgtcaccttaatccaagcctacgttttcacacttctagtaagcctctacctgcacgataacacataatgacccaccaatcacatgcctatcatatagtaaaacccagcccatgacccctaacaggggccctctcagccctcctaatgacctccggcctagccatgtgatttcacttccactccataacgctcctcatactaggcctactaaccaacacactaaccatataccaatgatggcgcgatgtaacacgagaaagcacataccaaggccaccacacaccacctgtccaaaaaggccttcgatacgggataatcctatttattacctcagaagtttttttcttcgcaggatttttctgagccttttaccactccagcctagcccctaccccccaattaggagggcactggcccccaacaggcatcaccccgctaaatcccctagaagtcccactcctaaacacatccgtattactcgcatcaggagtatcaatcacctgagctcaccatagtctaatagaaaacaaccgaaaccaaataattcaagcactgcttattacaattttactgggtctctattttaccctcctacaagcctcagagtacttcgagtctcccttcaccatttccgacggcatctacggctcaacattttttgtagccacaggcttccacggacttcacgtcattattggctcaactttcctcactatctgcttcatccgccaactaatatttcactttacatccaaacatcactttggcttcgaagccgccgcctgatactggcattttgtagatgtggtttgactatttctgtatgtctccatctattgatgagggtcttactcttttagtataaatagtaccgttaacttccaattaactagttttgacaacattcaaaaaagagtaataaacttcgccttaattttaataatcaacaccctcctagccttactactaataattattacattttgactaccacaactcaacggctacatagaaaaatccaccccttacgagtgcggcttcgaccctatatcccccgcccgcgtccctttctccataaaattcttcttagtagctattaccttcttattatttgatctagaaattgccctccttttacccctaccatgagccctacaaacaactaacctgccactaatagttatgtcatccctcttattaatcatcatcctagccctaagtctggcctatgagtgactacaaaaaggattagactgaaccgaattggtatatagtttaaacaaaacgaatgatttcgactcattaaattatgataatcatatttaccaaatgcccctcatttacataaatattatactagcatttaccatctcacttctaggaatactagtatatcgctcacacctcatatcctccctactatgcctagaaggaataatactatcgctgttcattatagctactctcataaccctcaacacccactccctcttagccaatattgtgcctattgccatactagtctttgccgcctgcgaagcagcggtgggcctagccctactagtctcaatctccaacacatatggcctagactacgtacataacctaaacctactccaatgctaaaactaatcgtcccaacaattatattactaccactgacatgactttccaaaaaacacataatttgaatcaacacaaccacccacagcctaattattagcatcatccctctactattttttaaccaaatcaacaacaacctatttagctgttccccaaccttttcctccgaccccctaacaacccccctcctaatactaactacctgactcctacccctcacaatcatggcaagccaacgccacttatccagtgaaccactatcacgaaaaaaactctacctctctatactaatctccctacaaatctccttaattataacattcacagccacagaactaatcatattttatatcttcttcgaaaccacacttatccccaccttggctatcatcacccgatgaggcaaccagccagaacgcctgaacgcaggcacatacttcctattctacaccctagtaggctcccttcccctactcatcgcactaatttacactcacaacaccctaggctcactaaacattctactactcactctcactgcccaagaactatcaaactcctgagccaacaacttaatatgactagcttacacaatagcttttatagtaaagatacctctttacggactccacttatgactccctaaagcccatgtcgaagcccccatcgctgggtcaatagtacttgccgcagtactcttaaaactaggcggctatggtataatacgcctcacactcattctcaaccccctgacaaaacacatagcctaccccttccttgtactatccctatgaggcataattataacaagctccatctgcctacgacaaacagacctaaaatcgctcattgcatactcttcaatcagccacatagccctcgtagtaacagccattctcatccaaactccctgaagcttcaccggcgcagtcattctcataatcgcccacggacttacatcctcattactattctgcctagcaaactcaaactacgaacgcactcacagtcgcatcataatcctctctcaaggacttcaaactctactcccactaatagctttttgatgacttctagcaagcctcgctaacctcgccttaccccccactattaacctactgggagaactctctgtgctagtaaccacgttctcctgatcaaatatcaccctcctacttacgggactcaacatactagtcacagccctatactccctctacatatttaccacaacacaatggggctcactcacccaccacattaacaacataaaaccctcattcacacgagaaaacaccctcatgttcatacacctatcccccattctcctcctatccctcaaccccgacatcattaccgggttttcctcttgtaaatatagtttaaccaaaacatcagattgtgaatctgacaacagaggcttacgaccccttatttaccgagaaagctcacaagaactgctaactcatgcccccatgtctaacaacatggctttctcaacttttaaaggataacagctatccattggtcttaggccccaaaaattttggtgcaactccaaataaaagtaataaccatgcacactactataaccaccctaaccctgacttccctaattccccccatccttaccaccctcgttaaccccaacaaaaaaaactcatacccccattatgtaaaatccattgtcgcatccacctttattatcagtctcttccccacaacaatattcatgtgcctagaccaagaagttattatctcgaactgacactgagccacaacccaaacaacccagctctccctaagcttcaaactagactacttctccataatattcatccctgtagcattgttcgttacatggtccatcatagaattctcactgtgatatataaactcagacccaaacattaatcagttcttcaaatatctactcattttcctaattaccatactaatcttagttaccgctaacaacctattccaactgttcatcggctgagagggcgtaggaattatatccttcttgctcatcagttgatgatacgcccgagcagatgccaacacagcagccattcaagcaatcctatacaaccgtatcggcgatatcggtttcatcctcgccttagcatgatttatcctacactccaactcatgagacccacaacaaatagcccttctaaacgctaatccaagcctcaccccactactaggcctcctcctagcagcagcaggcaaatcagcccaattaggtctccacccctgactcccctcagccatagaaggccccaccccagtctcagccctactccactcaagcactatagttgtagcaggaatcttcttactcatccgcttccaccccctagcagaaaatagcccactaatccaaactctaacactatgcttaggcgctatcaccactctgttcgcagcagtctgcgcccttacacaaaatgacatcaaaaaaatcgtagccttctccacttcaagtcagctaggactcataatagttacaatcggcatcaaccaaccacacctagcattcctgcacatctgtacccacgccttcttcaaagccatactatttatgtgctccgggtccatcatccacaaccttaacaatgaacaagatattcgaaaaataggaggactactcaaaaccatacctctcacttcaacctccctcaccattggcagcctagcattagcaggaatacctttcctcacaggtttctactccaaagaccacatcatcgaaaccgcaaacatatcatacacaaacgcctgagccctatctattactctcatcgctacctccctgacaagcgcctatagcactcgaataattcttctcaccctaacaggtcaacctcgcttccccacccttactaacattaacgaaaataaccccaccctactaaaccccattaaacgcctggcagccggaagcctattcgcaggatttctcattactaacaatatttcccccgcatcccccttccaaacaacaatccccctctacctaaaactcacagccctcgctgtcactttcctaggacttctaacagccctagacctcaactacctaaccaacaaacttaaaataaaatccccactatgcacattttatttctccaacatactcggattctaccctagcatcacacaccgcacaatcccctatctaggccttcttacgagccaaaacctgcccctactcctcctagacctaacctgactagaaaagctattacctaaaacaatttcacagcaccaaatctccacctccatcatcacctcaacccaaaaaggcataattaaactttacttcctctctttcttcttcccactcatcctaaccctactcctaatcacataacctattcccccgagcaatctcaattacaatatatacaccaacaaacaatgttcaaccagtaactactactaatcaacgcccataatcatacaaagcccccgcaccaataggatcctcccgaatcaaccctgacccctctccttcataaattattcagcttcctacactattaaagtttaccacaaccaccaccccatcatactctttcacccacagcaccaatcctacctccatcgctaaccccactaaaacactcaccaagacctcaacccctgacccccatgcctcaggatactcctcaatagccatcgctgtagtatatccaaagacaaccatcattccccctaaataaattaaaaaaactattaaacccatataacctcccccaaaattcagaataataacacacccgaccacaccgctaacaatcaatactaaacccccataaataggagaaggcttagaagaaaaccccacaaaccccattactaaacccacactcaacagaaacaaagcatacatcattattctcgcacggactacaaccacgaccaatgatatgaaaaaccatcgttgtatttcaactacaagaacaccaatgaccccaatacgcaaaattaaccccctaataaaattaattaaccactcattcatcgacctccccaccccatccaacatctccgcatgatgaaacttcggctcactccttggcgcctgcctgatcctccaaatcaccacaggactattcctagccatgcactactcaccagacgcctcaaccgccttttcatcaatcgcccacatcactcgagacgtaaattatggctgaatcatccgctaccttcacgccaatggcgcctcaatattctttatctgcctcttcctacacatcgggcgaggcctatattacggatcatttctctactcagaaacctgaaacatcggcattatcctcctgcttgcaactatagcaacagccttcataggctatgtcctcccgtgaggccaaatatcattctgaggggccacagtaattacaaacttactatccgccatcccatacattgggacagacctagttcaatgaatctgaggaggctactcagtagacagtcccaccctcacacgattctttacctttcacttcatcttgcccttcattattgcagccctagcagcactccacctcctattcttgcacgaaacgggatcaaacaaccccctaggaatcacctcccattccgataaaatcaccttccacccttactacacaatcaaagacgccctcggcttacttctcttccttctctccttaatgacattaacactattctcaccagacctcctaggcgacccagacaattataccctagccaaccccttaaacacccctccccacatcaagcccgaatgatatttcctattcgcctacacaattctccgatccgtccctaacaaactaggaggcgtccttgccctattactatccatcctcatcctagcaataatccccatcctccatatatccaaacaacaaagcataatatttcgcccactaagccaatcactttattgactcctagccgcagacctcctcattctaacctgaatcggaggacaaccagtaagctacccctttaccatcattggacaagtagcatccgtactatacttcacaacaatcctaatcctaataccaactatctccctaattgaaaacaaaatactcaaatggccctgtccttgtagtataaactaatacaccagtcttgtaaaccggagatgaaaacctttttccaaggacaaatcagagaaaaagtctttaactccaccattagcacccaaagctaagattctaatttaaactattctctgttctttcatggggaagcagatttgggtaccacccaagtattgactcacccatcaacaaccgctatgtatttcgtacattactgccagccaccatgaatattgtacggtaccataaatacttgaccacctgtagtacataaaaacccaatccacatcaaaaccccctccccatgcttacaagcaagtacagcaatcaaccttcaactatcacacatcaactgcaactccaaagccacccctcacccactaggataccaacaaacctacctacccttaacagtacatagtacataaagccatttaccgtacatagcacattacagtcaaatcccttctcgtccccatggatgacccccctcagataggggtcccttgaccaccatcctccgtgaaatcaatatcccgcacaagagtgctactctcctcgctccgggcccataacacttgggggtagctaaagtgaactgtatccgacatctggttcctacttcagggccataaagcctaaatagcccacacgttccccttaaataagacatcacgatg

SEQ ID NO: 149 - DNA, 16561 bp, Homo sapiens mitochondrial
  3108: "n" refers to a nucleotide at position 3107 of the Cambridge Reference Sequence (CRS, Anderson et al. 1981 Nature 290:457-465), later determined to be absent from the human mtDNA sequence according to the revised CRS (rCRS, Andrews et al. 1999 Nature Genetics 23:147); "n" therefore represents a single nucleotide deletion at a position corresponding to nucleotide 3107 of SEQ ID NO:1 as provided herein.
gatcacaggtctatcaccctattaaccactcacgggagctctccatgcatttggtattttcgtctggggggtgtgcacgcgatagcattgcgagacgctggagccggagcaccctatgtcgcagtatctgtctttgattcctgcctcatcctattatttatcgcacctacgttcaatattacaggcgaacatacctactaaagtgtgttaattaattaatgcttgtaggacataataataacaattgaatgtctgcacagccgctttccacacagacatcataacaaaaaatttccaccaaaccccccctcccccgccttctggccacagcacttaaacacatctctgccaaaccccaaaaacaaagaaccctaacaccagcctaaccagatttcaaattttatcttttggcggtatgcacttttaacagtcaccccccaactaacacattattttcccctcccactcccatactactaatctcatcaatacaacccccgcccatcctacccagcacacacacaccgctgctaaccccataccccgaaccaaccaaaccccaaagacaccccccacagtttatgtagcttacctcctcaaagcaatacactgaaaatgtttagacgggctcacatcaccccataaacaaataggtttggtcctagcctttctattagctcttagtaagattacacatgcaagcatccccattccagtgagttcaccctctaaatcaccacgatcaaaagggacaagcatcaagcacgcagcaatgcagctcaaaacgcttagcctagccacacccccacgggaaacagcagtgattaacctttagcaataaacgaaagtttaactaagctatactaaccccagggttggtcaatttcgtgccagccaccgcggtcacacgattaacccaagtcaatagaagccggcgtaaagagtgttttagatcaccccctccccaataaagctaaaactcacctgagttgtaaaaaactccagttgacacaaaatagactacgaaagtggctttaacatatctgaacacacaatagctaagacccaaactgggattagataccccactatgcttagccctaaacctcaacagttaaatcaacaaaactgctcgccagaacactacgagccacagcttaaaactcaaaggacctggcggtgcttcatatccctctagaggagcctgttctgtaatcgataaaccccgatcaacctcaccacctcttgctcagcctatataccgccatcttcagcaaaccctgatgaaggctacaaagtaagcgcaagtacccacgtaaagacgttaggtcaaggtgtagcccatgaggtggcaagaaatgggctacattttctaccccagaaaactacgatagcccttatgaaacttaagggtcgaaggtggatttagcagtaaactgagagtagagtgcttagttgaacagggccctgaagcgcgtacacaccgcccgtcaccctcctcaagtatacttcaaaggacatttaactaaaacccctacgcatttatatagaggagacaagtcgtaacatggtaagtgtactggaaagtgcacttggacgaaccagagtgtagcttaacacaaagcacccaacttacacttaggagatttcaacttaacttgaccgctctgagctaaacctagccccaaacccactccaccttactaccagacaaccttagccaaaccatttacccaaataaagtataggcgatagaaattgaaacctggcgcaatagatatagtaccgcaagggaaagatgaaaaattataaccaagcataatatagcaaggactaacccctataccttctgcataatgaattaactagaaataactttgcaaggagaaccaaagctaagacccccgaaaccagacgagctacctaagaacagctaaaagagcacacccgtctatgtagcaaaatagtgggaagatttataggtagaggcgacaaacctaccgagcctggtgatagctggttgtccaagatagaatcttagttcaactttaaatttgcccacagaaccctctaaatccccttgtaaatttaactgttagtccaaagaggaacagctctttggacactaggaaaaaaccttgtagagagagtaaaaaatttaacacccatagtaggcctaaaagcagccaccaattaagaaagcgttcaagctcaacacccactacctaaaaaatcccaaacatataactgaactcctcacacccaattggaccaatctatcaccctatagaagaactaatgttagtataagtaacatgaaaacattctcctccgcataagcctgcgtcagattaaaacactgaactgacaattaacagcccaatatctacaatcaaccaacaagtcattattaccctcactgtcaacccaacacaggcatgctcataaggaaaggttaaaaaaagtaaaaggaactcggcaaatcttaccccgcctgtttaccaaaaacatcacctctagcatcaccagtattagaggcaccgcctgcccagtgacacatgtttaacggccgcggtaccctaaccgtgcaaaggtagcataatcacttgttccttaaatagggacctgtatgaatggctccacgagggttcagctgtctcttacttttaaccagtgaaattgacctgcccgtgaagaggcgggcatgacacagcaagacgagaagaccctatggagctttaatttattaatgcaaacagtacctaacaaacccacaggtcctaaactaccaaacctgcattaaaaatttcggttggggcgacctcggagcagaacccaacctccgagcagtacatgctaagacttcaccagtcaaagcgaactactatactcaattgatccaataacttgaccaacggaacaagttaccctagggataacagcgcaatcctattctagagtccatatcaacaatagggtttacgacctcgatgttggatcaggacatcccgatggtgcagccgctattaaaggttcgtttgttcaacgattaaagtcctacgtgatctgagttcagaccggagtaatccaggtcggtttctatctacnttcaaattcctccctgtacgaaaggacaagagaaataaggcctacttcacaaagcgccttcccccgtaaatgatatcatctcaacttagtattatacccacacccacccaagaacagggtttgttaagatggcagagcccggtaatcgcataaaacttaaaactttacagtcagaggttcaattcctcttcttaacaacatacccatggccaacctcctactcctcattgtacccattctaatcgcaatggcattcctaatgcttaccgaacgaaaaattctaggctatatacaactacgcaaaggccccaacgttgtaggcccctacgggctactacaacccttcgctgacgccataaaactcttcaccaaagagcccctaaaacccgccacatctaccatcaccctctacatcaccgccccgaccttagctctcaccatcgctcttctactatgaacccccctccccatacccaaccccctggtcaacctcaacctaggcctcctatttattctagccacctctagcctagccgtttactcaatcctctgatcagggtgagcatcaaactcaaactacgccctgatcggcgcactgcgagcagtagcccaaacaatctcatatgaagtcaccctagccatcattctactatcaacattactaataagtggctcctttaacctctccacccttatcacaacacaagaacacctctgattactcctgccatcatgacccttggccataatatgatttatctccacactagcagagaccaaccgaacccccttcgaccttgccgaaggggagtccgaactagtctcaggcttcaacatcgaatacgccgcaggccccttcgccctattcttcatagccgaatacacaaacattattataataaacaccctcaccactacaatcttcctaggaacaacatatgacgcactctcccctgaactctacacaacatattttgtcaccaagaccctacttctaacctccctgttcttatgaattcgaacagcatacccccgattccgctacgaccaactcatacacctcctatgaaaaaacttcctaccactcaccctagcattacttatatgacatgtctccatacccattacaatctccagcattccccctcaaacctaagaaatatgtctgataaaagagttactttgatagagtaaataataggagcttaaacccccttatttctaggactatgagaatcgaacccatccctgagaatccaaaattctccgtgccacctatcacaccccatcctaaagtaaggtcagctaaataagctatcgggcccataccccgaaaatgttggttatacccttcccgtactaattaatcccctggcccaacccgtcatctactctaccatctttgcaggcacactcatcacagcgctaagctcgcactgattttttacctgagtaggcctagaaataaacatgctagcttttattccagttctaaccaaaaaaataaaccctcgttccacagaagctgccatcaagtatttcctcacgcaagcaaccgcatccataatccttctaatagctatcctcttcaacaatatactctccggacaatgaaccataaccaatactaccaatcaatactcatcattaataatcataatggctatagcaataaaactaggaatagccccctttcacttctgagtcccagaggttacccaaggcacccctctgacatccggcctgcttcttctcacatgacaaaaactagcccccatctcaatcatataccaaatctctccctcactagacgtaagccttctcctcactctctcaatcttatccatcatagcaggcagttgaggtggattaaaccaaacccagctacgcaaaatcttagcatactcctcaattacccacataggatgaataatagcagttctaccgtacaaccctaacataaccattcttaatttaactatttatattatcctaactactaccgcattcctactactcaacttaaactccagcaccacgaccctactactatctcgcacctgaaacaagctaacatgactaacacccttaattccatccaccctcctctccctaggaggcctgcccccgctaaccggctttttgcccaaatgggccattatcgaagaactcacaaaaaacaatagcctcatcatccccaccatcatagccaccatcaccctccttaacctctacttctacctacgcctaatctactccacctcaatcacactactccccatatctaacaacgtaaaaataaaatgacagtttgaacacacaaaacccaccccattcctccccacactcatcgcccttaccacgctactcctacctatctccccttttatactaataatcttatagaaatttaggttaaatacagaccaagagccttcaaagccctcagtaagttgcaatacttaatttctgtaacagctaaggactgcaaaaccccactctgcatcaactgaacgcaaatcagccactttaattaagctaagcccttactagaccaatgggacttaaacccacaaacacttagttaacagctaagcaccctaatcaactggcttcaatctacttctcccgccgccgggaaaaaaggcgggagaagccccggcaggtttgaagctgcttcttcgaatttgcaattcaatatgaaaatcacctcggagctggtaaaaagaggcctaacccctgtctttagatttacagtccaatgcttcactcagccattttacctcacccccactgatgttcgccgaccgttgactattctctacaaaccacaaagacattggaacactatacctattattcggcgcatgagctggagtcctaggcacagctctaagcctccttattcgagccgagctgggccagccaggcaaccttctaggtaacgaccacatctacaacgttatcgtcacagcccatgcatttgtaataatcttcttcatagtaatacccatcataatcggaggctttggcaactgactagttcccctaataatcggtgcccccgatatggcgtttccccgcataaacaacataagcttctgactcttacctccctctctcctactcctgctcgcatctgctatagtggaggccggagcaggaacaggttgaacagtctaccctcccttagcagggaactactcccaccctggagcctccgtagacctaaccatcttctccttacacctagcaggtgtctcctctatcttaggggccatcaatttcatcacaacaattatcaatataaaaccccctgccataacccaataccaaacgcccctcttcgtctgatccgtcctaatcacagcagtcctacttatcctatctctcccagtcctagctgctggcatcactatactactaacagaccgcaacctcaacaccaccttcttcgaccccgccggaggaggagaccccattctataccaacacctattctgatttttcggtcaccctgaagtttatattcttatcctaccaggcttcggaataatctcccatattgtaacttactactccggaaaaaaagaaccatttggatacataggtatggtctgagctatgatatcaattggcttcctagggtttatcgtgtgagcacaccatatatttacagtaggaatagacgtagacacacgagcatatttcacctccgctaccataatcatcgctatccccaccggcgtcaaagtatttagctgactcgccacactccacggaagcaatatgaaatgatctgctgcagtgctctgagccctaggattcatctttcttttcaccgtaggtggcctgactggcattgtattagcaaactcatcactagacatcgtactacacgacacgtactacgttgtagctcacttccactatgtcctatcaataggagctgtatttgccatcataggaggcttcattcactgatttcccctattctcaggctacaccctagaccaaacctacgccaaaatccatttcactatcatattcatcggcgtaaatctaactttcttcccacaacactttctcggcctatccggaatgccccgacgttactcggactaccccgatgcatacaccacatgaaacatcctatcatctgtaggctcattcatttctctaacagcagtaatattaataattttcatgatttgagaagccttcgcttcgaagcgaaaagtcctaatagtagaagaaccctccataaacctggagtgactatatggatgccccccaccctaccacacattcgaagaacccgtatacataaaatctagacaaaaaaggaaggaatcgaaccccccaaagctggtttcaagccaaccccatggcctccatgactttttcaaaaaggtattagaaaaaccatttcataactttgtcaaagttaaattataggctaaatcctatatatcttaatggcacatgcagcgcaagtaggtctacaagacgctacttcccctatcatagaagagcttatcacctttcatgatcacgccctcataatcattttccttatctgcttcctagtcctgtatgcccttttcctaacactcacaacaaaactaactaatactaacatctcagacgctcaggaaatagaaaccgtctgaactatcctgcccgccatcatcctagtcctcatcgccctcccatccctacgcatcctttacataacagacgaggtcaacgatccctcccttaccatcaaatcaattggccaccaatggtactgaacctacgagtacaccgactacggcggactaatcttcaactcctacatacttcccccattattcctagaaccaggcgacctgcgactccttgacgttgacaatcgagtagtactcccgattgaagcccccattcgtataataattacatcacaagacgtcttgcactcatgagctgtccccacattaggcttaaaaacagatgcaattcccggacgtctaaaccaaaccactttcaccgctacacgaccgggggtatactacggtcaatgctctgaaatctgtggagcaaaccacagtttcatgcccatcgtcctagaattaattcccctaaaaatctttgaaatagggcccgtatttaccctatagtaccccctctagagcccactgtaaagctaacttagcattaaccttttaagttaaagattaagagaaccaacacctctttacagtgaaatgccccaactaaatactaccgtatggcccaccataattacccccatactccttacactattcctcatcacccaactaaaaatattaaacacaaactaccacctacctccctcaccaaagcccataaaaataaaaaattataacaaaccctgagaaccaaaatgaacgaaaatctgttcgcttcattcattgcccccacaatcctaggcctacccgccgcagtactgatcattctatttccccctctattgatccccacctccaaatatctcatcaacaaccgactaatcaccacccaacaatgactaatcaaactaacctcaaaacaaataataaccatacacaacactaaaggacgaacctgatctcttatactagtatccttaatcatttttattgccacaactaacctcctcggactcctgcctcactcatttacaccaaccacccaactatctataaacctagccatggccatccccttatgagcgggcgcagtgattataggctttcgctctaagattaaaaatgccctagcccacttcttaccacaaggcacacctacaccccttatccccatactagttattatcgaaaccatcagcctactcattcaaccaatagccctggccgtacgcctaaccgctaacattactgcaggccacctactcatgcacctaattggaagcgccaccctagcaatatcaaccattaaccttccctctacacttatcatcttcacaattctaattctactgactatcctagaaatcgctgtcgccttaatccaagcctacgttttcacacttctagtaagcctctacctgcacgacaacacataatgacccaccaatcacatgcctatcatatagtaaaacccagcccatgacccctaacaggggccctctcagccctcctaatgacctccggcctagccatgtgatttcacttccactccataacgctcctcatactaggcctactaaccaacacactaaccatataccaatgatggcgcgatgtaacacgagaaagcacataccaaggccaccacacaccacctgtccaaaaaggccttcgatacgggataatcctatttattacctcagaagtttttttcttcgcaggatttttctgagccttttaccactccagcctagcccctaccccccaattaggagggcactggcccccaacaggcatcaccccgctaaatcccctagaagtcccactcctaaacacatccgtattactcgcatcaggagtatcaatcacctgagctcaccatagtctaatagaaaacaaccgaaaccaaataattcaagcactgcttattacaattttactgggtctctattttaccctcctacaagcctcagagtacttcgagtctcccttcaccatttccgacggcatctacggctcaacattttttgtagccacaggcttccacggacttcacgtcattattggctcaactttcctcactatctgcttcatccgccaactaatatttcactttacatccaaacatcactttggcttcgaagccgccgcctgatactggcattttgtagatgtggtttgactatttctgtatgtctccatctattgatgagggtcttactcttttagtataaatagtaccgttaacttccaattaactagttttgacaacattcaaaaaagagtaataaacttcgccttaattttaataatcaacaccctcctagccttactactaataattattacattttgactaccacaactcaacggctacatagaaaaatccaccccttacgagtgcggcttcgaccctatatcccccgcccgcgtccctttctccataaaattcttcttagtagctattaccttcttattatttgatctagaaattgccctccttttacccctaccatgagccctacaaacaactaacctgccactaatagttatgtcatccctcttattaatcatcatcctagccctaagtctggcctatgagtgactacaaaaaggattagactgaaccgaattggtatatagtttaaacaaaacgaatgatttcgactcattaaattatgataatcatatctaccaaatgcccctcatttacataaatattatactagcatttaccatctcacttctaggaatactagtatatcgctcacacctcatatcctccctactatgcctagaaggaataatactatcgctgttcattatagctactctcataaccctcaacacccactccctcttagccaatattgtgcctattgccatactagtctttgccgcctgcgaagcagcggtgggcctagccctactagtctcaatctccaacacatatggcctagactacgtacataacctaaacctactccaatgctaaaactaatcgtcccaacaattatattactaccactgacatgactttccaaaaaacacataatttgaatcaacacaaccacccacagcctaattattagcatcatccctctactattttttaaccaaatcaacaacaacctatttagctgttccccaaccttttcctccgaccccctaacaacccccctcctaatactaactacctgactcctacccctcacaatcatggcaagccaacgccacttatccagtgaaccactatcacgaaaaaaactctacctctctatactaatctccctacaaatctccttaattataacattcacagccacagaactaatcatattttatatcttcttcgaaaccacacttatccccaccttggctatcatcacccgatgaggcaaccagccagaacgcctgaacgcaggcacatacttcctattctacaccctagtaggctcccttcccctactcatcgcactgatttacactcacaacaccctaggctcactaaacattctactactcactctcactgcccaagaactatcaaactcctgagccaacaacttaatatgactagcttacacaatagcttttatagtaaagatacctctttacggactccacttatgactccctaaagcccatgtcgaagcccccatcgctgggtcaatagtacttgccgcagtactcttaaaactaggcggctatggtataatacgcctcacactcattctcaaccccctgacaaaacacatagcctaccccttccttgtactatccctatgaggcataattataacaagctccatctgcctacgacaaacagacctaaaatcgctcattgcatactcttcaatcagccacatagccctcgtagtaacagccattctcatccaaaccccctgaagcttcaccggcgcagtcattctcataatcgcccacggacttacatcctcattactattctgcctagcaaactcaaactacgaacgcactcacagtcgcatcataatcctctctcaaggacttcaaactctgctcccactaatagctttttgatgacttctagcaagcctcgctaacctcgccttaccccccactattaacctactgggagaactctctgtgctagtaaccacgttctcctgatcaaatatcactctcctacttacaggactcaacatactagtcacagccctatactccctctacatatttaccacaacacaatggggctcactcacccaccacattaacaacataaaaccctcattcacacgagaaaacaccctcatgttcatacacctatcccccattctcctcctatccctcaaccccgacatcattaccgggttttcctcttgtaaatatagtttaaccaaaacatcagattgtgaatctgacaacagaggcttacgaccccttatttaccgagaaagctcacaagaactgctaactcatgcccccatgtctaacaacatggctttctcaacttttaaaggataacagctatccattggtcttaggccccaaaaattttggtgcaactccaaataaaagtaataaccatgcacactactataaccaccctaaccctgacttccctaattccccccatccttaccaccctcgttaaccctaacaaaaaaaactcatacccccattatgtaaaatccattgtcgcatccacctttattatcagtctcttccccacaacaatattcatgtgcctagaccaagaagttattatctcgaactgacactgagccacaacccaaacaacccagctctccctaagcttcaaactagactacttctccataatattcatccctgtagcattgttcgttacatggtccatcatagaattctcactgtgatatataaactcagacccaaacattaatcagttcttcaaatatctactcatcttcctaattaccatactaatcttagttaccgctaacaacctattccaactgttcatcggctgagagggcgtaggaattatatccttcttgctcatcagttgatgatacgcccgagcagatgccaacacagcagccattcaagcaatcctatacaaccgtatcggcgatatcggtttcatcctcgccttagcatgatttatcctacactccaactcatgagacccacaacaaatagcccttctaaacgctaatccaagcctcaccccactactaggcctcctcctagcagcagcaggcaaatcagcccaattaggtctccacccctgactcccctcagccatagaaggccccaccccagtctcagccctactccactcaagcactatagttgtagcaggaatcttcttactcatccgcttccaccccctagcagaaaatagcccactaatccaaactctaacactatgcttaggcgctatcaccactctgttcgcagcagtctgcgcccttacacaaaatgacatcaaaaaaatcgtagccttctccacttcaagtcaactaggactcataatagttacaatcggcatcaaccaaccacacctagcattcctgcacatctgtacccacgccttcttcaaagccatactatttatgtgctccggatccatcatccacaaccttaacaatgaacaagatattcgaaaaataggaggactactcaaaaccatacctctcacttcaacctccctcaccattggcagcctagcattagcaggaatacctttcctcacaggtttctactccaaagaccacatcatcgaaaccgcaaacatatcatacacaaacgcctgagccctatctattactctcatcgctacctccctgacaagcgcctatagcactcgaataattcttctcaccctaacaggtcaacctcgcttccccacccttactaacattaacgaaaataaccccaccctactaaaccccattaaacgcctggcagccggaagcctattcgcaggatttctcattactaacaacatttcccccgcatcccccttccaaacaacaatccccctctacctaaaactcacagccctcgctgtcactttcctaggacttctaacagccctagacctcaactacctaaccaacaaacttaaaataaaatccccactatgcacattttatttctccaacatactcggattctaccctagcatcacacaccgcacaatcccctatctaggccttcttacgagccaaaacctgcccctactcctcctagacctaacctgactagaaaagctattacctaaaacaatttcacagcaccaaatctccacctccatcatcacctcaacccaaaaaggcataattaaactttacttcctctctttcttcttcccactcatcctaaccctactcctaatcacataacctattcccccgagcaatctcaattacaatatatacaccaacaaacaatgttcaaccagtaactactactaatcaacgcccatagtcatacaaagcccccgcaccaataggatcctcccgaatcaaccctgacccctctccttcataaattattcagcttcctacactattaaagtttaccacaaccaccaccccatcatactctttcacccacagcaccaatcctacctccatcgctaaccccactaaaacactcaccaagacctcaacccctgacccccatgcctcaggatactcctcaatagccatcgctgtagtatatccaaagacaaccatcattccccctaaataaattaaaaaaactattaaacccatataacctcccccaaaattcagaataataacacacccgaccacaccgctaacaatcaatactaaacccccataaataggagaaggcttagaagaaaaccccacaaaccccattactaaacccacactcaacagaaacaaagcatacatcattattctcgcacggactacaaccacgaccaatgatatgaaaaaccatcgttgtatttcaactacaagaacaccaatgaccccaatacgcaaaattaaccccctaataaaattaattaaccactcattcatcgacctccccaccccatccaacatctccgcatgatgaaacttcggctcactccttggcgcctgcctgatcctccaaatcaccacaggactattcctagccatacactactcaccagacgcctcaaccgccttttcatcaatcgcccacatcactcgagacgtaaattatggctgaatcatccgctaccttcacgccaatggcgcctcaatattctttatctgcctattcctacacatcggacgaggcctatattacggatcatttctctactcagaaacctgaaacatcggcattatcctcctgcttgcaactatagcaacagccttcataggctatgtcctcccgtgaggccaaatatcattctgaggggccacagtaattacaaacttactatccgccatcccatacattgggacagacctagttcaatgaatctgaggaggctactcagtagacagtcccaccctcacacgattctttacctttcacttcatcttgcccttcattattgcagccctagcagcactccacctcctattcttgcacgaaacgggatcaaacaaccccctaggaatcacctcccattccgataaaatcaccttccacccttactacacaatcaaagacgccctcggcttacttctcttcattctctccttaatgacattaacactattctcaccagacctcctaggcgacccagacaattataccctagccaaccccttaaacacccctccccacatcaagcccgaatgatatttcctattcgcctacacaattctccgatccgtccctaacaagctaggaggcgtccttgccctattactatccatcctcatcctagcaataatccccatcctccatatatccaaacaacaaagcataatatttcgcccactaagccaatcactttattgactcctagccgcagacctcctcattctaacctgaatcggaggacaaccagtaagctacccttttaccatcattggacaagtagcatccgtactatacttcacaacaatcctaatcctaataccaactatctccctaattgaaaacaaaatactcaaatgggcctgtccttgtagtataaactaatacaccagtcttgtaaaccgaagatgaaaacctttttccaaggacaaatcagagaaaaagtctttaactccaccattagcacccaaagctaagattctaatttaaactattctctgttctttcatggggaagcagatttgggtaccacccaagtattgactcacccatcaacaaccgctatgtatttcgtacattactgccagccaccatgaatattgcacggtaccataaatacttgaccacctgtagtacataaaaacccaatccacatcaaccccccccccccatgcttacaagcaagtacagcaatcaaccctcaactatcacacatcaactgcaactccaaagccacccctcacccactaggataccaacaaacctacccatcttcaacagtacatagtacataaagccatttaccgtacatagcacattacagtcaaatcccttctcgtccccatggatgacccccctcagataggggtcccttgaccaccatcctccgtgaaatcaatatcccgcacaagagtgctactctcctcgctccgggcccataacacttgggggtagctaaagtgaactgtatccgacatctggttcctacttcagggccataaagcctaaatagcccacacgttccccttaaataagacatcacgatg

SEQ ID NO: 150 - DNA, 16559 bp, Homo sapiens mitochondrial
  3106: "n" refers to a nucleotide at position 3107 of the Cambridge Reference Sequence (CRS, Anderson et al. 1981 Nature 290:457-465), later determined to be absent from the human mtDNA sequence according to the revised CRS (rCRS, Andrews et al. 1999 Nature Genetics 23:147); "n" therefore represents a single nucleotide deletion at a position corresponding to nucleotide 3107 of SEQ ID NO:1 as provided herein.
gatcacaggtctatcaccctattaaccactcacgggagctctccatgcatttggtattttcgtctggggggtatgcacgcgatagcattgcgggacgctggagccggagcaccctatgtcgcagtatctgtctttgattcctgcctcatcccattatttatcgcacctacgttcaatattacaggcgagcatacttactaaagcgtattaattaattaatgcttgtaggacataacaataacaattaaatgtctgcacagccgctttccacacagacatcataacaaaaaatttccaccaaaccccccctcccccgccttctggccacagcacttaaacacatctctgccaaaccccaaaaacaaagaaccctaacaccagcctaaccagatttcaaattttatcttttggcggtatgcacttttaacagtcaccccccaactaacacattattttcccctcccactcccatactactaatctcatcaatacaacccccgcccatcctacccagcacacacaccgctgctaaccccataccccgaaccaaccaaaccccaaagacaccccccacagtttatgtagcttacctcctcaaagcaatacactgaaaatgtttagacgggctcacatcaccccataaacaaataggtttggtcctagcctttctattagctcttagtaagattacacatgcaagcatccccgttccagtgagttcaccctctaaatcaccacgatcaaaagggacaagcatcaagcacgcaacaatgcagctcaaaacgcttagcctagccacacccccacgggaaacagcagtgataaacctttagcaataaacgaaagtttaactaagctatactaaccccagggttggtcaatttcgtgccagccaccgcggtcacacgattaacccaagtcaatagaagccggcgtaaagagtgttttagatcaccccctccccaataaagctaaaactcacctgagttgtaaaaaactccagttgacacaaaataaactacgaaagtggctttaacatatctgaatacacaatagctaagacccaaactgggattagataccccactatgcttagccctaaacctcaacagttaaatcaacaaaactgctcgccagaacactacgagccacagcttaaaactcaaaggacctggcggtgcttcatatccctctagaggagcctgttctgtaatcgataaaccccgatcaacctcaccacctcttgctcagcctatataccgccatcttcagcaaaccctgatgaaggctacaaagtaagcgcaagtacccacgtaaagacgttaggtcaaggtgtagcccatgaggtggcaagaaatgggctacattttctaccccagaaaactacgatagcccttatgaaacttaagggtcgaaggtggatttagcagtaaactgagagtagagtgcttagttgaacagggccctgaagcgcgtacacaccgcccgtcaccctcctcaagtatacttcaaaggacatttaactaaaacccctacgcatttatatagaggagacaagtcgtaacatggtaagtgtactggaaagtgcacttggacgaaccagagtgtagcttaacacaaagcacccaacttacacttaggagatttcaacttaacttgaccgctctgagctaaacctagccccaaacccactccaccttactaccagacaaccttagccaaaccatttacccaaataaagtataggcgatagaaattgaaacctggcgcaatagatatagtaccgcaagggaaagatgaaaaattataaccaagcataatatagcaaggactaacccctataccttctgcataatgaattaactagaaataactttgcaaggagagccaaagctaagacccccgaaaccagacgagctacctaagaacagctaaaagagcacacccgtctatgtagcaaaatagtgggaagatttataggtagaggcgacaaacctaccgagcctggtgatagctggttgtccaagatagaatcttagttcaactttaaatttgcccacagaaccctctaaatccccttgtaaatttaactgttagtccaaagaggaacagctctttggacactaggaaaaaaccttgtagagagagtaaaaaatttaacacccatagtaggcctaaaagcagccaccaattaagaaagcgttcaagctcaacacccactacctaaaaaatcccaaacatatgactgaactcctcacacccaattggaccaatctatcaccctatagaagaactaatgttagtataagtaacatgaaaacattctcctccgcataagcctgcgtcagattaaaacactgaactgacaattaacagcccaatatctacaatcaaccaacaagtcattattaccctcactgtcaacccaacacaggcatgctcataaggaaaggttaaaaaaagtaaaaggaactcggcaaatcttaccccgcctgtttaccaaaaacatcacctctagcatcaccagtattagaggcaccgcctgcccagtgacacatgtttaacggccgcggtaccctaaccgtgcaaaggtagcataatcacttgttccttaaatagggacctgtatgaatggctccacgagggttcagctgtctcttacttttaaccagtgaaattgacctgcccgtgaagaggcgggcatgacacagcaagacgagaagaccctatggagctttaatttattaatgcaaacaatacctaacaaacccacaggtcctaaactaccaaacctgcattaaaaatttcggttggggcgacctcggagcagaacccaacctccgagcagtacatgctaagacttcaccagtcaaagcgaactaccatactcaattgatccaataacttgaccaacggaacaagttaccctagggataacagcgcaatcctattctagagtccatatcaacaatagggtttacgacctcgatgttggatcaggacatcccgatggtgcagccgctattaaaggttcgtttgttcaacgattaaagtcctacgtgatctgagttcagaccggagtaatccaggtcggtttctatctacnttcaaattcctccctgtacgaaaggacaagagaaataaggcctacttcacaaagcgccttcccccgtaaatgatatcatctcaacttagtattatacccacacccacccaagaacagggtttgttaagatggcagagcccggtaatcgcataaaacttaaaactttacagtcagaggttcaattcctcttcttaacaacatacccatggccaacctcctactcctcattgtacccattctaatcgcaatggcattcctaatgcttaccgaacgaaaaattctaggctatatacaactacgcaaaggccccaacgttgtaggcccctacgggctactacaacccttcgctgacgccataaaactcttcaccaaagagcccctaaaacccgccacatctaccatcaccctatacatcaccgccccgaccttagctctcaccatcgctcttctactatgaacccccctccccatacccaaccccctggttaacctcaacctaggcctcctatttattctagccacctctagcctagccgtttactcaatcctctgatcagggtgagcatcaaactcaaactacgccctgatcggcgcactgcgagcagtagcccaaacaatctcatatgaagtcaccctagccatcattctactatcaacattactaataagtggctcctttaacctctccacccttatcacaacacaagaacacctctgattactcctgccatcatgacccttggccataatatgatttatctccacactagcagagaccaaccgaacccccttcgaccttgccgaaggggagtccgaactagtctcaggcttcaacatcgaatacgccgcaggccccttcgccctattcttcatagccgaatacacaaacattattataataaacaccctcaccactacaatcttcctaggaacaacatatgacgcactctcccctgaactctacacaacatattttgtcaccaagaccctacttctgacctccctgttcttatgaattcgaacagcatacccccgattccgctacgaccaactcatacacctcctatgaaaaaacttcctaccactcaccctagcattacttatatgatatgtctccatacccattacaatctccagcattccccctcaaacctaagaaatatgtctgataaaagagttactttgatagagtaaataataggagtttaaacccccttatttctaggactatgagaatcgaacccatccctgagaatccaaaattctccgtgccacctatcacaccccatcctaaagtaaggtcagctaaataagctatcgggcccataccccgaaaatgttggttatacccttcccgtactaattaatcccctggcccaacccgtcatctactctaccatctttgcaggcacactcatcacagcgctaagctcgcactgattttttacctgagtaggcctagaaataaacatgctagcctttattccagttctaaccaaaaaaataaaccctcgttccacagaagctgccatcaagtatttcctcacgcaagcaaccgcatccataatccttctaatagctatcctcttcaacaatatactctccggacaatgaaccataaccaatactaccaatcaatactcatcattaataatcataatggctatagcaataaaactaggaatagccccctttcacttctgagtcccagaggttacccaaggcacccctctgacatccggcctgcttcttctcacatgacaaaaactagcccccatctcaatcatataccaaatctctccctcactaaacgtaagccttctcctcactctctcaatcttatccatcatagcaggcagttgaggtggattaaaccaaacccagctacgcaaaatcttagcatactcctcaattacccacataggatgaataatagcagttctaccgtacaaccctaacataaccattcttaatttaactatttatattatcctaactactaccgcattcctactactcaacttaaactccagcaccacaaccctactactatctcgcacctgaaacaagctaacatgactaacacccttaattccatccaccctcctctccctaggaggcctacccccgctaaccggctttttgcccaaatgggccattatcgaagaattcacaaaaaacaatagcctcatcatccccaccatcatagccaccatcaccctccttaacctctacttctacctacgcctaatctactccacctcaatcacactactccccatatctaacaacgtaaaaataaaatgacagtttgaacatacaaaacccaccccactcctccccacactcatcacccttaccacgctactcctacctatctccccttttatactaataatcttatagaaatttaggttaaatacagaccaagagccttcaaagccctcagtaagttgcaatacttaatttctgtaacagctaaggactgcaaaacctcactctgcatcaactgaacgcaaatcagccactttaattaagctaagcccttactagaccaatgggacttaaacccacaaacacttagttaacagctaagcaccctagtcaactggcttcaatctacttctcccgccgccgggaaaaaaggcgggagaagccccggcaggtttgaagctgcttcttcgaatttgcaattcaatatgaaaatcacctcggagctggtaaaaagaggcctaacccctgtctttagatttacagtccaatgcttcactcagccattttacctcacccccactgatgttcgccgaccgttgactattctctacaaaccacaaagacattggaacactatacctattattcggcgcatgagctggagtcctaggcacagctctaagcctccttattcgagccgagctgggccagccaggcaaccttctaggtaacgaccacatctacaacgttatcgtcacagcccatgcatttgtaataatcttcttcatagtaatacccatcataatcggaggctttggcaactgactagttcccctaataatcggtgcccccgatatggcgttcccccgcataaacaacataagcttctgactcttacctccctctctcctactcctgctcgcatctgctatagtagaggccggagcaggaacaggttgaacagtctaccctcccttagcagggaactactcccaccctggagcctccgtagacctaaccatcttctccttacacctagcaggtgtctcctctatcttaggggccatcaatttcatcacaacaattatcaatataaaaccccctgccataacccaataccaaacgcccctcttcgtctgatccgtcctaatcacagcagtcctacttctcctatctctcccagtcctagctgctggcatcactatactactaacagaccgcaacctcaacaccaccttcttcgaccccgccggaggaggagaccccattctataccaacacctattctgatttttcggtcaccctgaagtttatattcttatcctaccaggcttcggaataatctcccatattgtaacttactactccggaaaaaaagaaccatttggatacataggtatggtctgagctatgatatcaattggcttcctagggtttatcgtgtgagcacaccatatatttacagtaggaatagacgtagacacacgagcatatttcacctccgctaccataatcatcgctatccccaccggcgtcaaagtatttagctgactcgccacactccacggaagcaatatgaaatgatctgctgcagtgctctgagccctaggattcatctttcttttcaccgtaggtggcctgactggcattgtattagcaaactcatcactagacatcgtactacacgacacgtactacgttgtagctcacttccactatgtcctatcaataggagctgtatttgccatcataggaggcttcattcactgatttcccctattctcaggctacaccctagaccaaacctacgccaaaatccatttcgctatcatattcatcggcgtaaatctaactttcttcccacaacactttctcggcctatccggaatgccccgacgttactcggactaccccgatgcatacaccacatgaaatatcctatcatctgtaggctcattcatttctctaacagcagtaatattaataattttcatgatttgagaagccttcgcttcgaagcgaaaagtcctaatagtagaagaaccctccataaacctggagtgactatatggatgccccccaccctaccacacattcgaagaacccgtatacataaaatctagacaaaaaaggaaggaatcgaaccccccaaagctggtttcaagccaaccccatggcctccatgactttttcaaaaagatattagaaaaaccatttcataactttgtcaaagttaaattataggctaaatcctatatatcttaatggcacatgcagcgcaagtaggtctacaagacgctacttcccctatcatagaagagcttatcacctttcatgatcacgccctcataatcattttccttatctgcttcctagtcctgtatgcccttttcctaacactcacaacaaaactaactaatactaacatctcagacgctcaggaaatagaaaccgtctgaactatcctgcccgccatcatcctagtcctcatcgccctcccatccctacgcatcctttacataacagacgaggtcaacgatccctcccttaccatcaaatcaattggccaccaatggtactgaacctacgagtacaccgactacggcggactaatcttcaactcctacatacttcccccattattcctagaaccaggcgacctgcgactccttgacgttgacaatcgagtagtactcccgattgaagcccccattcgtataataattacatcacaagacgtcttgcactcatgagctgtccccacattaggcttaaaaacagatgcaattcccggacgtctaaaccaaaccactttcaccgctacacgaccgggggtatactacggtcaatgctctgaaatctgtggagcaaaccacagtttcatgcccatcgtcctagaattaattcccctaaaaatctttgaaatagggcccgtatttaccctatagcaccccctctagagcccactgtaaagctaacttagcattaaccttttaagttaaagattaagagaaccaacacctctttacagtgaaatgccccaactaaatactaccgtatggcccaccataattacccccatactccttacactatttctcatcacccaactaaaaatattaaacacaagctaccacttacctccctcaccaaagcccataaaaataaaaaattataacaaaccctgagaaccaaaatgaacgaaaatctgttcgcttcattcattgcccccacagtcctaggcctacccgccgcagtactgatcattctatttccccctctattgatccccacctccaaatatctcatcaacaaccgactaattaccacccaacaatgactaatcaaactaacctcaaaacaaatgatagccatacacaacactaaaggacgaacctgatctcttatactagtatccttaatcatttttattgccacaactaacctcctcggactcctgcctcactcatttacaccaaccacccaactatctataaacctagccatggccatccccttatgagcgggcgcagtgattataggctttcgctctaagattaaaaatgccctagcccacttcttaccacaaggcacacctacaccccttatccccatactagttattatcgaaaccatcagcctactcattcaaccaatagccctggccgtacgcctaaccgctaacattactgcaggccacctactcatgcatctaattggaagcgccaccctagcaatatcaaccattaaccttccctctacacttatcatcttcacaattctaattctactgactatcctagaaatcgctgtcgccttaatccaagcctacgttttcacacttctagtaagcctctacctgcacgacaacacataatgacccaccaatcacatgcctatcatatagtaaaacccagcccatgacccctaacaggggccctctcagccctcctaatgacctccggcctagccatgtgatttcacttccactccataacgctcctcatactaggcctgctaaccaacacactaaccatataccaatgatggcgcgatgtaacacgagaaagcacataccaaggccaccacacaccacctgtccaaaaaggccttcgatacgggataatcctatttattacctcagaagtttttttcttcgcaggatttttctgagccttttaccactccagcctagcccctaccccccaactaggggggcactgacccccaacaggcatcaccccgctaaatcccctagaagtcccactcctaaacacatccgtattactcgcatcaggagtatcaatcacctgagctcaccatagtctaatagaaaacaaccgaaaccaaataattcaagcactgcttattacaattttactgggtctctattttaccctcctacaagcctcagagtacttcgaatctcccttcaccatttccgacggcatctacggctcaacattttttgtagccacaggcttccatggacttcacgtcattattggctcaactttcctcactatctgcttcatccgccaactaatatttcactttacatccaaacatcactttggcttcgaagccgccgcctgatactggcattttgtagatgtggtttgactatttctgtatgtctccatctattgatgagggtcttactcttttagtataaatagtaccgttaacttccaattaactagttttgacaacattcaaaaaagagtaataaacttcgccttaattttaataatcaacaccctcctagccttactactaataattattacattttgactaccacaactcaacggctacatagaaaaatccaccccttacgagtgcggcttcgaccctatatcccccgcccgcgtccctttctccataaaattcttcttagtagctattaccttcttattatttgatctagaaattgccctccttttacccctaccatgagccctacaaacaactaacctgccactaatagttatgtcatccctcttattaatcatcatcctagccctaagtctggcctatgagtgactacaaaaaggattagactgagccgaattggtatatagtttaaacaaaacgaatgatttcgactcattaaattatgataatcatatttaccaaatgcccctcatttacataaatattatactagcatttaccatctcacttctaggaatactagtatatcgctcacacctcatatcctccctactatgcctagaaggaataatactatcgctattcattatagctactctcataaccctcaacacccactccctcttagccaatattgtgcctattgccatactagtttttgccgcctgcgaagcagcggtaggcctagccctactagtctcaatctccaacacatatggcctagactacgtacataacctaaacctactccaatgctaaaactaatcgtcccaacaattatattactaccactgacatgactctccaaaaaacacataatttgaatcaacacaaccacccacagcctaattattagcatcatccccctactattttttaaccaaatcaacaacaacctatttagctgctccccaaccttttcctccgaccccctaacaacccccctcctaatactaactacctgactcctacccctcacaatcatggcaagccaacgccacttatccagtgaaccactatcacgaaaaaaactctacctctctatactaatctccctacaaatctccttaattataacattcacagccacagaactaatcatattttatatcttcttcgaaaccacacttatccctaccttggctatcatcacccgatgaggcagccaaccagaacgcctgaacgcaggcacatacttcctattctacaccctagtaggctcccttcccctactcatcgcactaatttacactcacaacaccctaggctcactaaacattctactactcactctcactgcccaagaactatcaaactcctgagccaacaacttaatatgactagcttacacaatagcttttatagtaaagatacctctttacggactccacttatgactccctaaagcccatgtcgaagcccccatcgctgggtcaatagtacttgccgcagtactcttaaaactaggcggctatggtataatacgcctcacactcattctcaaccccctgacaaaacacatagcctaccccttccttgtactatccctatgaggcataattataacaagctccatctgcctacgacaaacagacctaaaatcgctcattgcatactcttcaatcagccacatggccctcgtagtaacagccattctcatccaaaccccctgaagcttcaccggcgcagtcattctcataatcgcccacggacttacatcctcattactattctgcctagcaaactcaaactacgaacgcactcacagtcgcatcataatcctctctcaaggacttcaaactctactcccactaatagctttttgatgacttctagcaagcctcgctaacctcgccttaccccccactattaacctactgggagaactctctgtgctagtaaccacattctcctgatcaaatatcactctcctacttacaggactcaacatactagtcacagccctatactccctctacatatttaccacaacacaatgaggctcactcacccaccacattaacaacataaaaccctcattcacacgagaaaacaccctcatgttcatacacctatcccccattctcctcctatccctcaaccccgacatcattaccgggttttcctcttgtaaatatagtttaaccaaaacatcagattgtgaatctgacaacagaggcttacgaccccttatttaccgagaaagctcacaagaactgctaactcatgcccccatgtctaacaacatggctttctcaacttttaaaggataacagctatccattggtcttaggccccaaaaattttggtgcaactccaaataaaagtaataaccatgcacactactataaccaccctaaccctgacttccctaattccccccatccttaccaccctcgttaaccctaacaaaaaaaactcatacccccattatgtaaaatccattgtcgcatccacctttattatcagtctcttccccacaacaatattcatgtgcctagaccaagaagttattatctcgaactgacactgagccacaacccaaacaacccagctctccctaagcttcaaactagactacttctccataatattcatccctgtagcattgttcgttacatggtccatcatagaattctcactgtgatatataaactcagacccaaacattaatcagttcttcaaatatctactcattttcctaattaccatgctaatcttagttaccgctaacaacctattccaactgttcatcggctgagagggcgtaggaattatatccttcttgctcatcagttgatgatacgcccgagcagatgccaacacagcagccattcaagcaatcctatacaaccgtatcggcgatatcggtttcatcctcgccttagcatgatttatcctacactccaactcatgagacccacaacaaatagcccttctaaacgctaatccaagcctcaccccactactaggcctcctcctagcagcagcaggcaaatcagcccaattaggtctccacccctgactcccctcagccatagaaggccccaccccagtctcagccctactccactcaagcactatagttgtagcaggagtcttcttacttatccgcttccaccccctagcagaaaatagcccactaatccaaactctaacactatgcttaggcgctatcaccactctgttcgcagcagtctgcgcccttacacaaaatgacatcaaaaaaatcgtagccttctccacttcaagtcaactaggactcatagtagttacaatcggcatcaaccaaccacacctagcattcctgcacatctgtacccacgccttcttcaaagccatactatttatgtgctccgggtccatcatccacaaccttaacaatgaacaagatattcgaaaaataggaggactactcaaaaccatacctctcacttcaacctccctcaccattggcagcctagcattagcaggaatacctttcctcacaggtttctattccaaagaccacatcatcgaaaccgcaaacatatcatacacaaacgcctgagccctatctattactctcatcgctacctccctgacaagcgcctatagcactcgaataattcttctcaccctaacaggtcaacctcgcttccctacccttactaacattaacgaaaataaccccaccctactaaaccccattaaacgcctggcagccggaagcctattcgcaggatttctcattactaacaacatttcccccgcatcccccttccaaacaacaatccccctctacctaaaactcacagccctcgctgtcactttcctaggacttctaacagccctagacctcaactacctaaccaacaaacttaaaataaaatccccactatgcacattttatttctccaacatactcggattctaccctagcatcacacaccgcacaatcccctatctaggccttcttacgagccaaaacctgcccctactcctcctagacctaacctgactagaaaagctattacctaaaacaatttcacagcaccaaatctccacctccatcatcacctcaacccaaaaaggcataattaaactttacttcctctctttcttcttcccactcatcctaaccctactcctaatcacataacctattcccccgagcaatctcaattacaatatatacaccaacaaacaatgttcaaccagtaactactactaatcaacgcccataatcatacaaagcccccgcaccaataggatcctcccgaatcaaccctgacccctctccttcataaattattcagctccctacactattaaagtttaccacaaccaccaccccatcatactctttcacccacagcaccaatcctacctccatcgctaaccccactaaaacactcaccaagacctcaacccctgacccccatgcctcaggatactcctcaatagccatcgctgtagtatatccaaagacaaccatcattccccctaaataaattaaaaaaactattaaacccatataacctcccccaaaattcagaataataacacacccgaccacaccgctaacaatcaatactaaacccccataaataggagaaggcttagaagaaaaccccacaaaccccattactaaacccacactcaacagaaacaaagcatacatcattattctcgcacggactacaaccacgaccaatgatatgaaaaaccatcgttgtatttcaactacaagaacaccaatgaccccgatacgcaaaattaaccccctaataaaattaattaaccactcattcatcgacctccccaccccatccaacatctccgcatgatgaaacttcggctcactccttggcgcctgcctgatcctccaaatcaccacaggactattcctagccatgcactactcaccagacgcctcaaccgccttttcatcaatcgcccacatcactcgagacgtaaattatggctgaatcatccgctaccttcacgccaatggcgcctcaatattctttatctgcctcttcctacacatcgggcgaggcctatattacggatcatttctctactcagaaacctgaaacatcggcattatcctcctgcttgcaactatagcaacagccttcataggttatgtcctcccgtgaggccaaatatcattctgaggggccacagtaattacaaacttactatccgccatcccatacattgggacagacctagttcaatgaatctgaggaggctactcagtagacagtcccaccctcacacgattctttacctttcacttcatcttgcccttcattattgcagccctagcagcactccacctcctattcttgcacgaaacgggatcaaacaaccccctaggaatcacctcccattccgataaaatcaccttccacccttactacacaatcaaagacaccctcggcttacttctcttccttctctccttaatgacattaacactattctcaccagacctcctaggcgacccagacaattataccctagccaaccccttaaacacccctccccacatcaagcccgaatgatatttcctattcgcctacacaattctccgatccgtccctaacaaactaggaggcgtccttgccctattactatccatcctcatcctagcaataatccccatcctccatatatccaaacaacaaagcataatatttcgcccactaagccaatcactttattgactcctagccgcagacctcctcattctaacctgaatcggaggacaaccagtaagctacccttttaccatcattggacaagtagcatccgtactatacttcacaacaatcctaatcctaataccaactatctccctaattgaaaacaaaatactcaaatgggcctgtccttgtagtataaactaatacaccagtcttgtaaaccggagatgaaaacctttttccaaggacaaatcagagaaaaagtctttaactccaccattagcacccaaagctaagattctaatttaaactattctctgttctttcatggggaagcagatttgggtaccacccaagtattgactcacccatcaacaaccgctatgtatttcgtacattactgccagccaccatgaatattgtacggtaccataaatacttgactacctgtagtacataaaaacccaacccacatcaaaaccctgcccccatgcttacaagcaagtacagcaatcaaccttcaactgtcacacatcaactgcaactccaaagccacccctcacccactaggataccaacaaacctacccacccttaacagtacatagcacataaagtcatttaccgtacatagcacattacagtcaaatcccttctcgtccccatggatgacccccctcagataggggtcccttgaccaccatcctccgtgaaatcaatatcccgcacaagagtgctactctcctcgctccgggcccataacacttgggggtagctaaagtgaactgtatccgacatctggttcctacttcagggccataaagcctaaatagcccacacgttccccttaaataagacatcacgatg

SEQ ID NO: 151 - DNA, 16572 bp, Homo sapiens mitochondrial
  3110: "n" refers to a nucleotide at position 3107 of the Cambridge Reference Sequence (CRS, Anderson et al. 1981 Nature 290:457-465), later determined to be absent from the human mtDNA sequence according to the revised CRS (rCRS, Andrews et al. 1999 Nature Genetics 23:147); "n" therefore represents a single nucleotide deletion at a position corresponding to nucleotide 3107 of SEQ ID NO:1 as provided herein.
gatcacaggtctatcaccctattaaccactcacgggagctctccatgcatttggtattttcgtctggggggtatgcacgcgatagcattgcgagacgctggagccggagcaccctatgtcgcagtatctgtctttgattcctgcctcatcctattatttatcgcacctacgttcaatattacaggcgaacatacttactaaagtgtgttaattaattaatgcttgtaggacataataataacaattgaatgtctgcacagccgctttccacacagacatcataacaaaaaatttccaccaaaccccccctccccccccgcttctggccacagcacttaaacacatctctgccaaaccccaaaaacaaagaaccctaacaccagcctaaccagatttcaaattttatcttttggcggtatgcacttttaacagtcaccccccaactaacacattattttcccctcccactcccatactactaatctcatcaatacaacccccgcccatcctacccagcacacacacaccgctgctaaccccataccccgaaccaaccaaaccccaaagacaccccccacagtttatgtagcttacctcctcaaagcaatacactgaaaatgtttagacgggctcacatcaccccataaacaaataggtttggtcctagcctttctattagctcttagtaagattacacatgcaagcatccccgttccagtgagttcaccctctaaatcaccacgatcaaaagggacaagcatcaagcacgcagcaatgcagctcaaaacgcttagcctagccacacccccacgggaaacagcagtgattaacctttagcaataaacgaaagtttaactaagctatactaaccccagggttggtcaatttcgtgccagccaccgcggtcacacgattaacccaagtcaatagaagccggcgtaaagagtgttttagatcaccccctccccaataaagctaaaactcacctgagttgtaaaaaactccagttgacacaaaatagactacgaaagtggctttaacatatctgaacacacaatagctaagacccaaactgggattagataccccactatgcttagccctaaacctcaacagttaaatcaacaaaactgctcgccagaacactacgagccacagcttaaaactcaaaggacctggcggtgcttcatatccctctagaggagcctgttctgtaatcgataaaccccgatcaacctcaccacctcttgctcagcctatataccgccatcttcagcaaaccctgatgaaggctacaaagtaagcgcaagtacccacgtaaagacgttaggtcaaggtgtagcccatgaggtggcaagaaatgggctacattttctaccccagaaaactacgatagcccttatgaaacttaagggtcgaaggtggatttagcagtaaactgagagtagagtgcttagttgaacagggccctgaagcgcgtacacaccgcccgtcaccctcctcaagtatacttcaaaggacatttaactaaaacccctacgcatttatatagaggagacaagtcgtaacatggtaagtgtactggaaagtgcacttggacgaaccagagtgtagcttaacacaaagcacccaacttacacttaggagatttcaacttaacttgaccgctctgagctaaacctagccccaaacccactccaccttactaccagacaaccttagccaaaccatttacccaaataaagtataggcgatagaaattgaaacctggcgcaatagatatagtaccgcaagggaaagatgaaaaattataaccaagcataatatagcaaggactaacccctataccttctgcataatgaattaactagaaataactttgcaaggagagccaaagctaagacccccgaaaccagacgagctacctaagaacagctaaaagagcacacccgtctatgtagcaaaatagtgggaagatttataggtagaggcgacaaacctaccgagcctggtgatagctggttgtccaagatagaatcttagttcaactttaaatttgcccacagaaccctctaaatccccttgtaaatttaactgttagtccaaagaggaacagctctttggacactaggaaaaaaccttgtagagagagtaaaaaatttaacacccatagtaggcctaaaagcagccaccaattaagaaagcgttcaagctcaacacccactacctaaaaaatcccaaacatataactgaactcctcacacccaattggaccaatctatcaccctatagaagaactaatgttagtataagtaacatgaaaacattctcctccgcataagcctgcgtcagattaaaacactgaactgacaattaacagcccaatatctacaatcaaccaacaagtcattattaccctcactgtcaacccaacacaggcatgctcataaggaaaggttaaaaaaagtaaaaggaactcggcaaatcttaccccgcctgtttaccaaaaacatcacctctagcatcaccagtattagaggcaccgcctgcccagtgacacatgtttaacggccgcggtaccctaaccgtgcaaaggtagcataatcacttgttccttaaatagggacctgtatgaatggctccacgagggttcagctgtctcttacttttaaccagtgaaattgacctgcccgtgaagaggcgggcataacacagcaagacgagaagaccctatggagctttaatttattaatgcaaacagtacctaacaaacccacaggtcctaaactaccaaacctgcattaaaaatttcggttggggcgacctcggagcagaacccaacctccgagcagtacatgctaagacttcaccagtcaaagcgaactactatactcaattgatccaataacttgaccaacggaacaagttaccctagggataacagcgcaatcctattctagagtccatatcaacaatagggtttacgacctcgatgttggatcaggacatcccgatggtgcagccgctattaaaggttcgtttgttcaacgattaaagtcctacgtgatctgagttcagaccggagtaatccaggtcggtttctatctacnttcaaattcctccctgtacgaaaggacaagagaaataaggcctacttcacaaagcgccttcccccgtaaatgatatcatctcaacttagtattatacccacacccacccaagaacagggtttgttaagatggcagagcccggtaatcgcataaaacttaaaactttacagtcagaggttcaattcctcttcttaacaacatacccatggccaacctcctactcctcattgtacccattctaatcgcaatggcattcctaatgcttaccgaacgaaaaattctaggctatatacaactacgcaaaggccccaacgttgtaggcccctacgggctactacaacccttcgctgacgccataaaactcttcaccaaagagcccctaaaacccgccacatctaccatcaccctctacatcaccgccccgaccttagctctcaccatcgctcttctactatgaacccccctccccatacccaaccccctggtcaacctcaacctaggcctcctatttattctagccacctctagcctagccgtttactcaatcctctgatcagggtgagcatcaaactcaaactacgccctgatcggcgcactgcgagcagtagcccaaacaatctcatatgaagtcaccctagccatcattctactatcaacattactaataagtggctcctttaacctctccacccttatcacaacacaagaacacctctgattactcctgccatcatgacccttggccataatatgatttatctccacactagcagagaccaaccgaacccccttcgaccttgccgaaggagagtccgaactagtctcaggcttcaacatcgaatacgccgcaggccccttcgccctattcttcatagccgaatacacaaacattattataataaacaccctcaccactacaatcttcctaggaacaacatatgacgcactctcccctgaactctacacaacatattttgtcaccaagaccctacttctaacctccctgttcttatgaattcgaacagcatacccccgattccgctacgaccaactcatacacctcctatgaaaaaacttcctaccactcaccctagcattacttatatgatatgtctccatacccattacaatctccagcattccccctcaaacctaagaaatatgtctgataaaagagttactttgatagagtaaataataggagcttaaacccccttatttctaggactatgagaatcgaacccatccctgagaatccaaaattctccgtgccacctatcacaccccatcctaaagtaaggtcagctaaataagctatcgggcccataccccgaaaatgttggttatacccttcccgtactaattaatcccctggcccaacccgtcatctactctaccatctttgcaggcacactcatcacagcgctaagctcgcactgattttttacctgagtaggcctagaaataaacatgctagcttttattccagttctaaccaaaaaaataaaccctcgttccacagaagctgccatcaagtatttcctcacgcaagcaaccgcatccataatccttctaatagctatcctcttcaacaatatactctccggacaatgaaccataaccaatactaccaatcaatactcatcattaataatcataatggctatagcaataaaactaggaatagccccctttcacttctgagtcccagaggttacccaaggcacccctctgacatccggcctgcttcttctcacatgacaaaaactagcccccatctcaatcatataccaaatctctccctcactaaacgtaagccttctcctcactctctcaatcttatccatcatagcaggcagttgaggtggattaaaccaaacccagctacgcaaaatcttagcatactcctcaattacccacataggatgaataatagcagttctaccgtacaaccctaacataaccattcttaatttaactatttatattatcctaactactaccgcattcctactactcaacttaaactccagcaccacgaccctactactatctcgcacctgaaacaagctaacatgactaacacccttaattccatccaccctcctctccctaggaggcctgcccccgctaaccggctttttgcccaaatgggccattatcgaagaattcacaaaaaacaatagcctcatcatccccaccatcatagccaccatcaccctccttaacctctacttctacctacgcctaatctactccacctcaatcacactactccccatatctaacaacgtaaaaataaaatgacagtttgaacatacaaaacccaccccattcctccccacactcatcgcccttaccacgctactcctacctatctccccttttatactaataatcttatagaaatttaggttaaatacagaccaagagccttcaaagccctcagtaagttgcaatacttaatttctgtaacagctaaggactgcaaaaccccactctgcatcaactgaacgcaaatcagccactttaattaagctaagcccttactagaccaatgggacttaaacccacaaacacttagttaacagctaagcaccctaatcaactggcttcaatctacttctcccgccgccgggaaaaaaggcgggagaagccccggcaggtttgaagctgcttcttcgaatttgcaattcaatatgaaaatcacctcggagctggtaaaaagaggcctaacccctgtctttagatttacagtccaatgcttcactcagccattttacctcacccccactgatgttcgccgaccgttgactattctctacaaaccacaaagacattggaacactatacctattattcggcgcatgagctggagtcctaggcacagctctaagcctccttattcgagccgagctgggccagccaggcaaccttctaggtaacgaccacatctacaacgttatcgtcacagcccatgcatttgtaataatcttcttcatagtaatacccatcataatcggaggctttggcaactgactagttcccctaataatcggtgcccccgatatggcgtttccccgcataaacaacataagcttctgactcttacctccctctctcctactcctgctcgcatctgctatagtggaggccggagcaggaacaggttgaacagtctaccctcccttagcagggaactactcccaccctggagcctccgtagacctaaccatcttctccttacacctagcaggtgtctcctctatcttaggggccatcaatttcatcacaacaattatcaatataaaaccccctgccataacccaataccaaacgcccctcttcgtctgatccgtcctaatcacagcagtcctacttctcctatctctcccagtcctagctgctggcatcactatactactaacagaccgcaacctcaacaccaccttcttcgaccccgccggaggaggagaccccattctataccaacacctattctgatttttcggtcaccctgaagtttatattcttatcctaccaggcttcggaataatctcccatattgtaacttactactccggaaaaaaagaaccatttggatacataggtatggtctgagctatgatatcaattggcttcctagggtttatcgtgtgagcacaccatatatttacagtaggaatagacgtagacacacgagcatatttcacctccgctaccataatcatcgctatccccaccggcgtcaaagtatttagctgactcgccacactccacggaagcaatatgaaatgatctgctgcagtgctctgagccctaggattcatctttcttttcaccgtaggtggcctgactggcattgtattagcaaactcatcactagacatcgtactacacgacacgtactacgttgtagcccacttccactatgtcctatcaataggagctgtatttgccatcataggaggcttcattcactgatttcccctattctcaggctacaccctagaccaaacctacgccaaaatccatttcactatcatattcatcggcgtaaatctaactttcttcccacaacactttctcggcctatccggaatgccccgacgttactcggactaccccgatgcatacaccacatgaaacatcctatcatctgtaggctcattcatttctctaacagcagtaatattaataattttcatgatttgagaagccttcgcttcgaagcgaaaagtcctaatagtagaagaaccctccataaacctggagtgactatatggatgccccccaccctaccacacattcgaagaacccgtatacataaaatctagacaaaaaaggaaggaatcgaaccccccaaagctggtttcaagccaaccccatggcctccatgactttttcaaaaaggtattagaaaaaccatttcataactttgtcaaagttaaattataggctaaatcctatatatcttaatggcacatgcagcgcaagtaggtctacaagacgctacttcccctatcatagaagagcttatcacctttcatgatcacgccctcataatcattttccttatctgcttcctagtcctgtatgcccttttcctaacactcacaacaaaactaactaatactaacatctcagacgctcaggaaatagaaaccgtctgaactatcctgcccgccatcatcctagtcctcatcgccctcccatccctacgcatcctttacataacagacgaggtcaacgatccctcccttaccatcaaatcaattggccaccaatggtactgaacctacgagtacaccgactacggcggactaatcttcaactcctacatacttcccccattattcctagaaccaggcgacctgcgactccttgacgttgacaatcgagtagtactcccgattgaagcccccattcgtataataattacatcacaagacgtcttgcactcatgagctgtccccacattaggcttaaaaacagatgcaattcccggacgtctaaaccaaaccactttcaccgctacacgaccgggggtatactacggtcaatgctctgaaatctgtggagcaaaccacagtttcatgcccatcgtcctagaattaattcccctaaaaatctttgaaatagggcccgtatttaccctatagcaccccctctaccccctctagagcccactgtaaagctaacttagcattaaccttttaagttaaagattaagagaaccaacacctctttacagtgaaatgccccaactaaatactaccgtatggcccaccataattacccccatactccttacactattcctcatcacccaactaaaaatattaaacacaaactaccacctacctccctcaccaaagcccataaaaataaaaaattataacaaaccctgagaaccaaaatgaacgaaaatctgttcgcttcattcattgcccccacaatcctaggcctacccgccgcagtactgatcattctatttccccctctattgatccccacctccaaatatctcatcaacaaccgactaatcaccacccaacaatgactaatcaaactaacctcaaaacaaatgataaccatacacaacactaaaggacgaacctgatctcttatactagtatccttaatcatttttattgccacaactaacctcctcggactcctgcctcactcatttacaccaaccacccaactatctataaacctagccatggccatccccttatgagcgggcgcagtgattataggctttcgctctaagattaaaaatgccctagcccacttcttaccacaaggcacacctacaccccttatccccatactagttattatcgaaaccatcagcctactcattcaaccaatagccctggccgtacgcctaaccgctaacattactgcaggccacctactcatgcacctaattggaagcgccaccctagcaatatcaaccattaaccttccctctacacttatcatcttcacaattctaattctactgactatcctagaaatcgctgtcgccttaatccaagcctacgttttcacacttctagtaagcctctacctgcacgacaacacataatgacccaccaatcacatgcctatcatatagtaaaacccagcccatgacccctaacaggggccctctcagccctcctaatgacctccggcctagccatgtgatttcacttccactccataacgctcctcatactaggcctactaaccaacacactaaccatataccaatgatggcgcgatgtaacacgagaaagcacataccaaggccaccacacaccacctgtccaaaaaggccttcgatacgggataatcctatttattacctcagaagtttttttcttcgcaggatttttctgagccttttaccactccagcctagcccctaccccccaattaggagggcactggcccccaacaggcatcaccccgctaaatcccctagaagtcccactcctaaacacatccgtattactcgcatcaggagtatcaatcacctgagctcaccatagtctaatagaaaacaaccgaaaccaaataattcaagcactgcttattacaattttactgggtctctattttaccctcctacaagcctcagagtacttcgagtctcccttcaccatttccgacggcatctacggctcaacattttttgtagccacaggcttccacggacttcacgtcattattggctcaactttcctcactatctgcttcatccgccaactaatatttcactttacatccaaacatcactttggcttcgaagccgccgcctgatactggcattttgtagatgtggtttgactatttctgtatgtctccatctattgatgagggtcttactcttttagtataaatagtaccgttaacttccaattaactagttttgacaacattcaaaaaagagtaataaacttcgccttaattttaataatcaacaccctcctagccttactactaataattattacattttgactaccacaactcaacggctacatagaaaaatccaccccttacgagtgcggcttcgaccctatatcccccgcccgcgtccctttctccataaaattcttcttagtagctattaccttcttattatttgatctagaaattgccctccttttacccctaccatgagccctacaaacaactaacctgccactaatagttatgtcatccctcttattaatcatcatcctagccctaagtctggcctatgagtgactacaaaaaggattagactgaaccgaattggtatatagtttaaacaaaacgaatgatttcgactcattaaattatgataatcatatttaccaaatgcccctcatttacataaatattatactagcatttaccatctcacttctaggaatactagtatatcgctcacacctcatatcctccctactatgcctagaaggaataatactatcgctgttcattatagctactctcataaccctcaacacccactccctcttagccaatattgtgcctattgccatactagtctttgccgcctgcgaagcagcggtgggcctagccctactagtctcaatctccaacacatatggcctagactacgtacataacctaaacctactccaatgctaaaactaatcgtcccaacaattatattactaccactgacatgactttccaaaaaacacataatttgaatcaacacaaccacccacagcctaattattagcatcatccctctactattttttaaccaaatcaacaacaacctatttagctgttccccaaccttttcctccgaccccctaacaacccccctcctaatactaactacctgactcctacccctcacaatcatggcaagccaacgccacttatccagtgaaccactatcacgaaaaaaactctacctctctatactaatctccctacaaatctccttaattataacattcacagccacagaactaatcatattttatatcttcttcgaaaccacacttatccccaccttggctatcatcacccgatgaggcaaccagccagaacgcctgaacgcaggcacatacttcctattctacaccctagtaggctcccttcccctactcatcgcactaatttacactcacaacaccctaggctcactaaacattctactactcactctcactgcccaagaactatcaaactcctgagccaacaacttaatatgactagcttacacaatagcttttatagtaaagatacctctttacggactccacttatgactccctaaagcccatgtcgaagcccccatcgctgggtcaatagtacttgccgcagtactcttaaaactaggcggctatggtataatacgcctcacactcattctcaaccccctgacaaaacacatagcctaccccttccttgtactatccctatgaggcataattataacaagctccatctgcctacgacaaacagacctaaaatcgctcattgcatactcttcaatcagccacatagccctcgtagtaacagccattctcatccaaaccccctgaagcttcaccggcgcagtcattctcataatcgcccacgggcttacatcctcattactattctgcctagcaaactcaaactacgaacgcactcacagtcgcatcataatcctctctcaaggacttcaaactctactcccactaatagctttttgatgacttctagcaagcctcgctaacctcgccttaccccccactattaacctactgggagaactctctgtgctagtaaccacgttctcctgatcaaatatcactctcctacttacaggactcaacatactagtcacagccctatactccctctacatatttaccacaacacaatggggctcactcacccaccacattaacaacataaaaccctcattcacacgagaaaacaccctcatgttcatacacctatcccccattctcctcctatccctcaaccccgacatcattaccgggttttcctcttgtaaatatagtttaaccaaaacatcagattgtgaatctgacaacagaggcttacgaccccttatttaccgagaaagctcacaagaactgctaactcatgcccccatgtctaacaacatggctttctcaacttttaaaggataacagctatccattggtcttaggccccaaaaattttggtgcaactccaaataaaagtaataaccatgcacactactataaccaccctaaccctgacttccctaattccccccatccttaccaccctcgttaaccctaacaaaaaaaactcatacccccattatgtaaaatccattgtcgcatccacctttattatcagtctcttccccacaacaatattcatgtgcctagaccaagaagttattatctcgaactgacactgagccacaacccaaacaacccagctctccctaagcttcaaactagactacttctccataatattcatccctgtagcattgttcgttacatggtccatcatagaattctcactgtgatatataaactcagacccaaacattaatcagttcttcaaatatctactcatcttcctaattaccatactaatcttagttaccgctaacaacctattccaactgttcatcggctgagagggcgtaggaattatatccttcttgctcatcagttgatgatacgcccgagcagatgccaacacagcagccattcaagcaatcctatacaaccgtatcggcgatatcggtttcatcctcgccttagcatgatttatcctacactccaactcatgagacccacaacaaatagcccttctaaacgctaatccaagcctcaccccactactaggcctcctcctagcagcagcaggcaaatcagcccaattaggtctccacccctgactcccctcagccatagaaggccccaccccagtctcagccctactccactcaagcactatagttgtagcaggaatcttcttactcatccgcttccaccccctagcagaaaatagcccactaatccaaactctaacactatgcttaggcgctatcaccactctgttcgcagcagtctgcgcccttacacaaaatgacatcaaaaaaatcgtagccttctccacttcaagtcaactaggactcataatagttacaatcggcatcaaccaaccacacctagcattcctgcacatctgtacccacgccttcttcaaagccatactatttatgtgctccgggtccatcatccacaaccttaacaatgaacaagatattcgaaaaataggaggactactcaaaaccatacctctcacttcaacctccctcaccattggcagcctagcattagcaggaatacctttcctcacaggtttctactccaaagaccacatcatcgaaaccgcaaacatatcatacacaaacgcctgagccctatctattactctcatcgctacctccctgacaagcgcctatagcactcgaataattcttctcaccctaacaggtcaacctcgcttccccacccttactaacattaacgaaaataaccccaccctactaaaccccattaaacgcctggcagccggaagcctattcgcaggatttctcattactaacaacatttcccccgcatcccccttccaaacaacaatccccctctacctaaaactcacagccctcgctgtcactttcctaggacttctaacagccctagacctcaactacctaaccaacaaacttaaaataaaatccccactatgcacattttatttctccaacatactcggattctaccctagcatcacacaccgcacaatcccctatctaggccttcttacgagccaaaacctgcccctactcctcctagacctaacctgactagaaaagctattacctaaaacaatttcacagcaccaaatctccacctccatcatcacctcaacccaaaaaggcataattaaactttacttcctctctttcttcttcccactcatcctaaccctactcctaatcacataacctattcccccgagcaatctcaattacaatatatacaccaacaaacaatgttcaaccagtaactactactaatcaacgcccataatcatacaaagcccccgcaccaataggatcctcccgaatcaaccctgacccctctccttcataaattattcagcttcctacactattaaagtttaccacaaccaccaccccatcatactctttcacccacagcaccaatcctacctccatcgctaaccccactaaaacactcaccaagacctcaacccctgacccccatgcctcaggatactcctcaatagccatcgctgtagtatatccaaagacaaccatcattccccctaaataaattaaaaaaactattaaacccatataacctcccccaaaattcagaataataacacacccgaccacaccgctaacaatcaatactaaacccccataaataggagaaggcttagaagaaaaccccacaaaccccattactaaacccacactcaacagaaacaaagcatacatcattattctcgcacggactacaaccacgaccaatgatatgaaaaaccatcgttgtatttcaactacaagaacaccaatgaccccaatacgcaaaactaaccccctaataaaattaattaaccactcattcatcgacctccccaccccatccaacatctccgcatgatgaaacttcggctcactccttggcgcctgcctgatcctccaaatcaccacaggactattcctagccatgcactactcaccagacgcctcaaccgccttttcatcaatcgcccacatcactcgagacgtaaattatggctgaatcatccgctaccttcacgccaatggcgcctcaatattctttatctgcctcttcctacacatcgggcgaggcctatattacggatcatttctctactcagaaacctgaaacatcggcattatcctcctgcttgcaactatagcaacagccttcataggctatgtcctcccgtgaggccaaatatcattctgaggggccacagtaattacaaacttactatccgccatcccatacattgggacagacctagttcaatgaatctgaggaggctactcagtagacagtcccaccctcacacgattctttacctttcacttcatcttgcccttcattattgcagccctagcagcactccacctcctattcttgcacgaaacgggatcaaacaaccccctaggaatcacctcccattccgataaaatcaccttccacccttactacacaatcaaagacgccctcggcttacttctcttccttctctccttaatgacattaacactattctcaccagacctcctaggcgacccagacaattataccctagccaaccccttaaacacccctccccacatcaagcccgaatgatatttcctattcgcctacacaattctccgatccgtccctaacaaactaggaggcgtccttgccctattactatccatcctcatcctagcaataatccccatcctccatatatccaaacaacaaagcataatatttcgcccactaagccaatcactttattgactcctagccgcagacctcctcattctaacctgaatcggaggacaaccagtaagctacccttttaccatcattggacaagtagcatccgtactatacttcacaacaatcctaatcctaataccaactatctccctaattgaaaacaaaatactcaaatgggcctgtccttgtagtataaactaatacaccagtcttgtaaaccggagatgaaaacctttttccaaggacaaatcagagaaaaagtctttaactccaccattagcacccaaagctaagattctaatttaaactattctctgttctttcatggggaagcagatttgggtaccacccaagtattgactcacccatcaacaaccgctatgtatttcgtacattactgccagccaccatgaatattgtacagtaccataaatacttgaccacctgtagtacataaaaacccaatccacatcaaaaccccctccccatgcttacaagcaagtacagcaatcaaccctcaactatcacacatcaactgcaactccaaagccacccctcacccactaggataccaacaaacctacccacccttaacagtacatagtacataaagccatttaccgtacatagcacattacagtcaaatcccttctcgtccccatggatgacccccctcagataggggtcccttgaccaccatcctccgtgaaatcaatatcccgcacaagagtgctactctcctcgctccgggcccataacacttgggggtagctaaagtgaactgtatccgacatctggttcctacttcagggccataaagcctaaatagcccacacgttccccttaaataagacatcacgatg

SEQ ID NO: 152 - DNA, 16571 bp, Homo sapiens mitochondrial
  3109: "n" refers to a nucleotide at position 3107 of the Cambridge Reference Sequence (CRS, Anderson et al. 1981 Nature 290:457-465), later determined to be absent from the human mtDNA sequence according to the revised CRS (rCRS, Andrews et al. 1999 Nature Genetics 23:147); "n" therefore represents a single nucleotide deletion at a position corresponding to nucleotide 3107 of SEQ ID NO:1 as provided herein.
gatcacaggtctatcaccctattaaccactcacgggagctctccatgcatttggtattttcgtctggggggtatgcacgcgatagcattgcgagacgctggagccggagcaccctatgtcgcagtatctgtctttgattcctgcctcatcctattatttatcgcacctacgttcaatattacaggcgaacatacttactaaagtgtgttaattaattaatgcttgtaggacataataataacaattgaatgtctgcacagccgctttccacacagacatcataacaaaaaatttccaccaaaccccccctcccccccgcttctggccacagcacttaaacacatctctgccaaaccccaaaaacaaagaaccctaacaccagcctaaccagatttcaaattttatcttttggcggtatgcacttttaacagtcaccccccaactaacacattattttcccctcccactcccatactactaatctcatcaatacaacccccgcccatcctacccagcacacacacaccgctgctaaccccataccccgaaccaaccaaaccccaaagacaccccccacagtttatgtagcttacctcctcaaagcaatacactgaaaatgtttagacgggctcacatcaccccataaacaaataggtttggtcctagcctttctattagctcttagtaagattacacatgcaagcatccccgttccagtgagttcaccctctaaatcaccacgatcaaaaggaacaagcatcaagcacgcagcaatgcagctcaaaacgcttagcctagccacacccccacgggaaacagcagtgattaacctttagcaataaacgaaagtttaactaagctatactaaccccagggttggtcaatttcgtgccagccaccgcggtcacacgattaacccaagtcaatagaagccggcgtaaagagtgttttagatcaccccctccccaataaagctaaaactcacctgagttgtaaaaaactccagttgacacaaaatagactacgaaagtggctttaacatatctgaacacacaatagctaagacccaaactgggattagataccccactatgcttagccctaaacctcaacagttaaatcaacaaaactgctcgccagaacactacgagccacagcttaaaactcaaaggacctggcggtgcttcatatccctctagaggagcctgttctgtaatcgataaaccccgatcaacctcaccacctcttgctcagcctatataccgccatcttcagcaaaccctgatgaaggctacaaagtaagcgcaagtacccacgtaaagacgttaggtcaaggtgtagcccatgaggtggcaagaaatgggctacattttctaccccagaaaactacgatagcccttatgaaacttaagggtcgaaggtggatttagcagtaaactaagagtagagtgcttagttgaacagggccctgaagcgcgtacacaccgcccgtcaccctcctcaagtatacttcaaaggacatttaactaaaacccctacgcatttatatagaggaggcaagtcgtaacatggtaagtgtactggaaagtgcacttggacgaaccagagtgtagcttaacacaaagcacccaacttacacttaggagatttcaacttaacttgaccgctctgagctaaacctagccccaaacccactccaccttactaccagacaaccttagccaaaccatttacccaaataaagtataggcgatagaaattgaaacctggcgcaatagatatagtaccgcaagggaaagatgaaaaattataaccaagcataatatagcaaggactaacccctataccttctgcataatgaattaactagaaataactttgcaaggagagccaaagctaagacccccgaaaccagacgagctacctaagaacagctaaaagagcacacccgtctatgtagcaaaatagtgggaagatttataggtagaggcgacaaacctaccgagcctggtgatagctggttgtccaagatagaatcttagttcaactttaaatttgcccacagaaccctctaaatccccttgtaaatttaactgttagtccaaagaggaacagctctttggacactaggaaaaaaccttgtagagagagtaaaaaatttaacacccatagtaggcctaaaagcagccaccaattaagaaagcgttcaagctcaacacccactacctaaaaaatcccaaacatataactgaactcctcacacccaattggaccaatctatcaccctatagaagaactaatgttagtataagtaacatgaaaacattctcctccgcataagcctgcgtcagattaaaacactgaactgacaattaacagcccaatatctacaatcaaccaacaagtcattattaccctcactgtcaacccaacacaggcatgctcataaggaaaggttaaaaaaagtaaaaggaactcggcaaatcttaccccgcctgtttaccaaaaacatcacctctagcatcaccagtattagaggcaccgcctgcccagtgacacatgtttaacggccgcggtaccctaaccgtgcaaaggtagcataatcacttgttccttaaatagggacctgtatgaatggctccacgagggttcagctgtctcttacttttaaccagtgaaattgacctgcccgtgaagaggcgggcataacacagcaagacgagaagaccctatggagctttaatttattaatgcaaacagtacctaacaaacccacaggtcctaaactaccaaacctgcattaaaaatttcggttggggcgacctcggagcagaacccaacctccgagcagtacatgctaagacttcaccagtcaaagcgaactactatactcaattgatccaataacttgaccaacggaacaagttaccctagggataacagcgcaatcctattctagagtccatatcaacaatagggtttacgacctcgatgttggatcaggacatcccgatggtgcagccgctattaaaggttcgtttgttcaacgattaaagtcctacgtgatctgagttcagaccggagtaatccaggtcggtttctatctacnttcaaattcctccctgtacgaaaggacaagagaaataaggcctacttcacaaagcgccttcccccgtaaatgatatcatctcaacttagtattatacccacacccacccaagaacagggtttgttaagatggcagagcccggtaatcgcataaaacttaaaactttacagtcagaggttcaattcctcttcttaacaacatacccatggccaacctcctactcctcattgtacccattctaatcgcaatggcattcctaatgcttaccgaacgaaaaattataggctatatacaactacgcaaaggccccaacgttgtaggcccctacgggctactacaacccttcgctgacgccataaaactcttcaccaaagagcccctaaaacccgccacatctaccatcaccctctacatcaccgccccgaccttagctctcaccatcgctcttctactatgaacccccctccccatacccaaccccctggtcaacctcaacctaggcctcctatttattctagccacctctagcctagccgtttactcaatcctctgatcagggtgagcatcaaactcaaactacgccctgatcggcgcactgcgagcagtagcccaaacaatctcatatgaagtcaccctagccatcattctactatcaacattactaataagtggctcctttaacctctccacccttatcacaacacaagaacacctctgattactcctgccatcatgacccttggccataatatgatttatctccacactagcagagaccaaccgaacccccttcgaccttgccgaaggggagtccgaactagtctcaggcttcaacatcgaatacgccgcaggccccttcgccctattcttcatagccgaatacacaaacattattataataaacaccctcaccactacaatcttcctaggaacaacatatgacgcactctcccctgaactctacacaacatattttgtcaccaagaccctacttctaacctccctgttcttatgaattcgaacagcatacccccgattccgctacgaccaactcatacacctcctatgaaaaaacttcctaccactcaccctagcattacttatatgatatgtctccatacccattacaatctccagcattccccctcaaacctaagaaatatgtctgataaaagagttactttgatagagtaaataataggagcttaaacccccttatttctaggactatgagaatcgaacccatccctgagaatccaaaattctccgtgccacctatcacaccccatcctaaagtaaggtcagctaaataagctatcgggcccataccccgaaaatgttggttatacccttcccgtactaattaatcccctggcccaacccgtcatctactctaccatctttgcaggcacactcatcacagcgctaagctcgcactgattttttacctgagtaggcctagaaataaacatgctagcttttattccagttctaaccaaaaaaataaaccctcgttccacagaagctgccatcaagtatttcctcacgcaagcaaccgcatccataatccttctaatagctatcctcttcaacaatatactctccggacaatgaaccataaccaatactaccaatcaatactcatcattaataatcataatagctatagcaataaaactaggaatagccccctttcacttctgagtcccagaggttacccaaggcacccctctgacatccggcctgcttcttctcacatgacaaaaactagcccccatctcaatcatataccaaatctctccctcactaaacgtaagccttctcctcactctctcaatcttatccatcatagcaggcagttgaggtggattaaaccaaacccagctacgcaaaatcttagcatactcctcaattacccacataggatgaataatagcagttctaccgtacaaccctaacataaccattcttaatttaactatttatattatcctaactactaccgcattcctactactcaacttaaactccagcaccacgaccctactactatctcgcacctgaaacaagctaacatgactaacacccttaattccatccaccctcctctccctaggaggcctgcccccgctaaccggctttttgcccaaatgggccattatcgaagaattcacaaaaaacaatagcctcatcatccccaccatcatagccaccatcaccctccttaacctctacttctacctacgcctaatctactccacctcaatcacactactccccatatctaacaacgtaaaaataaaatgacagtttgaacatacaaaacccaccccattcctccccacactcatcgcccttaccacgctactcctacctatctccccttttatactaataatcttatagaaatttaggttaaatacagaccaagagccttcaaagccctcagtaagttgcaatacttaatttctgtaacagctaaggactgcaaaaccccactctgcatcaactgaacgcaaatcagccactttaattaagctaagcccttactagaccaatgggacttaaacccacaaacacttagttaacagctaagcaccctaatcaactggcttcaatctacttctcccgccgccgggaaaaaaggcgggagaagccccggcaggtttgaagctgcttcttcgaatttgcaattcaatatgaaaatcacctcggagctggtaaaaagaggcctaacccctgtctttagatttacagtccaatgcttcactcagccattttacctcacccccactgatgttcgccgaccgttgactattctctacaaaccacaaagacattggaacactatacctattattcggcgcatgagctggagtcctaggcacagctctaagcctccttattcgagccgagctgggccagccaggcaaccttctaggtaacgaccacatctacaacgttatcgtcacagcccatgcatttgtaataatcttcttcatagtaatacccatcataatcggaggctttggcaactgactagttcccctaataatcggtgcccccgatatggcgtttccccgcataaacaacataagcttctgactcttacctccctctctcctactcctgctcgcatctgctatagtggaggccggagcaggaacaggttgaacagtctaccctcccttagcagggaactactcccaccctggagcctccgtagacctaaccatcttctccttacacctagcaggtgtctcctctatcttaggggccatcaatttcatcacaacaattatcaatataaaaccccctgccataacccaataccaaacgcccctcttcgtctgatccgtcctaatcacagcagtcctacttctcctatctctcccagtcctagctgctggcatcactatactactaacagaccgcaacctcaacaccaccttcttcgaccccgccggaggaggagaccccattctataccaacacctattctgatttttcggtcaccctgaagtttatattcttatcctaccaggcttcggaataatctcccatattgtaacttactactccggaaaaaaagaaccatttggatacataggtatggtctgagctatgatatcaattggcttcctagggtttatcgtgtgagcacaccatatatttacagtaggaatagacgtagacacacgagcatatttcacctccgctaccataatcatcgctatccccaccggcgtcaaagtatttagctgactcgccacactccacggaagcaatatgaaatgatctgctgcagtgctctgagccctaggattcatctttcttttcaccgtaggtggcctgactggcattgtattagcaaactcatcactagacatcgtactacacgacacgtactacgttgtagcccacttccactatgtcctatcaataggagctgtatttgccatcataggaggcttcattcactgatttcccctattctcaggctacaccctagaccaaacctacgccaaaatccatttcactatcatattcatcggcgtaaatctaactttcttcccacaacactttctcggcctatccggaatgccccgacgttactcggactaccccgatgcatacaccacatgaaacatcctatcatctgtaggctcattcatttctctaacagcagtaatattaataattttcatgatttgagaagccttcgcttcgaagcgaaaagtcctaatagtagaagaaccctccataaacctggagtgactatatggatgccccccaccctaccacacattcgaagaacccgtatacataaaatctagacaaaaaaggaaggaatcgaaccccccaaagctggtttcaagccaaccccatggcctccatgactttttcaaaaaggtattagaaaaaccatttcataactttgtcaaagttaaattataggctaaatcctatatatcttaatggcacatgcagcgcaagtaggtctacaagacgctacttcccctatcatagaagagcttatcacctttcatgatcacgccctcataatcattttccttatctgcttcctagtcctgtatgcccttttcctaacactcacaacaaaactaactaatactaacatctcagacgctcaggaaatagaaaccgtctgaactatcctgcccgccatcatcctagtcctcatcgccctcccatccctacgcatcctttacataacagacgaggtcaacgatccctcccttaccatcaaatcaattggccaccaatggtactgaacctacgagtacaccgactacggcggactaatcttcaactcctacatacttcccccattattcctagaaccaggcgacctgcgactccttgacgttgacaatcgagtagtactcccgattgaagcccccattcgtataataattacatcacaagacgtcttgcactcatgagctgtccccacattaggcttaaaaacagatgcaattcccggacgtctaaaccaaaccactttcaccgctacacgaccgggggtatactacggtcaatgctctgaaatctgtggagcaaaccacagtttcatgcccatcgtcctagaattaattcccctaaaaatctttgaaatagggcccgtatttaccctatagcaccccctctaccccctctagagcccactgtaaagctaacttagcattaaccttttaagttaaagattaagagaaccaacacctctttacagtgaaatgccccaactaaatactaccgtatggcccaccataattacccccatactccttacactattcctcatcacccaactaaaaatattaaacacaaactaccacctacctccctcaccaaagcccataaaaataaaaaattataacaaaccctgagaaccaaaatgaacgaaaatctgttcgcttcattcattgcccccacaatcctaggcctacccgccgcagtactgatcattctatttccccctctattgatccccacctccaaatatctcatcaacaaccgactaatcaccacccaacaatgactaatcaaactaacctcaaaacaaatgataaccatacacaacactaaaggacgaacctgatctcttatactagtatccttaatcatttttattgccacaactaacctcctcggactcctgcctcactcatttacaccaaccacccaactatctataaacctagccatggccatccccttatgagcgggcgcagtgattataggctttcgctctaagattaaaaatgccctagcccacttcttaccacaaggcacacctacaccccttatccccatactagttattatcgaaaccatcagcctactcattcaaccaatagccctggccgtacgcctaaccgctaacattactgcaggccacctactcatgcacctaattggaagcgccaccctagcaatatcaaccattaaccttccctctacacttatcatcttcacaattctaattctactgactatcctagaaatcgctgtcgccttaatccaagcctacgttttcacacttctagtaagcctctacctgcacgacaacacataatgacccaccaatcacatgcctatcatatagtaaaacccagcccatgacccctaacaggggccctctcagccctcctaatgacctccggcctagccatgtgatttcacttccactccataacgctcctcatactaggcctactaaccaacacactaaccatataccaatgatggcgcgatgtaacacgagaaagcacataccaaggccaccacacaccacctgtccaaaaaggccttcgatacgggataatcctatttattacctcagaagtttttttcttcgcaggatttttctgagccttttaccactccagcctagcccctaccccccaattaggagggcactggcccccaacaggcatcaccccgctaaatcccctagaagtcccactcctaaacacatccgtattactcgcatcaggagtatcaatcacctgagctcaccatagtctaatagaaaacaaccgaaaccaaataattcaagcactgcttattacaattttactgggtctctattttaccctcctacaagcctcagagtacttcgagtctcccttcaccatttccgacggcatctacggctcaacattttttgtagccacaggcttccacggacttcacgtcattattggctcaactttcctcactatctgcttcatccgccaactaatatttcactttacatccaaacatcactttggcttcgaagccgccgcctgatactggcattttgtagatgtggtttgactatttctgtatgtctccatctattgatgagggtcttactcttttagtataaatagtaccgttaacttccaattaactagttttgacaacattcaaaaaagagtaataaacttcgccttaattttaataatcaacaccctcctagccttactactaataattattacattttgactaccacaactcaacggctacatagaaaaatccaccccttacgagtgcggcttcgaccctatatcccccgcccgcgtccctttctccataaaattcttcttagtagctattaccttcttattatttgatctagaaattgccctccttttacccctaccatgagccctacaaacaactaacctgccactaatagttatgtcatccctcttattaatcatcatcctagccctaagtctggcctatgagtgactacaaaaaggattagactgaaccgaattggtatatagtttaaacaaaacgaatgatttcgactcattaaattatgataatcatatttaccaaatgcccctcatttacataaatattatactagcatttaccatctcacttctaggaatactagtatatcgctcacacctcatatcctccctactatgcctagaaggaataatactatcgctgttcattatagctactctcataaccctcaacacccactccctcttagccaatattgtgcctattgccatactagtctttgccgcctgcgaagcagcggtgggcctagccctactagtctcaatctccaacacatatggcctagactacgtacataacctaaacctactccaatgctaaaactaatcgtcccaacaattatattactaccactgacatgactttccaaaaaacacataatttgaatcaacacaaccacccacagcctaattattagcatcatccctctactattttttaaccaaatcaacaacaacctatttagctgttccccaaccttttcctccgaccccctaacaacccccctcctaatactaactacctgactcctacccctcacaatcatggcaagccaacgccacttatccagtgaaccactatcacgaaaaaaactctacctctctatactaatctccctacaaatctccttaattataacattcacagccacagaactaatcatattttatatcttcttcgaaaccacacttatccccaccttggctatcatcacccgatgaggcaaccagccagaacgcctgaacgcaggcacatacttcctattctacaccctagtaggctcccttcccctactcatcgcactaatttacactcacaacaccctaggctcactaaacattctactactcactctcactgcccaagaactatcaaactcctgagccaacaacttaatatgactagcttacacaatagcttttatagtaaagatacctctttacggactccacttatgactccctaaagcccatgtcgaagcccccatcgctgggtcaatagtacttgccgcagtactcttaaaactaggcggctatggtataatacgcctcacactcattctcaaccccctgacaaaacacatagcctaccccttccttgtactatccctatgaggcataattataacaagctccatctgcctacgacaaacagacctaaaatcgctcattgcatactcttcaatcagccacatagccctcgtagtaacagccattctcatccaaaccccctgaagcttcaccggcgcagtcattctcataatcgcccacgggcttacatcctcattactattctgcctagcaaactcaaactacgaacgcactcacagtcgcatcataatcctctctcaaggacttcaaactctactcccactaatagctttttgatgacttctagcaagcctcgctaacctcgccttaccccccactattaacctactgggagaactctctgtgctagtaaccacgttctcctgatcaaatatcactctcctacttacaggactcaacatactagtcacagccctatactccctctacatatttaccacaacacaatggggctcactcacccaccacattaacaacataaaaccctcattcacacgagaaaacaccctcatgttcatacacctatcccccattctcctcctatccctcaaccccgacatcattaccgggttttcctcttgtaaatatagtttaaccaaaacatcagattgtgaatctgacaacagaggcttacgaccccttatttaccgagaaagctcacaagaactgctaactcatgcccccatgtctaacaacatggctttctcaacttttaaaggataacagctatccattggtcttaggccccaaaaattttggtgcaactccaaataaaagtaataaccatgcacactactataaccaccctaaccctgacttccctaattccccccatccttaccaccctcgttaaccctaacaaaaaaaactcatacccccattatgtaaaatccattgtcgcatccacctttattatcagtctcttccccacaacaatattcatgtgcctagaccaagaagttattatctcgaactgacactgagccacaacccaaacaacccagctctccctaagcttcaaactagactacttctccataatattcatccctgtagcattgttcgttacatggtccatcatagaattctcactgtgatatataaactcagacccaaacattaatcagttcttcaaatatctactcatcttcctaattaccatactaatcttagttaccgctaacaacctattccaactgttcatcggctgagagggcgtaggaattatatccttcttgctcatcagttgatgatacgcccgagcagatgccaacacagcagccattcaagcaatcctatacaaccgtatcggcgatatcggtttcatcctcgccttagcatgatttatcctacactccaactcatgagacccacaacaaatagcccttctaaacgctaatccaagcctcaccccactactaggcctcctcctagcagcagcaggcaaatcagcccaattaggtctccacccctgactcccctcagccatagaaggccccaccccagtctcagccctactccactcaagcactatagttgtagcaggaatcttcttactcatccgcttccaccccctagcagaaaatagcccactaatccaaactctaacactatgcttaggcgctatcaccactctgttcgcagcagtctgcgcccttacacaaaatgacatcaaaaaaatcgtagccttctccacttcaagtcaactaggactcataatagttacaatcggcatcaaccaaccacacctagcattcctgcacatctgtacccacgccttcttcaaagccatactatttatgtgctccgggtccatcatccacaaccttaacaatgaacaagatattcgaaaaataggaggactactcaaaaccatacctctcacttcaacctccctcaccattggcagcctagcattagcaggaatacctttcctcacaggtttctactccaaagaccacatcatcgaaaccgcaaacatatcatacacaaacgcctgagccctatctattactctcatcgctacctccctgacaagcgcctatagcactcgaataattcttctcaccctaacaggtcaacctcgcttccccacccttactaacattaacgaaaataaccccaccctactaaaccccattaaacgcctggcagccggaagcctattcgcaggatttctcattactaacaacatttcccccgcatcccccttccaaacaacaatccccctctacctaaaactcacagccctcgctgtcactttcctaggacttctaacagccctagacctcaactacctaaccaacaaacttaaaataaaatccccactatgcacattttatttctccaacatactcggattctaccctagcatcacacaccgcacaatcccctatctaggccttcttacgagccaaaacctgcccctactcctcctagacctaacctgactagaaaagctattacctaaaacaatttcacagcaccaaatctccacctccatcatcacctcaacccaaaaaggcataattaaactttacttcctctctttcttcttcccactcatcctaaccctactcctaatcacataacctattcccccgagcaatctcaattacaatatatacaccaacaaacaatgttcaaccagtaactactactaatcaacgcccataatcatacaaagcccccgcaccaataggatcctcccgaatcaaccctgacccctctccttcataaattattcagcttcctacactattaaagtttaccacaaccaccaccccatcatactctttcacccacagcaccaatcctacctccatcgctaaccccactaaaacactcaccaagacctcaacccctgacccccatgcctcaggatactcctcaatagccatcgctgtagtatatccaaagacaaccatcattccccctaaataaattaaaaaaactattaaacccatataacctcccccaaaattcagaataataacacacccgaccacaccgctaacaatcaatactaaacccccataaataggagaaggcttagaagaaaaccccacaaaccccattactaaacccacactcaacagaaacaaagcatacatcattattctcgcacggactacaaccacgaccaatgatatgaaaaaccatcgttgtatttcaactacaagaacaccaatgaccccaatacgcaaaactaaccccctaataaaattaattaaccactcattcatcgacctccccaccccatccaacatctccgcatgatgaaacttcggctcactccttggcgcctgcctgatcctccaaatcaccacaggactattcctagccatgcactactcaccagacgcctcaaccgccttttcatcaatcgcccacatcactcgagacgtaaattatggctgaatcatccgctaccttcacgccaatggcgcctcaatattctttatctgcctcttcctacacatcgggcgaggcctatattacggatcatttctctactcagaaacctgaaacatcggcattatcctcctgcttgcaactatagcaacagccttcataggctatgtcctcccgtgaggccaaatatcattctgaggggccacagtaattacaaacttactatccgccatcccatacattgggacagacctagttcaatgaatctgaggaggctactcagtagacagtcccaccctcacacgattctttacctttcacttcatcttgcccttcattattgcagccctagcagcactccacctcctattcttgcacgaaacgggatcaaacaaccccctaggaatcacctcccattccgataaaatcaccttccacccttactacacaatcaaagacgccctcggcttacttctcttccttctctccttaatgacattaacactattctcaccagacctcctaggcgacccagacaattataccctagccaaccccttaaacacccctccccacatcaagcccgaatgatatttcctattcgcctacacaattctccgatccgtccctaacaaactaggaggcgtccttgccctattactatccatcctcatcctagcaataatccccatcctccatatatccaaacaacaaagcataatatttcgcccactaagccaatcactttattgactcctagccgcagacctcctcattctaacctgaatcggaggacaaccagtaagctacccttttaccatcattggacaagtagcatccgtactatacttcacaacaatcctaatcctaataccaactatctccctaattgaaaacaaaatactcaaatgggcctgtccttgtagtataaactaatacaccagtcttgtaaaccggagatgaaaacctttttccaaggacaaatcagagaaaaagtctttaactccaccattagcacccaaagctaagattctaatttaaactattctctgttctttcatggggaagcagatttgggtaccacccaagtattgactcacccatcaacaaccgctatgtatttcgtacattactgccagccaccatgaatattgtacggtaccataaatacttgaccacctgtagtacataaaaacccaatccacatcaaaaccccctccccatgcttacaagcaagtacagcaatcaaccctcaactatcacgcattaactgcaactccaaagccacccctcacccactaggataccaacaaacctacccacccttaacagtacatagtacataaagccatttaccgtacatagcacattacagtcaaatcctttctcgtccccatggatgacccccctcagataggggtcccttgatcaccatcctccgtgaaatcaatatcccgcacaagagtgctactctcctcgctccgggcccataacacttgggggtagctaaagtgaactgtatccgacatctggttcctacttcagggtcataaagcctaaatagcccacacgttccccttaaataagacatcacgatg

SEQ ID NO: 153 - DNA, 16570 bp, Homo sapiens mitochondrial
  3108: "n" refers to a nucleotide at position 3107 of the Cambridge Reference Sequence (CRS, Anderson et al. 1981 Nature 290:457-465), later determined to be absent from the human mtDNA sequence according to the revised CRS (rCRS, Andrews et al. 1999 Nature Genetics 23:147); "n" therefore represents a single nucleotide deletion at a position corresponding to nucleotide 3107 of SEQ ID NO:1 as provided herein.
gatcacaggtctatcaccctattaaccactcacgggagctctccatgcatttggtattttcgtctggggggtgtgcacgcgatagcattgcgagacgctggagccggagcaccctatgtcgcagtatctgtctttgattcctgcctcatcctattatttatcgcacctacgttcaatattacagacgaacatacttactaaagtgtgttaattaattaatgcttgtaagacataataataacaattgaatgtctgcacagccgctttccacacagacatcataacaaaaaattttcaccaaaccccccctcccccgccttctggccacagcacttaaacacatctctgccaaaccccaaaaacaaagaaccctaacaccagcctaaccagatttcaaattttatcttttggcggtatgcacttttaacagtcaccccccaactaacacattattttcccctctcactcccatactactaatctcatcaacacaacccccgcccatcctacccagcacacacacaccgctgctaaccccataccccgaaccaaccaaaccccaaagacaccccccacagtttatgtagcttacctcctcaaagcaatacactgaaaatgtttagacgggctcacatcaccccataaacaaataggtttggtcctagcctttctattagctcttagtaagattacacatgcaagcatccccgttccagtgagttcaccctctaaatcaccacgatcaaaagggacaagcatcaagcacgcagcaatgcagctcaaaacgcttagcctagccacacccccacgggaaacagcagtgattaacctttagcaataaacgaaagtttaactaagctatactaaccccagggttggtcaatttcgtgccagccaccgcggtcacacgattaacccaagtcaatagaagccggcgtaaagagtgttttagatcaccccctccccaataaagctaaaactcacctgagttgtaaaaaactccagttgacacaaaatagactacgaaagtggctttaacatatctgaacacacaatagctaagacccaaactgggattagataccccactatgcttagccctaaacctcaacagttaaatcaacaaaactgctcgccagaacactacgagccacagcttaaaactcaaaggacctggcggtgcttcatatccctctagaggagcctgttctgtaatcgataaaccccgatcaacctcaccacctcttgctcagcctatataccgccatcttcagcaaaccctgatgaaggctacaaagtaagcgcaagtacccacgtaaagacgttaggtcaaggtgtagcccatgaggtggcaagaaatgggctacattttctaccccagaaaactacgatagcccttatgaaacttaagggtcgaaggtggatttagcagtaaactgagagtagagtgcttagttgaacagggccctgaagcgcgtacacaccgcccgtcaccctcctcaagtatacttcaaaggacatttaactaaaacccctacgcatttatatagaggagacaagtcgtaacatggtaagtgtactggaaagtgcacttggacgaaccagagtgtagcttaacacaaagcacccaacttacacttaggagatttcaacttaacttgaccgctctgagctaaacctagccccaaacccactccaccttactaccagacaaccttagccaaaccatttacccaaataaagtataggcgatagaaattgaaacctggcgcaatagatatagtaccgcaagggaaagatgaaaaattataaccaagcataatatagcaaggactaacccctataccttctgcataatgaattaactagaaataactttgcaaggagagccaaagctaagacccccgaaaccagacgagctacctaagaacagctaaaagagcacacccgtctatgtagcaaaatagtgggaagatttataggtagaggcgacaaacctaccgagcctggtgatagctggttgtccaagatagaatcttagttcaactttaaatttgcccacagaaccctctaaatccccttgtaaatttaactgttagtccaaagaggaacagctctttggacactaggaaaaaaccttgtagagagagtaaaaaatttaacacccatagtaggcctaaaagcagccaccaattaagaaagcgttcaagctcaacacccactacctaaaaaatcccaaacatataactgaactcctcacacccaattggaccaatctatcaccctatagaagaactaatgttagtataagtaacatgaaaacattctcctccgcataagcctgcgtcagattaaaacactgaactgacaattaacagcccaatatccacaatcaaccaacaagtcattattaccctcactgtcaacccaacacaggcatgctcataaggaaaggttaaaaaaagtaaaaggaactcggcaaatcttaccccgcctgtttaccaaaaacatcacctctagcatcaccagtattagaggcaccgcctgcccagtgacacatgtttaacggccgcggtaccctaaccgtgcaaaggtagcataatcacttgttccttaaatagggacctgtatgaatggctccacgagggttcagctgtctcttacttttaaccagtgaaattgacctgcccgtgaagaggcgggcatgacacagcaagacgagaagaccctatggagctttaatttattaatgcaaacagtacctaacaaacccacaggtcctaaactaccaaacctgcattaaaaatttcggttggggcgacctcggagcagaacccaacctccgagcagtacatgctaagacttcaccagtcaaagcgaactactatactcaattgatccaataacttgaccaacggaacaagttaccctagggataacagcgcaatcctattctagagtccatatcaacaatagggtttacgacctcgatgttggatcaggacatcccaatggtgcagccgctattaaaggttcgtttgttcaacgattaaagtcctacgtgatctgagttcagaccggagtaatccaggtcggtttctatctacnttcaaattcctccctgtacgaaaggacaagagaaataaggcctacttcacaaagcgccttcccccgtaaatgatatcatctcaacttagtattatacccacacccacccaagaacagggtttgttaagatggcagagcccggtaatcgcataaaacttaaaactttacagtcagaggttcaattcctcttcttaacaacatacccatggccaacctcctactcctcattgtacccattctaatcgcaatggcattcctaatgcttaccgaacgaaaaattctaggctatatacaactacgcaaaggccccaacgttgtaggcccctacgggctactacaacccttcgctgacgccataaaactcttcaccaaagagcccctaaaacccgccacatctaccatcaccctctacatcaccgccccgaccttagctctcaccatcgctcttctactatgaacccccctccccatacccaaccccctggtcaacctcaacctaggcctcctatttattctagccacctctagcctagccgtttactcaatcctctgatcagggtgagcatcaaactcaaactacgccctgatcggcgcactgcgagcagtagcccaaacaatctcatatgaagtcaccctagccatcattctactatcaacattactaataagtggctcctttaacctctccacccttatcacaacacaagaacacctctgattactcctgccatcatgacccttggccataatatgatttatctccacactagcagagaccaaccgaacccccttcgaccttgccgaaggggagtccgaactagtctcaggcttcaacatcgaatacgccgcaggccccttcgccctattcttcatagccgaatacacaaacattattataataaacaccctcaccactacaatcttcctaggaacaacatatgacgcactctcccctgaactctacacaacatattttgtcaccaagaccctacttctaacctccctgttcttatgaattcgaacagcatacccccgattccgctacgaccaactcatacacctcctatgaaaaaacttcctaccactcaccctagcattacttatatgacatgtctccatacccattacaatctccagcattccccctcaaacctaagaaatatgtctgataaaagagttactttgatagagtaaataataggagcttaaacccccttatttctaggactatgagaatcgaacccatccctgagaatccaaaattctccgtgccacctatcacaccccatcctaaagtaaggtcagctaaataagctatcgggcccataccccgaaaatgttggttatacccttcccgtactaattaatcccctggcccaacccgtcatctactctaccatctttgcaggcacactcatcacagcgctaagctcgcactgattttttacctgagtaggcctagaaataaacatgctagcttttattccagttctaaccaaaaaaataaaccctcgttccacagaagctgccatcaagtatttcctcacgcaagcaaccgcatccataatccttctaatagctatcctcttcaacaatatactctccggacaatgaaccataaccaatactaccaatcaatactcatcattaataatcataatggctatagcaataaaactaggaatagccccctttcacttctgagtcccagaggttacccaaggcacccctctgacatccggcctgcttcttctcacatgacaaaaactagcccccatctcaatcatataccaaatctctccctcactaaacgtaagccttctcctcactctctcaatcttatccatcatagcaggcagttgaggtggattaaaccaaacccagctacgcaaaatcttagcatactcctcaattacccacataggatgaataatagcagttctaccgtacaaccctaacataaccattcttaatttaactatttatattatcctaactactaccgcattcctactactcaacttaaactccagcaccacgaccctactactatctcgcacctgaaacaagctaacatgactaacacccttgattccatccaccctcctctccctaggaggcctgcccccgctaaccggctttttgcccaaatgggccattatcgaagaattcacaaaaaacaatagcctcatcatccccaccatcatagccaccatcaccctccttaacctctacttctacctacgcctaatctactccacctcaatcacactactccccatatctaacaacgtaaaaataaaatgacagtttgaacatacaaaacccaccccattcctccccacactcatcgcccttaccacgctactcctacctatctccccttttatactaataatcttatagaaatttaggttaaatacagaccaagagccttcaaagccctcagtaagttgcaatacttaatttctgtaacagctaaggactgcaaaaccccactctgcatcaactgaacgcaaatcagccactttaattaagctaagcccttactagaccaatgggacttaaacccacaaacacttagttaacagctaagcaccctaatcaactggcttcaatctacttctcccgccgccgggaaaaaaggcgggagaagccccggcaggtttgaagctgcttcttcgaatttgcaattcaatatgaaaatcacctcggagctggtaaaaagaggcctaacccctgtctttagatttacagtccaatgcttcactcagccattttacctcacccccactgatgttcgccgaccgttgactattctctacaaaccacaaagacattggaacactatacctattattcggcgcatgagctggagtcctaggcacagctctaagcctccttattcgagccgagctgggccagccaggcaaccttctaggtaacgaccacatctacaacgttatcgtcacagcccatgcatttgtaataatcttcttcatagtaatacccatcataatcggaggctttggcaactgactagttcccctaataatcggtgcccccgatatggcgtttccccgcataaacaacataagcttctgactcttacctccctctctcctactcctgctcgcatctgctatagtggaggccggagcaggaacaggttgaacagtctaccctcccttagcagggaactactcccaccctggagcctccgtagacctaaccatcttctccttacacctagcaggtgtctcctctatcttaggggccatcaatttcatcacaacaattatcaacataaaaccccctgccataacccaataccaaacgcccctcttcgtctgatccgtcctaatcacagcagtcctacttctcctatctctcccagtcctagctgctggcatcactatactactaacagaccgcaacctcaacaccaccttcttcgaccccgccggaggaggagaccccattctataccaacacctattctgatttttcggtcaccctgaagtttatattcttatcctaccaggcttcggaataatctcccatattgtaacttactactccggaaaaaaagaaccatttggatacataggtatggtctgagctatgatatcaattggcttcctagggtttatcgtgtgagcacaccatatatttacagtaggaatagacgtagacacacgagcatatttcacctccgctaccataatcatcgctatccccaccggcgtcaaagtatttagctgactcgccacactccacggaagcaatatgaaatgatctgctgcagtgctctgagccctaggattcatctttcttttcaccgtaggtggcctgactggcattgtattagcaaactcatcactagacatcgtactacacgacacgtactacgttgtagctcacttccactatgtcctatcaataggagctgtatttgccatcataggaggcttcattcactgatttcccctattctcaggctacaccctagaccaaacctacgccaaaatccatttcactatcatattcatcggcgtaaatctaactttcttcccacaacactttctcggcctatccggaatgccccgacgttactcggactaccccgatgcatacaccacatgaaacatcctatcatctgtaggctcattcatttctctaacagcagtaatattaataattttcatgatttgagaagccttcgcttcgaagcgaaaagtcctaatagtagaagaaccctccataaacctggagtgactatatggatgccccccaccctaccacacattcgaagaacccgtatacataaaatctagacaaaaaaggaaggaatcgaaccccccaaagctggtttcaagccaaccccatggcctccatgactttttcaaaaaggtattagaaaaaccatttcataactttgtcaaagttaaattataggctaaatcctatatatcttaatggcacatgcagcgcaagtaggtctacaagacgctacttcccctatcatagaagagcttatcacctttcatgatcacgccctcataatcattttccttatctgcttcctagtcctgtatgcccttttcctaacactcacaacaaaactaactaatactaacatctcagacgctcaggaaatagaaaccgtctgaactatcctgcccgccatcatcctagtcctcatcgccctcccatccctacgcatcctttacataacagacgaggtcaacgatccctcccttaccatcaaatcaattggccaccaatggtactgaacctacgagtacaccgactacggcggactaatcttcaactcctacatacttcccccattattcctagaaccaggcgacctgcgactccttgacgttgacaatcgagtagtactcccgattgaagcccccattcgtataataattacatcacaagacgtcttgcactcatgagctgtccccacattaggcttaaaaacagatgcaattcccggacgtctaaaccaaaccactttcaccgctacacgaccgggggtatactacggtcaatgctctgaaatctgtggagcaaaccacagtttcatgcccatcgtcctagaattaattcccctaaaaatctttgaaatagggcccgtatttaccctatagcaccccctctaccccctctagagcccactgtaaagctaacttagcattaaccttttaagttaaagattaagagaaccaacacctctttacagtgaaatgccccaactaaatactaccgtatggcccaccataattacccccatactccttacactattcctcatcacccaactaaaaatattaaacacaaactaccacctacctccctcaccaaagcccataaaaataaaaaattataacaaaccctgagaaccaaaatgaacgaaaatctgttcgcttcattcattgcccccacaatcctaggcctacccgccgcagtactgatcattctatttccccctctattgatccccacctccaaatatctcatcaacaaccgactaatcaccacccaacaatgactaatcaaactaacctcaaaacaaatgataaccatacacaacactaaaggacgaacctgatctcttatactagtatccttaatcatttttattgccacaactaacctcctcggactcctgcctcactcatttacaccaaccacccaactatctataaacctagccatggccatccccttatgagcgggcgcagtgattataggctttcgctctaagattaaaaatgccctagcccacttcttaccacaaggcacacctacaccccttatccccatactagttattatcgaaaccatcagcctactcattcaaccaatagccctggccgtacgcctaaccgctaacattactgcaggccacctactcatgcacctaattggaagcgccaccctagcaatatcaaccattaaccttccctctacacttatcatcttcacaattctaattctactgactatcctagaaatcgctgtcgccttaatccaagcctacgttttcacacttctagtaagcctctacctgcacgacaacacataatgacccaccaatcacatgcctatcatatagtaaaacccagcccatgacccctaacaggggccctctcagccctcctaatgacctccggcctagccatgtgatttcacttccactccataacgctcctcatactaggcctactaaccaacacactaaccatataccaatgatggcgcgatgtaacacgagaaagcacataccaaggccaccacacaccacctgtccaaaaaggccttcgatacgggataatcctatttattacctcagaagtttttttcttcgcaggatttttctgagccttttaccactccagcctagcccctaccccccaattaggagggcactggcccccaacaggcatcaccccgctaaatcccctagaagtcccactcctaaacacatccgtattactcgcatcaggagtatcaatcacctgagctcaccatagtctaatagaaaacaaccgaaaccaaataattcaagcactgcttattacaattttactgggtctctattttaccctcctacaagcctcagagtacttcgagtctcccttcaccatttccgacggcatctacggctcaacattttttgtagccacaggcttccacggacttcacgtcattattggctcaactttcctcactatctgcttcatccgccaactaatatttcactttacatccaaacatcactttggcttcgaagccgccgcctgatactggcattttgtagatgtggtttgactatttctgtatgtctccatctattgatgagggtcttactcttttagtataaatagtaccgttaacttccaattaactagttttgacaacattcaaaaaagagtaataaacttcgccttaattttaataatcaacaccctcctagccttactactaataattattacattttgactaccacaactcaacggctacatagaaaaatccaccccttacgagtgcggcttcgaccctatattccccgcccgcgtccctttctccataaaattcttcttagtagctattaccttcttattatttgatctagaaattgccctccttttacccctaccatgagccctacaaacaactaacctgccactaatagttatgtcatccctcttattaatcatcatcctagccctaagtctggcctatgagtgactacaaaaaggattagactgagccgaattggtatatagtttaaacaaaacgaatgatttcgactcattaaattatgataatcatatttaccaaatgcccctcatttacataaatattatactagcatttaccatctcacttctaggaatactagtatatcgctcacacctcatatcctccctactatgcctagaaggaataatactatcgctgttcattatggctactctcataaccctcaacacccactccctcttagccaatattgtgcctattgccatactagtctttgccgcctgcgaagcagcggtgggcctagccctactagtctcaatctccaacacatatggcctagactacgtacataacctaaacctactccaatgctaaaactaatcgtcccaacaattatattactaccactgacatgactttccaaaaaacacataatttgaatcaacacaaccacccacagcctaattattagcatcatccctctactattttttaaccaaatcaacaacaacctatttagctgttccccaaccttttcctccgaccccctaacaacccccctcctaatactaactacctgactcctacccctcacaatcatggcaagccaacgccacttatccagtgaaccactatcacgaaaaaaactctacctctctatactaatctccctacaaatctccttaattataacattcacagccacagaactaatcatattttatatcttcttcgaaaccacacttatccccaccttggctatcatcacccgatgaggcaaccagccagaacgcctgaacgcaggcacatacttcctattctacaccctagtaggctcccttcccctactcatcgcactgatttacactcacaacaccctaggctcactaaacattctactactcactctcactgcccaagaactatcaaactcctgagccaacaacttaatatgactagcttacacaatagcttttatagtaaagatacctctttacggactccacttatgactccctaaagcccatgtcgaagcccccatcgctgggtcaatagtacttgccgcagtactcttaaaactaggcggctatggtataatacgcctcacactcattctcaaccccctgacaaaacacatagcctaccccttccttgtactatccctatgaggcataattataacaagctccatctgcctacgacaaacagacctaaaatcgctcattgcatactcttcaatcagccacatagccctcgtagtaacagccattctcatccaaaccccctgaagcttcaccggcgcagtcattctcataatcgcccacggacttacatcctcattactattctgcctagcaaactcaaactacgaacgcactcacagtcgcatcataatcctctctcaaggacttcaaactctactcccactaatagctttttgatgacttctagcaagcctcgctaacctcgccttaccccccactattaacctactgggagaactctctgtgctagtaaccacgttctcctgatcaaatatcactctcctacttacaggactcaacatactagtcacagccctatactccctctacatatttaccacaacacaatggggctcactcacccaccacattaacaacataaaaccctcattcacacgagaaaacaccctcatgttcatacacctatcccccattctcctcctatccctcaaccccgacatcattaccgggttttcctcttgtaaatatagtttaaccaaaacatcagattgtgaatctgacaacagaggcttacgaccccttatttaccgagaaagctcacaagaactgctaactcatgcccccatgtctaacaacatggctttctcaacttttaaaggataacagctatccattggtcttaggccccaaaaattttggtgcaactccaaataaaagtaataaccatgcacactactataaccaccctaaccctgacttccctaattccccccatccttaccaccctcgttaaccctaacaaaaaaaactcatacccccattatgtaaaatccattgtcgcatccacctttattatcagtctcttccccacaacaatattcatgtgcctagaccaagaagttattatctcgaactgacactgagccacaacccaaacaacccagctctccctaagcttcaaactagactacttctccataatattcatccctgtggcattgttcgttacatggtccatcatagaattctcactgtgatatataaactcagacccaaacattaatcagttcttcaaatatctactcatcttcctaattaccatactaatcttagttaccgctaacaacctattccaactgttcatcggctgagagggcgtaggaattatatccttcttgctcatcagttgatgatacgcccgagcagatgccaacacagcagccattcaagcaatcctatacaaccgtatcggcgatatcggtttcatcctcgccttagcatgatttatcctacactccaactcatgagacccacaacaaatagcccttctaaacgctaatccaagcctcaccccactactaggcctcctcctagcagcagcaggcaaatcagcccaattaggtctccacccctgactcccctcagccatagaaggccccaccccagtctcagccctactccactcaagcactatagttgtagcaggaatcttcttactcatccgcttccaccccctagcagaaaatagcccactaatccaaactctaacactatgcttaggcgctatcaccactctgttcgcagcagtctgcgcccttacacaaaatgacatcaaaaaaatcgtagccttctccacttcaagtcaactaggactcataatagttacaatcggcatcaaccaaccacacctagcattcctgcacatctgtacccacgccttcttcaaagccatactatttatgtgctccgggtccatcatccacaaccttaacaatgaacaagatattcgaaaaataggaggactactcaaaaccatacctctcacttcaacctccctcaccattggcagcctagcattagcaggaatacctttcctcacaggtttctactccaaagaccacatcatcgaaaccgcaaacatatcatacacaaacgcctgagccctatctattactctcatcgctacctccctgacaagcgcctatagcactcgaataattcttctcaccctaacaggtcaacctcgcttccccacccttactaacattaacgaaaataaccccaccctactaaaccccattaaacgcctgacagccggaagcctattcgcaggatttctcattactaacaacatttcccccgcatcccccttccaaacaacaatccccctctacctaaaactcacagccctcgctgtcactttcctaggacttctaacagccctagacctcaactacctaaccaacaaacttaaaataaaatccccactatgcacattttatttctccaacatactcggattctaccctagcatcacacaccgcacaatcccctatctaggccttcttacgagccaaaacctgcccctactcctcctagacctaacctgactagaaaagctattacctaaaacaatttcacagcaccaaatctccacctccatcatcacctcaacccaaaaaggcataattaaactttacttcctctctttcttcttcccactcatcctaaccctactcctaatcacataacctattcccccgagcaatctcaattacaatatatacaccaacaaacaatgttcaaccagtaactactactaatcaacgcccataatcatacaaagcccccgcaccaataggatcctcccgaatcaaccctgacccctctccttcataaattattcagcttcctacactattaaagtttaccacaaccaccaccccatcatactctttcacccacagcaccaatcctacctccatcgctaaccccactaaaacactcaccaagacctcaacccctgacccccatgcctcaggatactcctcaatagccatcgctgtagtatatccaaagacaaccatcattccccctaaataaattaaaaaaactattaaacccatataacctcccccaaaattcagaataataacacacccgaccacaccgctaacaatcaatactaaacccccataaataggagaaggcttagaagaaaaccccacaaaccccattactaaacccacactcaacagaaacaaagcatacatcattattctcgcacggactacaaccacgaccaatgatatgaaaaaccatcgttgtatttcaactacaagaacaccaatgaccccaatacgcaaaattaaccccctaataaaattaattaaccactcactcatcgacctccccaccccatccaacatctccgcatgatgaaacttcggctcactccttggcgcctgcctgatcctccaaatcaccacaggactattcctagccatgcactactcaccagacgcctcaaccgccttttcatcaatcgcccacatcactcgagacgtaaattatggctgaatcatccgctaccttcacgccaatggcgcctcaatattctttatctgcctcttcctacacatcgggcgaggcctatattacggatcatttctctactcagaaacctgaaacatcggcattatcctcctgcttgcaactatagcaacagccttcataggctatgtcctcccgtgaggccaaatatcattctgaggggccacagtaattacaaacttactatccgccatcccatacattgggacagacctagttcaatgaatctgaggaggctactcagtagacagtcccaccctcacacgattctttacctttcacttcatcttgcccttcattattgcagccctagcagcactccacctcctattcttgcacgaaacgggatcaaacaaccccctaggaatcacctcccattccgataaaatcaccttccacccttactacacaatcaaagacgccctcggcttacttctcttcattctctccttaatgacattaacactattctcaccagacctcctaggcgacccagacaattataccctagccaaccccttaaacacccctccccacatcaagcccgaatgatatttcctattcgcctacacaattctccgatccgtccctaacaaactaggaggcgtccttgccctattactatccatcctcatcctagcaataatccccatcctccatatatccaaacaacaaagcataatatttcgcccactaagccaatcactttattgactcctagccgcagacctcctcattctaacctgaatcggaggacaaccagtaagctacccttttaccatcattggacaagtagcatccgtactatacttcacaacaatcctaatcctaataccaactatctccctaattgaaaacaaaatactcaaatgggcctgtccttgtagtataaactaatacaccagtcttgtaaaccggagatgaaaacctttttccaaggacaaatcagagaaaaagtctttaactccaccattagcacccaaagctaagattctaatttaaactattctctgttctttcatggggaagcagatttgggtaccacccaagtattgacttacccatcaacaaccgctatgtatttcgtacattactgccagccaccatgaatattgcacggtaccataaatacttgaccacctgtagtacataaaaacccaatccacatcaaaaccccctccccatgcttacaagcaagtacagcaatcaaccctcaactatcacacatcaactgcaactccaaagccacccctcacccactaggataccaacaaacctacccacccttaacagtacatagtacataaagccatttaccgtacatagcacattacagtcaaatcccttctcgtccccatggatgacccccctcagataggggtcccttgaccaccatcctccgtgaaatcaatatcccgcacaagagtgctactctcctcgctccgggcccataacacttgggggtagctaaagtgaactgtatccgacatctggttcctacttcagggtcataaagcctaaatagcccacacgttccccttaaataagacatcacgatg

SEQ ID NO: 154 - DNA, 16570 bp, Homo sapiens mitochondrial
  3108: "n" refers to a nucleotide at position 3107 of the Cambridge Reference Sequence (CRS, Anderson et al. 1981 Nature 290:457-465), later determined to be absent from the human mtDNA sequence according to the revised CRS (rCRS, Andrews et al. 1999 Nature Genetics 23:147); "n" therefore represents a single nucleotide deletion at a position corresponding to nucleotide 3107 of SEQ ID NO:1 as provided herein.
gatcacaggtctatcaccctattaaccactcacgggagctctccatgcatttggtattttcgtctggggggtgtgcacgcgatagcattgcgagacgctggagccggagcaccctatgtcgcagtatctgtctttgattcctgccccattctattatttatcgcacctacgttcaatattataggcgaacatacttactaaagtgtgttaattaattaatgcttgtaggacataataataacaattgaatgtctgcacagccgctttccacacagacatcataacaaaaaatttccaccaaaccccccctcccccgccttctggccacagcacttaaacacatctctgccaaaccccaaaaacaaagaaccctaacaccagcctaaccagatttcaaattttatcttttggcggtatgcacttttaacagtcaccccccaactaacacattattttcccctcccactcccatgctactagtctcatcaatacaacccccgcccatcctacccagcacacacacaccgctgctaaccccataccccgaaccaaccaaaccccaaagacatcccccacagtttatgtagcttacctcctcaaagcaatacactgaaaatgtttagacgggctcacatcaccccataaacaaataggtttggtcctagcctttctattagctcttagtaagattacacatgcaagcatccccgttccagtgaattcaccctctaaatcaccacgatcaaaagggacaagcatcaagcacgcaacaatgcagctcaaaacgcttagcctagccacacccccacgggaaacagcagtgattaacctttagcaataaacgaaagtttaactaagctatactaaccccagggttggtcaatttcgtgccagccaccgcggtcacacgattaacccaagtcaatagaagccggcgtaaagagtgttttagattaccccctccccaataaagctaaaactcacctgagttgtaaaaaactccagttgacacaaaataaactacgaaagtggctttaacatatctgaacacacaatagctaagacccaaactgggattagataccccactatgcttagccctaaacctcaacagttaaatcaacaaaactgctcgccagaacactacgagccacagcttaaaactcaaaggacctggcggtgcttcatatccctctagaggagcctgttctataatcgataaaccccgatcaacctcaccacctcttgctcagcctatataccgccatcttcagcaaaccctgatgaaggctacaaagtaagcgcaagtacccacgtaaagacgttaggtcaaggtgtagcccatgaggtggcaagaaatgggctacattttctaccccagaaaactacgatagcccttatgaaacttaagggtcgaaggtggatttagcagtaaactgagagtagagtgcttagttgaacagggccctgaagcgcgtacacaccgcccgtcaccctcctcaagtatacttcaaaggacatttaactaaaacccctacgcatttatatagaggagacaagtcgtaacatggtaagtgtactggaaagtgcacttggacgaaccagagtgtagcttaacacaaagcacccaacttacacttaggagatttcaacttaacttgaccgctctgagctaaacctagccccaaacccactccaccttactaccagacaaccttagccaaaccatttacccaaataaagtataggcgatagaaattgaaacctggcgcaatagatatagtaccgcaagggaaagatgaaaaattataaccaagcataatatagcaaggactaacccctataccttctgcataatgaattaactagaaataactttgcaaggagagccaaagctaagacccccgaaaccagacgagctacctaagaacagctaaaagagcacacccgtctatgtagcaaaatagtgggaagatttataggtagaggcgacaaacctaccgagcctggtgatagctggttgtccaagatagaatcttagttcaactttaaatttgcccacagaaccctctaaatccccttgtaaatttaactgttagtccaaagaggaacagctctttggacactaggaaaaaaccttgtagagagagtaaaaaatttaacacccatagtaggcctaaaagcagccaccaattaagaaagcgttcaagctcaacacccactacctaaaaaatcccaaacatataactgaactcctcacacccaattggaccaatctatcaccctatagaagaactaatgttagtataagtaacatgaaaacattctcctccgcataagcctgcgtcagattaaaacactgaactgacaattaacagcccaatatctacaatcaaccaacaagtcattattacccccactgtcaacccaacacaggcatgctcataaggaaaggttaaaaaaagtaaaaggaactcggcaaatcttaccccgcctgtttaccaaaaacatcacctctagcatcaccagtattagaggcaccgcctgcccagtgacacatgtttaacggccgcggtaccctaaccgtgcaaaggtagcataatcacttgttccttaaatagggacctgtatgaatggctccacgagggttcagctgtctcttacttttaaccagtgaaattgacctgcccgtgaagaggcgggcatgacacagcaagacgagaagaccctatggagctttaatttattaatgcaaacagtacctaacaaacccacaggtcctaaactaccaaacctgcattaaaaatttcggttggggcgacctcggagcagaacccaacctccgagcagtacatgctaagacttcaccagtcaaagcgaactactatactcaattgatccaataacttgaccaacggaacaagttaccctagggataacagcgcaatcctattctagagtccatatcaacaatagggtttacgacctcgatgttggatcaggacatcccgatggtgcagccgctattaaaggttcgtttgttcaacgattaaagtcctacgtgatctgagttcagaccggagtaatccaggtcggtttctatctacnttcaaattcctccctgtacgaaaggacaagagaaataaggcctacttcacaaagcgccttcccccgtaaatgatatcatctcaacttagtattatacccacacccacccaagaacagggtttgttaagatggcagagcccggtaatcgcataaaacttaaaactttacagtcagaggttcaattcctcttcttaacaacatacccatgaccaacctcctactcctcattgtacccattctaatcgcaatggcattcctaatgcttaccgaacgaaaaattctaggctatatacaactacgcaaaggccccaacgttgtaggcccctacgggctactacaacccttcgctgacgccataaaactcttcaccaaagagcccctaaaacccgccacatctaccatcaccctctacatcaccgccccgaccttggctctcaccatcgctcttctactatgaacccccctccccatacccaaccccctggttaacctcaacctaggcctcctatttattctagccacctctagcctagccgtttactcaatcctctgatcagggtgagcatcaaactcaaactacgccctgatcggcgcactgcgagcagtagcccaaacaatctcatatgaagtcaccctagccatcattctactatcaacattactaataagtggctcctttaacctctccacccttatcacaacacaagaacacctctgattactcctgccatcatgacccttggccataatatgatttatctccacactagcagagaccaaccgaacccccttcgaccttgccgaaggggagtccgaactagtctcaggcttcaacatcgaatacgccgcaggccccttcgccctattcttcatagccgaatacacaaacattattataataaacaccctcaccactacaatcttcctaggaacaacatatgacgcactctcccctgaactctacacaacatattttgtcaccaagaccctacttctgacctccctgttcttatgaattcgaacagcatacccccgattccgctacgaccaactcatacacctcctatgaaaaaacttcctaccactcaccctagcattacttatatgatatgtctccatacccattacaatctccagcattccccctcaaacctaagaaatatgtctgataaaagagttactttgatagagtaaataataggagcttaaacccccttatttctaggactatgagaatcgaacccatccctgagaatccaaaattctccgtgccacctatcacaccccatcctaaagtaaggtcagctaaataagctatcgggcccataccccgaaaatgttggttatacccttcccgtactaattaatcccctggcccaacccgtcatctactctaccatctttgcaggcacactcatcacagcgctaagctcgcactgattttttacctgagtgggcctagaaataaacatgctagcttttattccagttctaaccaaaaaaataaaccctcgttccacagaagctgccatcaagtatttcctcacgcaagcaaccgcatccataatccttctaatagctatcctcttcaacaatatactctccggacaatgaaccataaccaatactaccaatcaatactcatcattaataatcataatggctatagcaataaaactaggaatagccccctttcacttctgagtcccagaggttacccaaggcacccctctgacatccggcctgcttcttctcacatgacaaaaactagcccccatctcaatcatataccaaatctctccctcactaaacgtaagccttctcctcactctctcaatcttatccatcatagcaggcagttgaggtggattaaaccaaacccagctacgcaaaatcttagcatactcctcaattacccacataggatgaataatagcagttctaccgtacaaccctaacattaccattcttaatttaactatttatattatcctaactactaccgcattcctactactcaacttaaactccagcaccacgaccctactactatctcgcacctgaaacaagctaacatgactaacacccttaattccatccaccctcctctccctaggaggcctgcccccgctaaccggctttttgcccaaatgggccattatcgaagaattcacaaaaaacaatagcctcatcatccccaccatcatagccaccatcaccctccttaacctctacttctacctacgcctaatctactccacctcaatcacactactccccatatctaacaacgtaaaaataaaatgacagtttgaacatacaaaacccaccccattcctccccacactcatcgcccttaccacgctactcctacctatctccccttttatactaataatcttatagaaatttaggttaaatacagaccaagagccttcaaagccctcagtaagttgcaatacttaatttctgtaacagctaaggactgcaaaaccccactctgcatcaactgaacgcaaatcagccactttaattaagctaagcccttactagaccaatgggacttaaacccacaaacacttagttaacagctaagcaccctaatcaactggcttcaatctacttctcccgccgccgggaaaaaaggcgggagaagccccggcaggtttgaagctgcttcttcgaatttgcaattcaatatgaaaatcacctcggagctggtaaaaagaggcctaacccctgtctttagatttacagtccaatgcttcactcagccattttacctcacccccactgatgttcgccgaccgttgactattctctacaaaccacaaagacattggaacactatacctattattcggcgcatgagctggagtcctaggcacagctctaagcctccttatccgagccgagctgggccagccaggcaaccttctaggtaacgaccacatctacaacgttatcgtcacagcccatgcatttgtaataatcttcttcatagtaatacccatcataatcggaggctttggcaactgactagttcccctaataatcggtgcccccgatatggcgtttccccgcataaacaacataagcttctgactcttacccccctctctcctactcctgctcgcatctgctatagtggaggccggagcaggaacaggttgaacagtctaccctcccttagcagggaactactcccaccctggagcctccgtagacctaaccatcttctccttacacctagcaggtgtctcctctatcttaggggccatcaatttcatcacaacaattatcaatataaaaccccctgccataacccaataccaaacgcccctcttcgtctgatccgtcctaatcacagcagtcctacttctcctatctctcccagtcctagctgctggcatcactatactactaacagaccgcaacctcaacaccaccttcttcgaccccgccggaggaggagaccccattctataccaacacctattctgatttttcggtcaccctgaagtttatattcttatcctaccaggcttcggaataatctcccatattgtaacttactactccggaaaaaaagaaccatttggatacataggtatggtctgagctatgatatcaattggcttcctagggtttatcgtgtgagcacaccatatatttacagtaggaatagacgtagacacacgagcatatttcacctccgctaccataatcatcgctatccccaccggcgtcaaagtatttagctgactcgccacactccacggaagcaatatgaaatgatctgctgcagtgctctgagccctaggattcatctttcttttcaccgtaggtggcctgactggcattgtattagcaaactcatcactagacatcgtactacacgacacgtactacgttgtagctcacttccactatgtcctatcaataggagctgtatttgccatcataggaggcttcattcactgatttcccctattctcaggctacaccctagaccaaacctacgccaaaatccatttcactatcatattcatcggcgtaaatctaactttcttcccacaacactttctcggcctatccggaatgccccgacgttactcggactaccccgatgcatacaccacatgaaatatcctatcatctgtaggctcattcatttctctaacagcagtaatattaataattttcatgatttgagaagccttcgcttcgaagcgaaaagtcctaatagtagaagaaccctccataaacctggagtgactatatggatgccccccaccctaccacacattcgaagaacccgtatacataaaatctagacaaaaaaggaaggaatcgaaccccccaaagctggtttcaagccaaccccatggcctccatgactttttcaaaaagatattagaaaaaccatttcataactttgtcaaagttaaattataggctaaatcctatatatcttaatggcacatgcagcgcaagtaggtctacaagacgctacttcccctatcatagaagagcttatcacctttcatgatcacgccctcataatcattttccttatctgcttcctagtcctgtatgcccttttcctaacactcacaacaaaactaactaatactaacatctcagacgctcaggaaatagaaaccgtctgaactatcctgcccgccatcatcctagtcctcatcgccctcccatccctacgcatcctttacataacagacgaggtcaacgatccctcccttaccatcaaatcaattggccaccaatggtactgaacctacgagtacaccgactacggcggactaatcttcaactcctacatacttcccccattattcctagaaccaggcgacctgcgactccttgacgttgacaatcgagtagtactcccgattgaagcccccattcgtataataattacatcacaagacgtcttgcactcatgagctgtccccacattaggcttaaaaacagatgcaattcccggacgtctaaaccaaaccactttcaccgctacacgaccgggggtatactacggtcaatgctctgaaatctgtggagcaaaccacagtttcatacccatcgtcctagaattaattcccctaaaaatctttgaaatagggcccgtatttaccctatagcaccccctctaccccctctagagcccactgtaaagctaacttagcattaaccttttaagttaaagattaagagaaccaacacctctttacagtgaaatgccccaactaaataccaccgtatggcccaccataattacccccatactccttacactattcctcatcacccaactaaaaatattaaacacaaactaccacctacctccctcaccaaagcccataaaaataaaaaattataacaaaccctgagaaccaaaatgaacgaaaatctgttcgcttcattcattgcccccacaatcctaggcctacccgccgcagtactgatcattctatttccccctctattgatccccacctccaaatatctcatcaacaaccgactaatcaccacccaacaatgactaatcaaactaacctcaaaacaaatgatagccatacacaacactaaaggacgaacctgatctcttatactagtatccttaatcatttttattgccacaactaacctcctcggactcctgcctcactcatttacaccaaccacccaactatctataaacctagccatggccatccccttatgagcgggcgcagtgattataggctttcgctctaagattaaaaatgccctagcccacttcttaccacaaggcacacctacaccccttatccccatactagttattatcgaaaccatcagcctactcattcaaccaatagccctggccgtacgcctaaccgctaacattactgcaggccacctactcatgcacctaattggaagcgccaccctagcaatatcaaccattaaccttccctctacacttatcatcttcacaattctaattctactgactatcctagaaatcgctgtcgccttaatccaagcctacgttttcacacttctagtaagcctctacctgcacgacaacacataatgacccaccaatcgcatgcctatcatatagtaaaacccagcccatgacccctaacaggggccctctcagccctcctaatgacctccggcctagccatgtgatttcacttccactccataacgctcctcatactaggcctactaaccaacacactaaccatataccaatggtggcgcgatgtaacacgagaaagcacataccaaggccaccacacaccacctgtccaaaaaggccttcgatacgggataatcctatttattacctcagaagtttttttcttcgcaggatttttctgagccttttaccactccagcctagcccctaccccccaactaggagggcactggcccccaacaggcatcaccccgctaaatcccctagaagtcccactcctaaacacatccgtattactcgcatcaggagtatcaatcacctgagctcaccatagtctaatagaaaacaaccgaaaccaaataattcaagcactgcttattacaattttactgggtctctattttaccctcctacaagcctcagagtacttcgagtctcccttcaccatttccgacggcatctacggctcaacattttttgtagccacaggcttccacggacttcacgtcattattggctcaactttcctcactatctgcttcatccgccaactaatatttcactttacatccaaacatcactttggcttcgaagccgccgcctgatactggcattttgtagatgtggtttgactatttctgtatgtctctatctattgatgagggtcttactcttttagtataaatagtaccgttaacttccaattaactagttttgacaacattcaaaaaagagtaataaacttcgccttaattttaataatcaacaccctcctagccttactactaataatcattacattttgactaccacaactcaacggctacatagaaaaatccaccccttacgagtgcggcttcgaccctatatcccccgcccgcgtccctttctccataaaattcttcttagtagctattaccttcttattatttgatctagaaattgccctccttttacccctaccatgagccctacaaacaactaacctgccactaatagttatgtcatccctcttattaatcatcatcctagccctaagtctggcctatgagtgactacaaaaaggattagactgagccgaattggtatatagtttaaacaaaacgaatgatttcgactcattaaattatgataatcatatttaccaaatgcccctcatttacataaatattatactagcatttaccatctcacttctaggaatactagtatatcgctcacacctcatatcctccctactatgcctagaaggaataatactatcgctgttcattatagctactctcataaccctcaacacccactccctcttagccaatattgtgcctattgccatactagtctttgccgcctgcgaagcagcggtgggcctagccctactagtctcaatctccaacacatatggcctagactacgtacataacctaaacctactccaatgctaaaactaatcgtcccaacaattatattactaccactgacatgactttccaaaaaacacataatttgaatcaacacaaccacccacagcctaattattagcatcatccccctactattttttaaccaaatcaacaacaacctatttagctgttccccaaccttttcctccgaccccctaacaacccccctcctaatactaactacctgactcctacccctcacaatcatggcaagccaacgccacttatccagtgaaccactatcacgaaaaaaactctacctctctatactaatctccctacaaatctccttaattataacattcacagccacagaactaatcatattttatatcttcttcgaaaccacacttatccccaccttggctatcatcacccgatgaggcaaccagccagaacgcctgaacgcaggcacatacttcctattctacaccctagtaggctcccttcccctactcatcgcactaatttacactcacaacaccctaggctcactaaacattctactactcactctcactgcccaagaactatcaaactcctgagccaacaacttaatatgactagcttacacaatagcttttatagtaaagatacctctttacggactccacttatgactccctaaagcccatgtcgaagcccccatcgctgggtcaatagtacttgccgcagtactcttaaaactaggcggctatggtataatacgcctcacactcattctcaaccccctgacaaaacacatagcctaccccttccttgtactatccctatgaggcataattataacaagctccatctgcctacgacaaacagacctaaaatcgctcattgcatactcttcaatcagccacatagccctcgtagtaacagccattctcatccaaaccccctgaagcttcaccggcgcagtcattctcataatcgcccacggacttacatcctcattactattctgcctagcaaactcaaactacgaacgcactcacagtcgcatcataatcctctctcaaggacttcaaactctactcccactaatagctttttgatgacttctagcaagcctcgctaacctcgccttaccccccactattaacctactgggagaactctctgtgctagtaaccacgttctcctgatcaaatatcaccctcctacttacaggactcaacatactagtcacagccctatactccctctacatatttaccacaacacaatggggctcactcacccaccacattaacaacataaaaccctcattcacacgagaaaacaccctcatgttcatacacctatcccccattctcctcctatccctcaaccccgacatcattaccgggttttcctcttgtaaatatagtttaaccaaaacatcagattgtgaatctgacaacagaggctcacgaccccttatttaccgagaaagctcacaagaactgctaactcatgcccccatgtctaacaacatggctttctcaacttttaaaggataacagctatccattggtcttaggccccaaaaattttggtgcaactccaaataaaagtaataaccatgcacactactataaccaccctaaccctgacttccctaattccccccatccttaccaccctcgttaaccctaacaaaaaaaactcatacccccattatgtaaaatccattgtcgcatccacctttattatcagtctcttccccacaacaatattcatgtgcctagaccaagaagttattatctcgaactgacactgagccacaacccaaacaacccagctctccctaagcttcaaactagactacttctccataatattcatccctgtagcattgttcgttacatggtccatcatagaattctcactgtgatatataaactcagacccaaacattaatcagttcttcaaatatctactcattttcctaattaccatactaatcttagttaccgctaacaacctattccaactgttcatcggctgagagggcgtaggaattatatccttcttgctcatcagttgatgatacgcccgagcagatgccaacacagcagccattcaagcaatcctatacaaccgtatcggcgatatcggtttcatcctcgccttagcatgatttatcctacactccaactcatgagacccacaacaaatagcccttctaaacgctaatccaagcctcaccccactactaggcctcctcctagcagcagcaggcaaatcagcccaattaggtctccacccctgactcccctcagccatagaaggccccaccccagtctcagccctactccactcaagcactatagttgtagcaggaatcttcttactcatccgcttccaccccctagcagaaaatagcccactaatccaaactctaacactatgcttaggcgctatcaccactctgttcgcagcagtctgcgcccttacacaaaatgacatcaaaaaaatcgtagccttctccacttcaagtcaactaggactcataatagttacaatcggcatcaaccaaccacacctagcattcctgcacatctgtacccacgccttcttcaaagccatactattcatgtgctccgggtccatcatccacaaccttaacaatgaacaagatattcgaaaaataggaggactactcaaaaccatacctctcacttcaacctccctcaccattggcagcctagcattagcaggaatacctttcctcacaggtttctactccaaagaccacatcatcgaaaccgcaaacatatcatacacaaacgcctgagccctatctattactctcatcgctacctccctaacaagcgcctatagcactcgaataattcttctcaccctaacaggtcagcctcgcttccctacccttactaacattaacgaaaataaccccaccctactaaaccccattaaacgcctgacagccggaagcctattcgcaggatttctcattactaacaacatttcccccgcatcccccttccaaacaacaatccccctctacctaaaactcacagccctcgctgtcactttcctaggacttctaacagccctagacctcaactacctaaccaacaaacttaaaataaaatccccactatgcacattttatttctccaacatactcggattctaccctagcatcacacaccgcacaatcccctatctaggccttcttacgagccaaaacctgcccctactcctcctagacctaacctgactagaaaagctattacctaaaacaatttcacagcaccaaatctccacctccatcatcacctcaacccaaaaaggcataattaaactttacttcctctctttcttcttcccactcatcctaaccctactcctaatcacataacctattcccccgagcaatctcaattacaatatatacaccaacaaacaatgttcaaccagtaactactactaatcaacgcccataatcatacaaagcccccgcaccaataggatcctcccgaatcaaccctgacccctctccttcataaatcattcagcttcctacactattaaagtttaccacaaccaccaccccatcatactctttcacccacagcaccaatcctacctccatcgctaaccccactaaaacactcaccaagacctcaacccctgacccccatgcctcaggatactcctcaatagccatcgctgtagtatatccaaagacaaccatcattccccctaaataaattaaaaaaactattaaacccatataacctcccccaaaattcagaataataacacacccgaccacaccgctaacaatcaatactaaacccccataaataggagaaggcttagaagaaaaccccacaaaccccattactaaacccacactcaacagaaacaaagcatacatcattattctcgcacggactacaaccacgaccaatgatatgaaaaaccatcgttgtatttcaactacaagaacaccaatgaccccaatacgcaaaattaaccccctaataaaattaattaaccactcattcatcgacctccccaccccatccaacatctccgcatgatgaaacttcggctcactccttggcgcctgcctgatcctccaaatcaccacaggactattcctagccatgcactactcaccagacgcctcaaccgccttttcatcaatcgcccacatcactcgagacgtaaattatggctgaatcatccgctaccttcacgccaatggcgcctcaatattctttatctgcctcttcctacacatcgggcgaggcctatattacggatcatttctctactcagaaacctgaaacatcggcattatcctcctgcttgcaactatagcaacagccttcataggctatgtcctcccgtgaggccaaatatcattctgaggggccacagtaattacaaacttactatccgccatcccatacattgggacagacctagttcaatgaatctgaggaggctactcagtagacagtcccaccctcacacgattctttacctttcacttcatcttacccttcattattgcagccctagcagcactccacctcctattcttgcacgaaacgggatcaaacaaccccctaggaatcacctcccattccgataaaatcaccttccacccttactacacaatcaaagacgccctcggcttacttctcttccttctctccttaatgacattaacactattctcaccagacctcctaggcgacccagacaattataccctagccaaccccttaaacacccctccccacatcaagcccgaatgatatttcctattcgcctacacaattctccggtccgtccctaacaaactaggaggcgtccttgccctattactatccatcctcatcctagcaataatccccatcctccatatatccaaacaacaaagcataatattccgcccactaagccaatcactttattgactcctagccacagacctcctcattctaacctgaatcggaggacaaccagtaagctacccttttaccatcattggacaagtagcatccgtactatacttcacaacaatcctaatcctaataccaactatctccctaattgaaaacaaaatactcaaatgggcctgcccttgtagtataaactaatacaccagtcttgtaaaccggagatgaaaacctttttccaaggacaaatcagagaaaaagtctttaactccaccattagcacccaaagctaagattctaatttaaactattctctgttctttcatggggaagcagatttgggtaccacccaagtattgactcacccatcaacaaccgctatgtatttcgtacattactgccagacaccatgaatattgtacggtaccataaatacttaaccacctgtagtacataaaaacccaatccacatcaaaatcccctccccatgcttacaagcaagtacagcaatcaaccttcaactatcacacattaactgcaactccaaagccacccctcacccactaggatatcaacaaacctacctacccttaacagtacatagtacataaagccatttaccgtacatagcacattacagtcaaatcctttctcgtccccatggatgacccccctcagataggagtcccttggtcaccatcctccgtgaaatcaatatcccgcacaagagtgctactctcctcgctccgggcccataacacttgggggtagctaaagtgaactgtatccgacatctggttcctacttcagggccataaagcctaaatagcccacacgttccccttaaataagacatcacgatg

SEQ ID NO: 155 - DNA, 16570 bp, Homo sapiens mitochondrial
  3108: "n" refers to a nucleotide at position 3107 of the Cambridge Reference Sequence (CRS, Anderson et al. 1981 Nature 290:457-465), later determined to be absent from the human mtDNA sequence according to the revised CRS (rCRS, Andrews et al. 1999 Nature Genetics 23:147); "n" therefore represents a single nucleotide deletion at a position corresponding to nucleotide 3107 of SEQ ID NO:1 as provided herein.
gatcacaggtctatcaccctattaaccactcacgggagctctccatgcatttggtattttcgtctggggggtatgcacgcgatagcattgcgagacgctggagccggagcaccctatgtcgcagtatctgtctttgattcctgcctcatcctattatttatcgcacctacgttcaatattacaggcgaacatacttactaaagtgtgttaattaattaatgcttgtaggacataataataacaattgaatgtctgcacagccgctttccacacagacatcataacaaaaaatttccaccaaaccccccctcccccgccttctggccacagcacttaaacacatctctgccaaaccccaaaaacaaagaaccctaacaccagcctaaccagatttcaaattttatcttttggcggtatgcacttttaacagtcaccccccaactaacacattattttcccctcccactcccatactactaatctcatcaatacaacccccgcccatcctacccagcacacacacaccgctgctaaccccataccccgaaccaaccaaaccccaaagacaccccccacagtttatgtagcttacctcctcaaagcaatacactgaaaatgtttagacgggctcacatcaccccataaacaaataggtttggtcctagcctttctattagctcttagtaagattacacatgcaagcatccccgttccagtgagttcaccctctaaatcaccacgatcaaaagggacaagcatcaagcacgcagcaatgcagctcaaaacgcttagcctagccacacccccacgggaaacagcagtgattaacctttagcaataaacgaaagtttaactaagctatactaaccccagggttggtcaatttcgtgccagccaccgcggtcacacgattaacccaagtcaatagaagccggcgtaaagagtgttttagatcaccccctccccaataaagctaaaactcacctgagttgtaaaaaactccagttgacacaaaatagactacgaaagtggctttaacatatctgaacacacaatagctaagacccaaactgggattagataccccactatgcttagccctaaacctcaacagttaaatcaacaaaactgctcgccagaacactacgagccacagcttaaaactcaaaggacctggcggtgcttcatatccctctagaggagcctgttctgtaatcgataaaccccgatcaacctcaccacctcttgctcagcctatataccgccatcttcagcaaaccctgatgaaggctacaaagtaagcgcaagtacccacgtaaagacgttaggtcaaggtgtagcccatgaggtggcaagaaatgggctacattttctaccccagaaaactacgatagcccttatgaaacttaagggtcgaaggtggatttagcagtaaactgagagtagagtgcttagttgaacagggccctgaagcgcgtacacaccgcccgtcaccctcctcaagtatacttcaaaggacatttaactaaaacccctacgcatttatatagaggagacaagtcgtaacatggtaagtgtactggaaagtgcacttggacgaaccagagtgtagcttaacacaaagcacccaacttacacttaggagatttcaacttaacttgaccgctctgagctaaacctagccccaaacccactccaccttactaccagacaaccttagccaaaccatttacccaaataaagtataggcgatagaaattgaaacctggcgcaatagatatagtaccgcaagggaaagatgaaaaattataaccaagcataatatagcaaggactaacccctataccttctgcataatgaattaactagaaataactttgcaaggagagccaaagctaagacccccgaaaccagacgagctacctaagaacagctaaaagagcacacccgtctatgtagcaaaatagtgggaagatttataggtagaggcgacaaacctaccgagcctggtgatagctggttgtccaagatagaatcttagttcaactttaaatttgcccacagaaccctctaaatccccttgtaaatttaactgttagtccaaagaggaacagctctttggacactaggaaaaaaccttgtagagagagtaaaaaatttaacacccatagtaggcctaaaagcagccaccaattaagaaagcgttcaagctcaacacccactacctaaaaaatcccaaacatataactgaactcctcacacccaattggaccaatctatcaccctatagaagaactaatgttagtataagtaacatgaaaacattctcctccgcataagcctgcgtcagattaaaacactgaactgacaattaacagcccaatatctacaatcaaccaacaagtcattattaccctcactgtcaacccaacacaggcatgctcataaggaaaggttaaaaaaagtaaaaggaactcggcaaatcttaccccgcctgtttaccaaaaacatcacctctagcatcaccagtattagaggcaccgcctgcccagtgacacatgtttaacggccgcggtaccctaaccgtgcaaaggtagcataatcacttgttccttaaatagggacctgtatgaatggctccacgagggttcagctgtctcttacttttaaccagtgaaattgacctgcccgtgaagaggcgggcataacacagcaagacgagaagaccctatggagctttaatttattaatgcaaacagtacctaacaaacccacaggtcctaaactaccaaacctgcattaaaaatttcggttggggcgacctcggagcagaacccaacctccgagcagtacatgctaagacttcaccagtcaaagcgaactactatactcaattgatccaataacttgaccaacggaacaagttaccctagggataacagcgcaatcctattctagagtccatatcaacaatagggtttacgacctcgatgttggatcaggacatcccaatggtgcagccgctattaaaggttcgtttgttcaacgattaaagtcctacgtgatctgagttcagaccggagtaatccaggtcggtttctatctacnttcaaattcctccctgtacgaaaggacaagagaaataaggcctacttcacaaagcgccttcccccgtaaatgatatcatctcaacttagtattatacccacacccacccaagaacagggtttgttaagatggcagagcccggtaatcgcataaaacttaaaactttacagtcagaggttcaattcctcttcttaacaacatacccatggccaacctcctactcctcattgtacccattctaatcgcaatggcattcctaatgcttaccgaacgaaaaattctaggctatatacaactacgcaaaggccccaacgttgtaggcccctacgggctactacaacccttcgctgacgccataaaactcttcaccaaagagcccctaaaacccgccacatctaccatcaccctctacatcaccgccccgaccttagctctcaccatcgctcttctactatgaacccccctccccatacccaaccccctggtcaacctcaacctaggcctcctatttattctagccacctctagcctagccgtttactcaatcctctgatcagggtgagcatcaaactcaaactacgccctgatcggcgcactgcgagcagtagcccaaacaatctcatatgaagtcaccctagccatcattctactatcaacattactaataagtggctcctttaacctctccacccttatcacaacacaagaacacctctgattactcctgccatcatgacccttggccataatatgatttatctccacactagcagagaccaaccgaacccccttcgaccttgccgaaggggagtccgaactagtctcaggcttcaacatcgaatacgccgcaggccccttcgccctattcttcatagccgaatacacaaacattattataataaacaccctcaccactacaatcttcctaggaacaacatatgacgcactctcccctgaactctacacaacatattttgtcaccaagaccctacttctaacctccctgttcttatgaattcgaacagcatacccccgattccgctacgaccaactcatacacctcctatgaaaaaacttcctaccactcaccctagcattacttatatgatatgtctccatacccattacaatctccagcattccccctcaaacctaagaaatatgtctgataaaagagttactttgatagagtaaataataggagcttaaacccccttatttctaggactatgagaatcgaacccatccctgagaatccaaaattctccgtgccacctatcacaccccatcctaaagtaaggtcagctaaataagctatcgggcccataccccgaaaatgttggttatacccttcccgtactaattaatcccctggcccaacccgtcatctactctaccatctttgcaggcacactcatcacagcgctaagctcgcactgattttttacctgagtaggcctagaaataaacatgctagcttttattccagttctaaccaaaaaaataaaccctcgttccacagaagctgccatcaagtatttcctcacgcaagcaaccgcatccataatccttctaatagctatcctcttcaacaatatactctccggacaatgaaccataaccaatactaccaatcaatactcatcattaataatcataatggctatagcaataaaactaggaatagccccctttcacttctgagtcccagaggttacccaaggcacccctctgacatccggcctgcttcttctcacatgacaaaaactagcccccatctcaatcatataccaaatctctccctcactaaacgtaagccttctcctcactctctcaatcttatccatcatagcaggcagttgaggtggattaaaccaaacccagctacgcaaaatcttagcatactcctcaattacccacataggatgaataatagcagttctaccgtacaaccctaacataaccattcttaatttaactatttatattatcctaactactaccgcattcctactactcaacttaaactccagcaccacgaccctactactatctcgcacctgaaacaagctaacatgactaacacccttaattccatccaccctcctctccctaggaggcctgcccccgctaaccggctttttgcccaaatgggccattatcgaagaattcacaaaaaacaatagcctcatcatccccaccatcatagccaccatcaccctccttaacctctacttctacctacgcctaatctactccacctcaatcacactactccccatatctaacaacgtaaaaataaaatgacagtttgaacatacaaaacccaccccattcctccccacactcatcgcccttaccacgctactcctacctatctccccttttatactaataatcttatagaaatttaggttaaatacagaccaagagccttcaaagccctcagtaagttgcaatacttaatttctgtaacagctaaggactgcaaaaccccactctgcatcaactgaacgcaaatcagccactttaattaagctaagcccttactagaccaatgggacttaaacccacaaacacttagttaacagctaagcaccctaatcaactggcttcaatctacttctcccgccgccgggaaaaaaggcgggagaagccccggcaggtttgaagctgcttcttcgaatttgcaattcaatatgaaaatcacctcggagctggtaaaaagaggcctaacccctgtctttagatttacagtccaatgcttcactcagccattttacctcacccccactgatgttcgccgaccgttgactattctctacaaaccacaaagacattggaacactatacctattattcggcgcatgagctggagtcctaggcacagctctaagcctccttattcgagccgagctgggccagccaggcaaccttctaggtaacgaccacatctacaacgttatcgtcacagcccatgcatttgtaataatcttcttcatagtaatacccatcataatcggaggctttggcaactgactagttcccctaataatcggtgcccccgatatggcgtttccccgcataaacaacataagcttctgactcttacctccctctctcctactcctgctcgcatctgctatagtggaggccggagcaggaacaggttgaacagtctaccctcccttagcagggaactactcccaccctggagcctccgtagacctaaccatcttctccttacacctagcaggtgtctcctctatcttaggggccatcaatttcatcacaacaattatcaatataaaaccccctgccataacccaataccaaacgcccctcttcgtctgatccgtcctaatcacagcagtcctacttctcctatctctcccagtcctagctgctggcatcactatactactaacagaccgcaacctcaacaccaccttcttcgaccccgccggaggaggagaccccattctataccaacacctattctgatttttcggtcaccctgaagtttatattcttatcctaccaggcttcggaataatctcccatattgtaacttactactccggaaaaaaagaaccatttggatacataggtatggtctgagctatgatatcaattggcttcctagggtttatcgtgtgagcacaccatatatttacagtaggaatagacgtagacacacgagcatatttcacctccgctaccataatcatcgctatccccaccggcgtcaaagtatttagctgactcgccacactccacggaagcaatatgaaatgatctgctgcagtgctctgagccctaggattcatctttcttttcaccgtaggtggcctgactggcattgtattagcaaactcatcactagacatcgtactacacgacacgtactacgttgtagcccacttccactatgtcctatcaataggagctgtatttgccatcataggaggcttcattcactgatttcccctattctcaggctacaccctagaccaaacctacgccaaaatccatttcactatcatattcatcggcgtaaatctaactttcttcccacaacactttctcggcctatccggaatgccccgacgttactcggactaccccgatgcatacaccacatgaaacatcctatcatctgtaggctcattcatttctctaacagcagtaatattaataattttcatgatttgagaagccttcgcttcgaagcgaaaagtcctaatagtagaagaaccctccataaacctggagtgactatatggatgccccccaccctaccacacattcgaagaacccgtatacataaaatctagacaaaaaaggaaggaatcgaaccccccaaagctggtttcaagccaaccccatggcctccatgactttttcaaaaaggtattagaaaaaccatttcataactttgtcaaagttaaattataggctaaatcctatatatcttaatggcacatgcagcgcaagtaggtctacaagacgctacttcccctatcatagaagagcttatcacctttcatgatcacgccctcataatcattttccttatctgcttcctagtcctgtatgcccttttcctaacactcacaacaaaactaactaatactaacatctcagacgctcaggaaatagaaaccgtctgaactatcctgcccgccatcatcctagtcctcatcgccctcccatccctacgcatcctttacataacagacgaggtcaacgatccctcccttaccatcaaatcaattggccaccaatggtactgaacctacgagtacaccgactacggcggactaatcttcaactcctacatacttcccccattattcctagaaccaggcgacctgcgactccttgacgttgacaatcgagtagtactcccgattgaagcccccattcgtataataattacatcacaagacgtcttgcactcatgagctgtccccacattaggcttaaaaacagatgcaattcccggacgtctaaaccaaaccactttcaccgctacacgaccgggggtatactacggtcaatgctctgaaatctgtggagcaaaccacagtttcatgcccatcgtcctagaattaattcccctaaaaatctttgaaatagggcccgtatttaccctatagcaccccctctaccccctctagagcccactgtaaagctaacttagcattaaccttttaagttaaagattaagagaaccaacacctctttacagtgaaatgccccaactaaatactaccgtatggcccaccataattacccccatactccttacactattcctcatcacccaactaaaaatattaaacacaaactaccacctacctccctcaccaaagcccataaaaataaaaaattataacaaaccctgagaaccaaaatgaacgaaaatctgttcgcttcattcattgcccccacaatcctaggcctacccgccgcagtactgatcattctatttccccctctattgatccccacctccaaatatctcatcaacaaccgactaatcaccacccaacaatgactaatcaaactaacctcaaaacaaatgataaccatacacaacactaaaggacgaacctgatctcttatactagtatccttaatcatttttattgccacaactaacctcctcggactcctgcctcactcatttacaccaaccacccaactatctataaacctagccatggccatccccttatgagcgggcgcagtgattataggctttcgctctaagattaaaaatgccctagcccacttcttaccacaagacacacctacaccccttatccccatactagttattatcgaaaccatcagcctactcattcaaccaatagccctggccgtacgcctaaccgctaacattactgcaggccacctactcatgcacctaattggaagcgccaccctagcaatatcaaccattaaccttccctctacacttatcatcttcacaattctaattctactgactatcctagaaatcgctgtcgccttaatccaagcctacgttttcacacttctagtaagcctctacctgcacgacaacacataatgacccaccaatcacatgcctatcatatagtaaaacccagcccatgacccctaacaggggccctctcagccctcctaatgacctccggcctagccatgtgatttcacttccactccataacgctcctcatactaggcctactaaccaacacactaaccatataccaatgatggcgcgatgtaacacgagaaagcacataccaaggccaccacacaccacctgtccaaaaaggccttcgatacgggataatcctatttattacctcagaagtttttttcttcgcaggatttttctgagccttttaccactccagcctagcccctaccccccaattaggagggcactggcccccaacaggcatcaccccgctaaatcccctagaagtcccactcctaaacacatccgtattactcgcatcaggagtatcaatcacctgagctcaccatagtctaatagaaaacaaccgaaaccaaataattcaagcactgcttattacaattttactgggtctctattttaccctcctacaagcctcagagtacttcgagtctcccttcaccatttccgacggcatctacggctcaacattttttgtagccacaggcttccacggacttcacgtcattattggctcaactttcctcactatctgcttcatccgccaactaatatttcactttacatccaaacatcactttggcttcgaagccgccgcctgatactggcattttgtagatgtggtttgactatttctgtatgtctccatctattgatgagggtcttactcttttagtataaatagtaccgttaacttccaattaactagttttgacaacattcaaaaaagagtaataaacttcgccttaattttaataatcaacaccctcctagccttactactaataattattacattttgactaccacaactcaacggctacatagaaaaatccaccccttacgagtgcggcttcgaccctatatcccccgcccgcgtccctttctccataaaattcttcttagtagctattaccttcttattatttgatctagaaattgccctccttttacccctaccatgagccctacaaacaactaacctgccactaatagttatgtcatccctcttattaatcatcatcctagccctaagtctggcctatgagtgactacaaaaaggattagactgaaccgaattggtatatagtttaaacaaaacgaatgatttcgactcattaaattatgataatcatatttaccaaatgcccctcatttacataaatattatactagcatttaccatctcacttctaggaatactagtatatcgctcacacctcatatcctccctactatgcctagaaggaataatactatcgctgttcattatagctactctcataaccctcaacacccactccctcttagccaatattgtgcctattgccatactagtctttgccgcctgcgaagcagcggtgggcctagccctactagtctcaatctccaacacatatggcctagactacgtacataacctaaacctactccaatgctaaaactaatcgtcccaacaattatattactaccactgacatgactttccaaaaaacacataatttgaatcaacacaaccacccacagcctaattattagcatcatccctctactattttttaaccaaatcaacaacaacctatttagctgttccccaaccttttcctccgaccccctaacaacccccctcctaatactaactacctgactcctacccctcacaatcatggcaagccaacgccacttatccagtgaaccactatcacgaaaaaaactctacctctctatactaatctccctacaaatctccttaattataacattcacagccacagaactaatcatattttatatcttcttcgaaaccacacttatccccaccttggctatcatcacccgatgaggcaaccagccagaacgcctgaacgcaggcacatacttcctattctacaccctagtaggctcccttcccctactcatcgcactaatttacactcacaacaccctaggctcactaaacattctactactcactctcactgcccaagaactatcaaactcctgagccaacaacttaatatgactagcttacacaatagcttttatagtaaagatacctctttacggactccacttatgactccctaaagcccatgtcgaagcccccatcgctgggtcaatagtacttgccgcagtactcttaaaactaggcggctatggtataatacgcctcacactcattctcaaccccctgacaaaacacatagcctaccccttccttgtactatccctatgaggcataattataacaagctccatctgcctacgacaaacagacctaaaatcgctcattgcatactcttcaatcagccacatagccctcgtagtaacagccattctcatccaaaccccctgaagcttcaccggcgcagtcattctcataatcgcccacgggcttacatcctcattactattctgcctagcaaactcaaactacgaacgcactcacagtcgcatcataatcctctctcaaggacttcaaactctactcccactaatagctttttgatgacttctagcaagcctcgctaacctcgccttaccccccactattaacctactgggagaactctctgtgctagtaaccacgttctcctgatcaaatatcactctcctacttacaggactcaacatactagtcacagccctatactccctctacatatttaccacaacacaatggggctcactcacccaccacattaacaacataaaaccctcattcacacgagaaaacaccctcatgttcatacacctatcccccattctcctcctatccctcaaccccgacatcattaccgggttttcctcttgtaaatatagtttaaccaaaacatcagattgtgaatctgacaacagaggcttacgaccccttatttaccgagaaagctcacaagaactgctaactcatgcccccatgtctaacaacatggctttctcaacttttaaaggataacagctatccattggtcttaggccccaaaaattttggtgcaactccaaataaaagtaataaccatgcacactactataaccaccctaaccctgacttccctaattccccccatccttaccaccctcgttaaccctaacaaaaaaaactcatacccccattatgtaaaatccattgtcgcatccacctttattatcagtctcttccccacaacaatattcatgtgcctagaccaagaagttattatctcgaactgacactgagccacaacccaaacaacccagctctccctaagcttcaaactagactacttctccataatattcatccctgtagcattgttcgttacatggtccatcatagaattctcactgtgatatataaactcagacccaaacattaatcagttcttcaaatatctactcatcttcctaattaccatactaatcttagttaccgctaacaacctattccaactgttcatcggctgagagggcgtaggaattatatccttcttgctcatcagttgatgatacgcccgagcagatgccaacacagcagccattcaagcaatcctatacaaccgtatcggcgatatcggtttcatcctcgccttagcatgatttatcctacactccaactcatgagacccacaacaaatagcccttctaaacgctaatccaagcctcaccccactactaggcctcctcctagcagcagcaggcaaatcagcccaattaggtctccacccctgactcccctcagccatagaaggccccaccccagtctcagccctactccactcaagcactatagttgtagcaggaatcttcttactcatccgcttccaccccctagcagaaaatagcccactaatccaaactctaacactatgcttaggcgctatcaccactctgttcgcagcagtctgcgcccttacacaaaatgacatcaaaaaaatcgtagccttctccacttcaagtcaactaggactcataatagttacaatcggcatcaaccaaccacacctagcattcctgcacatctgtacccacgccttcttcaaagccatactatttatgtgctccgggtccatcatccacaaccttaacaatgaacaagatattcgaaaaataggaggactactcaaaaccatacctctcacttcaacctccctcaccattggcagcctagcattagcaggaatacctttcctcacaggtttctactccaaagaccacatcatcgaaaccgcaaacatatcatacacaaacgcctgagccctatctattactctcatcgctacctccctgacaagcgcctatagcactcgaataattcttctcaccctaacaggtcaacctcgcttccccacccttactaacattaacgaaaataaccccaccctactaaaccccattaaacgcctggcagccggaagcctattcgcaggatttctcattactaacaacatttcccccgcatcccccttccaaacaacaatccccctctacctaaaactcacagccctcgctgtcactttcctaggacttctaacagccctagacctcaactacctaaccaacaaacttaaaataaaatccccactatgcacattttatttctccaacatactcggattctaccctagcatcacacaccgcacaatcccctatctaggccttcttacgagccaaaacctgcccctactcctcctagacctaacctgactagaaaagctattacctaaaacaatttcacagcaccaaatctccacctccatcatcacctcaacccaaaaaggcataattaaactttacttcctctctttcttcttcccactcatcctaaccctactcctaatcacataacctattcccccgagcaatctcaattacaatatatacaccaacaaacaatgttcaaccagtaactactactaatcaacgcccataatcatacaaagcccccgcaccaataggatcctcccgaatcaaccctgacccctctccttcataaattattcagcttcctacactattaaagtttaccacaaccaccaccccatcatactctttcacccacagcaccaatcctacctccatcgctaaccccactaaaacactcaccaagacctcaacccctgacccccatgcctcaggatactcctcaatagccatcgctgtagtatatccaaagacaaccatcattccccctaaataaattaaaaaaactattaaacccatataacctcccccaaaattcagaataataacacacccgaccacaccgctaacaatcaatactaaacccccataaataggagaaggcttagaagaaaaccccacaaaccccattactaaacccacactcaacagaaacaaagcatacatcattattctcgcacggactacaaccacgaccaatgatatgaaaaaccatcgttgtatttcaactacaagaacaccaatgaccccaatacgcaaaactaaccccctaataaaattaattaaccactcattcatcgacctccccaccccatccaacatctccgcatgatgaaacttcggctcactccttggcgcctgcctgatcctccaaatcaccacaggactattcctagccatgcactactcaccagacgcctcaaccgccttttcatcaatcgcccacatcactcgagacgtaaattatggctgaatcatccgctaccttcacgccaatggcgcctcaatattctttatctgcctcttcctacacatcgggcgaggcctatattacggatcatttctctactcagaaacctgaaacatcggcattatcctcctgcttgcaactatagcaacagccttcataggctatgtcctcccgtgaggccaaatatcattctgaggggccacagtaattacaaacttactatccgccatcccatacattgggacagacctagttcaatgaatctgaggaggctactcagtagacagtcccaccctcacacgattctttacctttcacttcatcttgcccttcattattgcagccctagcagcactccacctcctattcttgcacgaaacgggatcaaacaaccccctaggaatcacctcccattccgataaaatcaccttccacccttactacacaatcaaagacgccctcggcttacttctcttccttctctccttaatgacattaacactattctcaccagacctcctaggcgacccagacaattataccctagccaaccccttaaacacccctccccacatcaagcccgaatgatatttcctattcgcctacacaattctccgatccgtccctaacaaactaggaggcgtccttgccctattactatccatcctcatcctagcaataatccccatcctccatatatccaaacaacaaagcataatatttcgcccactaagccaatcactttattgactcctagccgcagacctcctcattctaacctgaatcggaggacaaccagtaagctacccttttaccatcattggacaagtagcatccgtactatacttcacaacaatcctaatcctaataccaactatctccctaattgaaaacaaaatactcaaatgggcctgtccttgtagtataaactaatacaccagtcttgtaaaccggagatgaaaacctttttccaaggacaaatcagagaaaaagtctttaactccaccattagcacccaaagctaagattctaatttaaactattctctgttctttcatggggaagcagatttgggtaccacccaagtattgactcacccatcaacaaccgctatgtatttcgtacattactgccagccaccatgaatattgtacggtaccataaatacttgaccacctgtagtacataaaaacccaatccacatcaaaaccccctccccatgcttacaagcaagtacagcaatcaaccctcaactatcacacattaactgcaactccaaagccacccctcacccactaggataccaacaaacctacccacccttaacagtacatagtacataaagccatttaccgtacatagcacattacagtcaaatcccttctcgtccccatggatgacccccctcagataggggtcccttgaccaccatcctccgtgaaatcaatatcccgcacaagagtgctactctcctcgctccgggcccataacacttgggggtagctaaagtgaactgtatccgacatctggttcctacttcagggccataaagcctaaatagcccacacgttccccttaaataagacatcacgatg

SEQ ID NO: 156 - DNA, 16567 bp, Homo sapiens mitochondrial
  3106: "n" refers to a nucleotide at position 3107 of the Cambridge Reference Sequence (CRS, Anderson et al. 1981 Nature 290:457-465), later determined to be absent from the human mtDNA sequence according to the revised CRS (rCRS, Andrews et al. 1999 Nature Genetics 23:147); "n" therefore represents a single nucleotide deletion at a position corresponding to nucleotide 3107 of SEQ ID NO:1 as provided herein.
gatcacaggtctatcaccctattaaccactcacgggagctctccatgcatttggtattttcgtctggggggtgtgcacgcgatagcattgcgagacgctggagccggagcaccctatgtcgcagtatctgtctttgattcctgcctcatcctattatttatcgcacctacgttcaatattacaggcgaacatacttactaaagtgtgttaattaattaatgcttgtaggacataataataacaattgaatgtctgcacagccgctttccacacagacatcataacaaaaaatttccaccaaaccccccctcccccgccttctggccacagcacttaaacacatctctgccaaaccccaaaaacaaagaaccctaacaccagcctaaccagatttcaaattttatcttttggcggtatgcacttttaacagtcaccccccaactaacacattattttcccctcccactcccatactactaatctcatcaatacaacccccgcccatcctacccagcacacacaccgctgctaaccccataccccgaaccaaccaaaccccaaagacaccccccacagtttatgtagcttacctcctcaaagcaatacactgaaaatgtttagacgggctcacatcaccccataaacaaataggtttggtcctagcctttctattagctcttagtaagattacacatgcaagcatccccgttccagtgagttcaccctctaaatcaccacgatcaaaagggacaagcatcaagcacgcagcaatgcagctcaaaacgcttagcctagccacacccccacgggaaacagcagtgattaacctttagcaataaacgaaagtttaactaagctatactaaccccagggttggtcaatttcgtgccagccaccgcggtcacacgattaacccaagtcaatagaagccggcgtaaagagtgttttagatcaccccctccccaataaagctaaaactcacctgagttgtaaaaaactccagttgacacaaaatagactacgaaagtggctttaacatatctgaacacacaatagctaagacccaaactgggattagataccccactatgcttagccctaaacctcaacagttaaatcaacaaaactgctcgccagaacactacgagccacagcttaaaactcaaaggacctggcggtgcttcatatccctctagaggagcctgttctgtaatcgataaaccccgatcaacctcaccacctcttgctcagcctatataccgccatcttcagcaaaccctgatgaaggctacaaagtaagcgcaagtacccacgtaaagacgttaggtcaaggtgtagcccatgaggtggcaagaaatgggctacattttctaccccagaaaactacgatagcccttatgaaacttaagggtcgaaggtggatttagcagtaaactgagagtagagtgcttagttgaacagggccctgaagcgcgtacacaccgcccgtcaccctcctcaagtatacttcaaaggacatttaactaaaacccctacgcatttatatagaggagacaagtcgtaacatggtaagtgtactggaaagtgcacttggacgaaccagagtgtagcttaacacaaagcacccaacttacacttaggagatttcaacttaacttgaccgctctgagctaaacctagccccaaacccactccaccttactaccagacaaccttagccaaaccatttacccaaataaagtataggcgatagaaattgaaacctggcgcaatagatatagtaccgcaagggaaagatgaaaaattataaccaagcataatatagcaaggactaacccctataccttctgcataatgaattaactagaaataactttgcaaggagagccaaagctaagacccccgaaaccagacgagctacctaagaacagctaaaagagcacacccgtctatgtagcaaaatagtgggaagatttataggtagaggcgacaaacctaccgagcctggtgatagctggttgtccaagatagaatcttagttcaactttaaatttgcccacagaaccctctaaatccccttgtaaatttaactgttagtccaaagaggaacagctctttggacactaggaaaaaaccttgtagagagagtaaaaaatttaacacccatagtaggcctaaaagcagccaccaattaagaaagcgttcaagctcaacacccactacctaaaaaatcccaaacatataactgaactcctcacacccaattggaccaatctatcaccctatagaagaactaatgttagtataagtaacatgaaaacattctcctccgcataagcctgcgtcagattaaaacactgaactgacaattaacagcccaatatctacaatcaaccaacaagtcattattaccctcactgtcaacccaacacaggcatgctcataaggaaaggttaaaaaaagtaaaaggaactcggcaaatcttaccccgcctgtttaccaaaaacatcacctctagcatcaccagtattagaggcaccgcctgcccagtgacacatgtttaacggccgcggtaccctaaccgtgcaaaggtagcataatcacttgttccttaaatagggacctgtatgaatggctccacgagggttcagctgtctcttacttttaaccagtgaaattgacctgcccgtgaagaggcgggcatgacacagcaagacgagaagaccctatggagctttaatttattaatgcaaacagtacctaacaaacccacaggtcctaaactaccaaacctgcattaaaaatttcggttggggcgacctcggagcagaacccaacctccgagcagtacatgctaagacttcaccagtcaaagcgaactactatactcaattgatccaataacttgaccaacggaacaagttaccctagggataacagcgcaatcctattctagagtccatatcaacaatagggtttacgacctcgatgttggatcaggacatcccgatggtgcagccgctattaaaggttcgtttgttcaacgattaaagtcctacgtgatctgagttcagaccggagtaatccaggtcggtttctatctacnttcaaattcctccctgtacgaaaggacaagagaaataaggcctacttcacaaagcgccttcccccgtaaatgatatcatctcaacttagtattatacccacacccacccaagaacagggtttgttaagatggcagagcccggtaatcgcataaaacttaaaactttacagtcagaggttcaattcctcttcttaacaacatacccatggccaacctcctactcctcattgtacccattctaatcgcaatggcattcctaatgcttaccgaacgaaaaattctaggctatatacaactacgcaaaggccccaacgttgtaggcccctacgggctactacaacctttcgctgacgccataaaactcttcaccaaagagcccctaaaacccgccacatctaccatcaccctctacatcaccgccccgaccttagctctcaccatcgctcttctactatgaacccccctccccatacccaaccccctggtcaacctcaacctaggcctcctatttattctagccacctctagcctagccgtttactcaatcctctgatcagggtgagcatcaaactcaaactacgccctgatcggcgcactgcgagcagtagcccaaacaatctcatatgaagtcaccctagccatcattctactatcaacattactaataagtggctcctttaacctctccacccttatcacaacacaagaacacctctgattactcctgccatcatgacccttggccataatatgatttatctccacactagcagagaccaaccgaacccccttcgaccttgccgaaggggagtccgaactagtctcaggcttcaacatcgaatacgccgcaggccccttcgccctattcttcatagccgaatacacaaacattattataataaacaccctcaccactacaatcttcctaggaacaacatatgacgcactctcccctgaactctacacaacatattttgtcaccaagaccctacttctaacctccctgttcttatgaattcgaacagcatacccccgattccgctacgaccaactcatacacctcctatgaaaaaacttcctaccactcaccctagcattacttatatgatatgtctccatacccattacaatctccagcattccccctcaaacctaagaaatatgtctgataaaagagttactttgatagagtaaataataggagcttaaacccccttatttctaggactatgagaatcgaacccatccctgagaatccaaaattctccgtgccacctatcacaccccatcctaaagtaaggtcagctaaataagctatcgggcccataccccgaaaatgttggttatacccttcccgtactaattaatcccctggcccaacccgtcatctactctaccatctttgcaggcacactcatcacagcgctaagctcgcactgattttttacctgagtaggcctagaaataaacatgctagcttttattccagttctaaccaaaaaaataaaccctcgttccacagaagctgccatcaagtatttcctcacgcaagcaaccgcatccataatccttctaatagctatcctcttcaacaatatactctccggacaatgaaccataaccaatactaccaatcaatactcatcattaataatcataatggctatagcaataaaactaggaatagccccctttcacttctgagtcccagaggttacccaaggcacccctctgacatccggcctgcttcttctcacatgacaaaaactagcccccatctcaatcatataccaaatctctccctcactaaacgtaagccttctcctcactctctcaatcttatccatcatagcaggcagttgaggtggattaaaccaaacccagctacgcaaaatcttagcatactcctcaattacccacataggatgaataatagcagttctaccgtacaaccccaacataaccattcttaatttaactatttatattatcctaactactaccgcattcctactactcaacttaaactccagcaccacgaccctactactatctcgcacctgaaacaagctaacatgactaacacccttaattccatccaccctcctctccctaggaggcctgcccccgctaaccggctttttgcccaaatgggccattatcgaagaattcacaaaaaacaatagcctcatcatccccaccatcatagccaccatcaccctccttaacctctacttctacctacgcctaatctactccacctcaatcacactactccccatatctaacaacgtaaaaataaaatgacagtttgaacatacaaaacccaccccattcctccccacactcatcgcccttaccacgctactcctacctatctccccttttatactaataatcttatagaaatttaggttaaatacagaccaagagccttcaaagccctcagtaagttgcaatacttaatttctgtaacagctaaggactgcaaaaccccactctgcatcaactgaacgcaaatcagccactttaattaagctaagcccttactagaccaatgggacttaaacccacaaacacttagttaacagctaagcaccctaatcaactggcttcaatctacttctcccgccgccgggaaaaaaggcgggagaagccccggcagatttgaagctgcttcttcgaatttgcaattcaatatgaaaatcacctcggagctggtaaaaagaggcctaacccctgtctttagatttacagtccaatgcttcactcagccattttacctcacccccactgatgttcgccgaccgttgactattctctacaaaccacaaagacattggaacactatacctattattcggcgcatgagctggagtcctaggcacagctctaagcctccttattcgagccgagctgggccagccaggcaaccttctaggtaacgaccacatctacaacgttatcgtcacagcccatgcatttgtaataatcttcttcatagtaatacccatcataatcggaggctttggcaactgactagttcccctaataatcggtgcccccgatatggcgtttccccgcataaacaacataagcttctgactcttacccccctctctcctactcctgctcgcatctgctatagtggaggccggagcaggaacaggttgaacagtctaccctcccttagcagggaactactcccaccctggagcctccgtagacctaaccatcttctccttacacctagcaggtgtctcctctatcttaggggccatcaatttcatcacaacaattatcaatataaaaccccctgccataacccaataccaaacgcccctcttcgtctgatccgtcctaatcacagcagtcctacttctcctatctctcccagtcctagctgctggcatcactatactactaacagaccgcaacctcaacaccaccttcttcgaccccgccggaggaggagaccccattctataccaacacctattctgatttttcggtcaccctgaagtttatattcttatcctaccaggcttcggaataatctcccatattgtaacttactactccggaaaaaaagaaccatttggatacataggtatggtctgagctatgatatcaattggcttcctagggtttatcgtgtgagcacaccatatatttacagtaggaatagacgtagacacacgagcatatttcacctccgctaccataatcatcgctatccccaccggcgtcaaagtatttagctgactcgccacactccacggaagcaatatgaaatgatctgctgcagtgctctgagccctaggattcatctttcttttcaccgtaggtggcctgactggcattgtattagcaaactcatcactagacatcgtactacacgacacgtactacgttgtagctcacttccactatgtcctatcaataggagctgtatttgccatcataggaggcttcattcactgatttcccctattctcaggctacaccctagaccaaacctacgccaaaatccatttcactatcatattcatcggcgtaaatctaactttcttcccacaacactttctcggcctatccggaatgccccgacgttactcggactaccccgatgcatacaccacatgaaacatcctatcatctgtaggctcattcatttctctaacagcagtaatattaataattttcatgatttgagaagccttcgcttcgaagcgaaaagtcctaatagtagaagaaccctccataaacctggagtgactatatggatgccccccaccctaccacacattcgaagaacccgtatacataaaatctagacaaaaaaggaaggaatcgaaccccccaaagctggtttcaagccaaccccatggcctccatgactttttcaaaaaggtattagaaaaaccatttcataactttgtcaaagttaaattataggctaaatcctatatatcttaatggcacatgcagcgcaagtaggtctacaagacgctacttcccctatcatagaagagcttatcacctttcatgatcacgccctcataatcattttccttatctgcttcctagtcctgtatgcccttttcctaacactcacaacaaaactaactaatactaacatctcagacgctcaggaaatagaaaccgtctgaactatcctgcccgccatcatcctagtcctcatcgccctcccatccctacgcatcctttacataacagacgaggtcaacgatccctcccttaccatcaaatcaattggccaccaatggtactgaacctacgagtacaccgactacggcggactaatcttcaactcctacatacttcccccattattcctagaaccaggcgacctgcgactccttgacgttgacaatcgagtagtactcccgattgaagcccccattcgtataataattacatcacaagacgtcttgcactcatgagctgtccccacattaggcttaaaaacagatgcaattcccggacgtctaaaccaaaccactttcaccgctacacgaccgggggtatactacggtcaatgctctgaaatctgtggagcaaaccacagtttcatgcccatcgtcctagaattaattcccctaaaaatctttgaaatagggcccgtatttaccctatagcaccccctctaccccctctagagcccactgtaaagctaacttagcattaaccttttaagttaaagattaagagaaccaacacctctttacagtgaaatgccccaactaaatactaccgtatggcccaccataattacccccatactccttacactattcctcatcacccaactaaaaatattaaacacaaactaccacctacctccctcaccaaagcccataaaaataaaaaattataacaaaccctgagaaccaaaatgaacgaaaatctgttcgcttcattcattgcccccacaatcctaggcctacccgccgcagtactgatcattctatttccccctctattgatccccacctccaaatatctcatcaacaaccgactaatcaccacccaacaatgactaatcaaactaacctcaaaacaaatgatagccatacacaacactaaaggacgaacctgatctcttatactagtatccttaatcatttttattgccacaactaacctcctcggactcctgcctcactcatttacaccaaccacccaactatctataaacctagccatggccatccccttatgagcgggcgcagtgattataggccttcgctctaagattaaaaatgccctagcccacttcttaccacaaggcacacctacaccccttatccccatactagttattatcgaaaccatcagcctactcattcaaccaatagccctggccgtacgcctaaccgctaacattactgcaggccacctactcatgcacctaattggaagcgccaccctagcaatatcaaccattaaccttccctctacacttatcatcttcacaattctaattctactgactatcctagaaatcgctgtcgccttaatccaagcctacgttttcacacttctagtaagcctctacctgcacgacaacacataatgacccaccaatcacatgcctatcatatagtaaaacccagcccatgacccctaacaggggccctctcagccctcctaatgacctccggcctagccatgtgatttcacttccactccataacgctcctcatactaggcctactaaccaacacactaaccatataccaatgatggcgcgatgtaacacgagaaagcacataccaaggccaccacacaccacctgtccaaaaaggccttcgatatgggataatcctatttattacctcagaagtttttttcttcgcaggatttttctgagccttttaccactccagcctagcccctaccccccaactaggagggcactggcccccaacaggcatcaccccgctaaatcccctagaagtcccactcctaaacacatccgtattactcgcatcaggagtatcaatcacctgagctcaccatagtctaatagaaaacaaccgaaaccaaataattcaagcactgcttattacaattttactgggtctctattttaccctcctacaagcctcagagtacttcgagtctcccttcaccatttccgacggcatctacggctcaacattttttgtagccacaggcttccacggacttcacgtcattattggctcaactttcctcactatctgcttcatccgccaactaatatttcactttacatccaaacatcactttggcttcgaagccgccgcctgatactggcattttgtagatgtggtttgactatttctgtatgtctccatctattgatgagggtcttactcttttagtataaatagtaccgttaacttccaattaactagttttgacaacattcaaaaaagagtaataaacttcgccttaattttaataatcgacaccctcctagccttactactaataattattacattttgactaccacaactcaacggctacatagaaaaatccaccccttacgagtgcggcttcgaccctatatcccccgcccgcgtccctttctccataaaattcttcttagtagctattaccttcttattatttgatctagaaattgccctccttttacccctaccatgagccctacaaacaactaacctgccactaatagttatgtcatccctcttattaatcatcatcctagccctaagtctggcctatgaatgactacaaaaaggattagactgagccgaattggtatatagtttaaacaaaacgaatgatttcgactcattaaattatgataatcatatttaccaaatgcccctcatttacataaatattatactagcatttaccatctcacttctaggaatactagtatatcgctcacacctcatatcctccctactatgcctagaaggaataatactatcgctgttcattatagctactctcataaccctcaacacccactccctcttagccaatattgtgcctattgccatactagtctttgccgcctgcgaagcagcggtgggcctagccctactagtctcaatctccaacacatatggcctagactacgtacataacctaaacctactccaatgctaaaactaatcgtcccaacaattatattactaccactgacatgactttccaaaaaacacataatttgaatcaacacaaccacccacagcctaattattagcatcatccccctactattttttaaccaaatcaacaacaacctatttagctgttccccaaccttttcctccgaccccctaacaacccccctcctaatactaactacctgactcctacccctcacaatcatggcaagccaacgccacttatccagtgaaccactatcacgaaaaaaactctacctctctatactaatctccctacaaatctccttaattataacattcacagccacagaactaatcatattttatatcttcttcgaaaccacacttatccccaccttggctatcatcacccgatgaggcaaccaaccagaacgcctgaacgcaggcacatacttcctattctacaccctagtaggctcccttcccctactcatcgcactaatttacactcacaacaccctaggctcactaaacattctactactcactctcactgcccaagaactatcaaactcctgagccaacaacttaatatgactagcttacacaatagcttttatagtaaagatacctctttacggactccacttatgactccctaaagcccatgtcgaagcccccatcgctgggtcaatagtacttgccgcagtactcttaaaactaggcggctatggtataatacgcctcacactcattctcaaccccctgacaaaacacatagcctaccccttccttgtactatccctatgaggcataattataacaagctccatctgcctacgacaaacagacctaaaatcgctcattgcatactcttcaatcagccacatagccctcgtagtaacagccattctcatccaaaccccctgaagcttcaccggcgcagtcattctcataatcgcccacggacttacatcctcattactattctgcctagcaaactcaaactacgaacgcactcacagtcgcatcataatcctctctcaaggacttcaaactctactcccactaatagctttttgatgacttctagcaagcctcgctaacctcgccttaccccccactattaacctactgggagaactctctgtgctagtaaccacgttctcctgatcaaatatcactctcctacttacaggactcaacatactagtcacagccctatactccctctacatatttaccacaacacaatggggctcactcacccaccacattaacaacataaaaccctcattcacacgagaaaacaccctcatgttcatacacctatcccccattctcctcctatccctcaaccccgacatcattaccgggttttcctcttgtaaatatagtttaaccaaaacatcagattgtgaatctgacaacagaggcttacgaccccttatttaccgagaaagctcacaagaactgctaactcatgcccccatgtctaacaacatggctttctcaacttttaaaggataacagctatccattggtcttaggccccaaaaattttggtgcaactccaaataaaagtaataaccatgcacactactataaccaccctaaccctgacttccctaattccccccatccttaccaccctcgttaaccctaacaaaaaaaactcatacccccattatgtaaaatccattgtcgcatccacctttattatcagtctcttccccacaacaatattcatgtgcctagaccaagaagttattatctcgaactgacactgagccacaacccaaacaacccagctctccctaagcttcaaactagactacttctccataatattcatccctgtagcattgttcgttacatggtccatcatagaattctcactgtgatatataaactcagacccaaacattaatcagttcttcaaatatctactcattttcctaattaccatactaatcttagttaccgctaacaacctattccaactgttcatcggctgagagggcgtaggaattatatccttcttgctcatcagttgatgatacgcccgagcagatgccaacacagcagccattcaagcaatcctatacaaccgtatcggcgatatcggtttcatcctcgccttagcatgatttatcctacactccaactcatgagacccacaacaaatagcccttctaaacgctaatccaagcctcaccccactactaggcctcctcctagcagcagcaggcaaatcagcccaattaggtctccacccctgactcccctcagccatagaaggccccaccccagtctcagccctactccactcaagcactatagttgtagcaggagtcttcttactcatccgcttccaccccctagcagaaaatagcccactaatccaaactctaacactatgcttaggcgctatcaccactctgttcgcagcagtctgcgcccttacacaaaatgacatcaaaaaaatcgtagccttctccacttcaagtcaactaggactcataatagttacaatcggcatcaaccaaccacacctagcattcctgcacatctgtacccacgccttcttcaaagccatactatttatgtgctccgggtccatcatccacaaccttaacaatgaacaagatattcgaaaaataggaggactactcaaaaccatacctctcacttcaacctccctcaccattggcagcctagcattagcaggaatacctttcctcacaggtttctactccaaagaccacatcatcgaaaccgcaaacatatcatacacaaacgcctgagccctatctattactctcatcgctacctccctgacaagcgcctatagcactcgaataattcttctcaccctaacaggtcaacctcgcttccccacccttactaacattaacgaaaataaccccaccctactaaaccccattaaacgcctggcagccggaagcctattcgcaggatttctcattactaacaacatttcccccgcatcccccttccaaacaacaatccccctctacctaaaactcacagccctcgctgtcactttcctaggacttctaacagccctagacctcaactacctaaccaacaaacttaaaataaaatccccactatgcacattttatttctccaacatactaggattctaccctagcatcacacaccgcacaatcccctatctaggccttcttacgagccaaaacctgcccctactcctcctagacctaacctgactagaaaagctattacctaaaacaatttcacagcaccaaatctccacctccatcatcacctcaacccaaaaaggcataattaaactttacttcctctctttcttcttcccactcatcctaaccctactcctaatcacataacctattcccccgagcaatctcaattacaatatatacaccaacaaacaatgttcaaccagtaactactactaatcaacgcccataatcatacaaagcccccgcaccaataggatcctcccgaatcaaccctgacccctctccttcataaattattcagcttcctacactattaaagtttaccacaaccaccaccccatcatactctttcacccacagcaccaatcctacctccatcgctaaccccactaaaacactcaccaagacctcaacccctgacccccatgcctcaggatactcctcaatagccatcgctgtagtatatccaaagacaaccatcattccccctaaataaattaaaaaaactattaaacccatataacctcccccaaaattcagaataataacacacccgaccacaccgctaacaatcaatactaaacccccataaataggagaaggcttagaagaaaaccccacaaaccccattactaaacccacactcaacagaaacaaagcatacatcattattctcgcacggactacaaccacgaccaatgatatgaaaaaccatcgttgtatttcaactacaagaacaccaatgaccccaatacgcaaaattaaccccctaataaaattaattaaccactcattcatcgacctccccaccccatccaacatctccgcatgatgaaacttcggctcactccttggcgcctgcctgatcctccaaatcaccacaggactattcctagccatgcactactcaccagacgcctcaaccgccttttcatcaatcgcccacatcactcgagacgtaaattatggctgaatcatccgctaccttcacgccaatggcgcctcaatattctttatctgcctcttcctacacatcgggcgaggcctatattacggatcatttctctactcagaaacctgaaacatcggcattatcctcctgcttgcaactatagcaacagccttcataggctatgtcctcccgtgaggccaaatatcattctgaggggccacagtaattacaaacttactatccgccatcccatacattgggacagacctagttcaatgaatctgaggaggctactcagtagacagtcccaccctcacacgattctttacctttcacttcatcttacccttcattgttgcagccctagcagcactccacctcctattcttgcacgaaacgggatcaaacaaccccctaggaatcacctcccattccgataaaatcaccttccacccttactacacaatcaaagacgccctcggcttacttctcttccttctctccttaatgacattaacactattctcaccagacctcctaggcgacccagacaattataccctagccaaccccttaaacacccctccccacatcaagcccgaatgatatttcctattcgcctacacaattctccgatccgtccctaacaaactaggaggcgtccttgccctattactatccatcctcatcctagcaataatccccatcctccatatatccaaacaacaaagcataatatttcgcccactaagccaatcactttattgactcctagccgcagacctcctcattctaacctgaatcggaggacaaccagtaagctacccttttaccatcattggacaagtagcatccgtactatacttcgcaacaatcctaatcctaataccaactatctccctaattgaaaacaaaatactcaaatgggcctgtccttgtagtataaactaatacaccagtcttgtaaaccggagatgaaaaccttttccaaggacaaatcagagaaaaagtctttaactccaccattagcacccaaagctaagattctaatttaaactattctctgttctttcatggggaagcagatttgggtaccacccaagtattgactcacccatcaacaaccgctatgtatttcgtacattactgccagccaccatgaatatcgtacggtaccataaatacttgaccacctgtagtacataaaaacccaatccacatcaaaaccccctccccatgcttacaagcaagtacagcaatcaaccttcaactatcacacatcaactgcaactccaaagccacccctcacccactaggatatcaacaaacctacccatccttaacagtacatagcacataaagccatttaccgtacatagcacattacagtcaaatcccttctcgcccccatggatgacccccctcagataggggtcccttgaccaccatcctccgtgaaatcaatatcccgcacaagagtgctactctcctcgctccgggcccataacacttgggggtagctaaagtgaactgtatccgacatctggttcctacttcagggccataaagcctaaatagcccacacgttccccttaaataagacatcacgatg

SEQ ID NO: 157 - DNA, 16578 bp, Homo sapiens mitochondrial
  3116: "n" refers to a nucleotide at position 3107 of the Cambridge Reference Sequence (CRS, Anderson et al. 1981 Nature 290:457-465), later determined to be absent from the human mtDNA sequence according to the revised CRS (rCRS, Andrews et al. 1999 Nature Genetics 23:147); "n" therefore represents a single nucleotide deletion at a position corresponding to nucleotide 3107 of SEQ ID NO:1 as provided herein.
gatcacaggtctatcaccctattaaccactcacgggagctctccatgcatttggtattttcgtctggggggtgtgcacgcgatagcattgcgagacgctggagccggagcaccctatgtcgcagtatctgtctttgattcctgccccatcccattatttatcgcacctacgttcaatattacaggcgaacatacctactaaagtgtgttaattaattaatgcttgtaggacataataataacaattgaatgtctgcacagccgctttccacacagacatcataacaaaaaattattccaccaaaccccccctccccccccgcttctggccacagcacttaaacacatctctgccaaaccccaaaaacaaagaaccctaacaccagcctaaccagatttcaaattttatcttttggcggtatgcacttttaacagtcaccccccaactaacacattattttcccctcccactcccatactactaatctcatcaatacaacccccgcccatcctacccagcacacacacaccacacgctgctaaccccataccccgaaccaaccaaaccccaaagacaccccccacagtttatgtagcttacctcctcaaagcaatacactgaaaatgtttagacgggctcacatcaccccataaacaaataggtttggtcctagcctttctattagctcttagtaagattacacatgcaagcatccccgttccagtgagttcaccctctaaatcaccacgatcaaaagggacaagcatcaagcacgcaacaatgcagctcaaaacgcttagcctagccacacccccacgggaaacagcagtgattaacctttagcaataaacgaaagtttaactaagctatactaaccccagggttggtcaatttcgtgccagccaccgcggtcacacgattaacccaagtcaatagaagccggcgtaaagagtgttttagatcaccccctccccaataaagctaaaactcacctgagttgtaaaaaactccagttgacacaaaataaactacgaaagtggctttaacatatctgaacacacaatagctaagacccaaactgggattagataccccactatgcttagccctaaacctcaacagttaaatcaacaaaactgctcgccagaacactacgagccacagcttaaaactcaaaggacctggcggtgcttcatatccctctagaggagcctgttctgtaatcgataaaccccgatcaacctcaccacctcttgctcagcctatataccgccatcttcagcaaaccctgatgaaggctacaaagtaagcgcaagtacccacgtaaagacgttaggtcaaggtgtagcccatgaggtggcaagaaatgggctacattttctaccccagaaaactacgatagcccttatgaaacttaagggtcgaaggtggatttagcagtaaactgagagtagagtgcttagttgaacagggccctgaagcgcgtacacaccgcccgtcaccctcctcaagtatacttcaaaggacatttaactaaaacccctacgcatttatatagaggagacaagtcgtaacatggtaagtgtactggaaagtgcacttggacgaaccagagtgtagcttaacacaaagcacccaacttacacttaggagatttcaacttaacttgaccgctctgagctaaacctagccccaaacccactccaccttactaccagacaaccttagccaaaccatttacccaaataaagtataggcgatagaaattgaaacctggcgcaatagatatagtaccgcaagggaaagatgaaaaattataaccaagcataatatagcaaggactaacccctataccttctgcataatgaattaactagaaataactttgcaaggagagccaaagctaagacccccgaaaccagacgagctacctaagaacagctaaaagagcacacccgtctatgtagcaaaatagtgggaagatttataggtagaggcgacaaacctaccgagcctggtgatagctggttgtccaagatagaatcttagttcaactttaaatttgcccacagaaccctctaaatccccttgtaaatttaactgttagtccaaagaggaacagctctttggacactaggaaaaaaccttgtagagagagtaaaaaatttaacacccatagtaggcctaaaagcagccaccaattaagaaagcgttcaagctcaacacccactacctaaaaaatcccaaacatataactgaactcctcacacccaattggaccaatctatcaccctatagaagaactaatgttagtataagtaacatgaaaacattctcctccgcataagcctgcgtcagattaaaacactgaactgacaattaacagcccaatatctacaatcaaccaacaagtcattattacccccactgtcaacccaacacaggcatgctcataaggaaaggttaaaaaaagtaaaaggaactcggcaaatcttaccccgcctgtttaccaaaaacatcacctctagcatcaccagtattagaggcaccgcctgcccagtgacacatgtttaacggccgcggtaccctaaccgtgcaaaggtagcataatcacttgttccttaaatagggacctgtatgaatggctccacgagggttcagctgtctcttacttttaaccagtgaaattgacctgcccgtgaagaggcgggcatgacacagcaagacgagaagaccctatggagctttaatttattaatgcaaacagtacctaacaaacccacaggtcctaaactactaaacctgcattaaaaatttcggttggggcgacctcggagcagaacccaacctccgagcagtacatgctaagacttcaccagtcaaagcgaactactatactcaattgatccaataacttgaccaacggaacaagttaccctagggataacagcgcaatcctattctagagtccatatcaacaatagggtttacgacctcgatgttggatcaggacatcccgatggtgcagccgctattaaaggttcgtttgttcaacgattaaagtcctacgtgatctgagttcagaccggagtaatccaggtcggtttctatctacnttcaaattcctccctgtacgaaaggacaagagaaataaggcctacttcacaaagcgccttcccccgtaaatgatatcatctcaacttagtattatacccacacccacccaagaacagggtttgttaagatggcagagcccggtaatcgcataaaacttaaaactttacagtcagaggttcaattcctcttcttaacaacatacccatggccaacctcctactcctcattgtacccattctaatcgcaatggcattcctaatgcttaccgaacgaaaaattctaggctatatacaactacgcaaaggccccaacgttgtaggcccctacgggctactacaacccttcgctgacgccataaaactcttcaccaaagagcccctaaaacccgccacatctaccatcaccctctacatcaccgccccgaccttagctctcaccatcgctcttctactatgaacccccctccccatacccaaccccctggttaacctcaacctaggcctcctatttattctagccacctctagcctagccgtttactcaatcctctgatcagggtgagcatcaaactcaaactacgccctgatcggcgcactgcgagcagtagcccaaacaatctcatatgaagtcaccctagccatcattctactatcaacattactaataagtggctcctttaacctctccacccttatcacaacacaagaacacctctgattactcctgccatcatgacccttggccataatatgatttatctccacactagcagagaccaaccgaacccccttcgaccttgccgaaggggaatccgaactagtctcaggcttcaacatcgaatacgccgcaggccccttcgccctattcttcatagccgaatacacaaacattattataataaacaccctcaccactacaatcttcctaggaacaacatatgacgcactctcccctgaactctacacaacatattttgtcaccaagaccctacttctgacctccctgttcttatgaattcgaacagcatacccccgattccgctacgaccaactcatacacctcctatgaaaaaacttcctaccactcaccctagcattacttatatgatatgtctccatacccattacaatctccagcattccccctcaaacctaagaaatatgtctgataaaagagttactttgatagagtaaataataggagcttaaacccccttatttctaggactatgagaatcgaacccatccctgagaatccaaaattctccgtgccacctatcacaccccatcctaaagtaaggtcagctaaataagctatcgggcccataccccgaaaatgttggttatacccttcccgtactaattaatcccctggcccaacccgtcatctactctaccatctttgcaggcacactcatcacagcgctaagctcgcactgattttttacctgagtaggcctagaaataaacatgctagcttttattccagttctaaccaaaaaaataaaccctcgttccacagaagctgccatcaagtatttcctcacgcaagcaaccgcatccataatccttctaatagctatcctcttcaacaatatactctccggacaatgaaccataaccaatactaccaatcaatactcatcattaataatcataatggctatagcaataaaactaggaatagccccctttcacttctgagtcccagaggttacccaaggcacccctctgacatccggcctgcttcttctcacatgacaaaaactagcccccatctcaatcatataccaaatctctccctcactaaacgtaagccttctcctcactctctcaatcttatccatcatagcaggcagttgaggtggattaaaccaaacccagctacgcaaaatcttagcatactcctcaattacccacataggatgaataatagcagttctaccgtacaaccctaacataaccattcttaatttaactatttatattatcctaactactaccgcattcctactactcaacttaaactccagcaccacgaccctactactatctcgcacctgaaacaagctaacatgactaacacccttaattccatccaccctcctctccctaggaggcctgcccccgctaaccggctttttgcccaaatgggccattatcgaagaattcacaaagaacaatagcctcatcatccccaccatcatagccaccatcaccctccttaacctctacttctacctacgcctaatctactccacctcaatcacactactccccatatctaacaacgtaaaaataaaatgacagtttgaacatacaaaacccaccccattcctccccacactcatcgcccttaccacgctactcctacctatctccccttttatactaataatcttatagaaatttaggttaaatacagaccaagagccttcaaagccctcagtaagttgcaatacttaatttctgtaacagctaaggactgcaaaaccccactctgcatcaactgaacgcaaatcagccactttaattaagctaagcccttactagaccaatgggacttaaacccacaaacacttagttaacagctaagcaccctaatcaactggcttcaatctacttctcccgccgccgggaaaaaaggcgggagaagccccggcaggtttgaagctgcttcttcgaatttgcaattcaatatgaaaatcacctcggagctggtaaaaagaggcctaacccctgtctttagatttacagtccaatgcttcactcagccattttacctcacccccactgatgttcgccgaccgttgactattctctacaaaccacaaagacattggaacactatacctattattcggcgcatgagctggagtcctaggcacagctctaagcctccttattcgagccgagctgggccagccaggcaaccttctaggtaacgaccacatctacaacgttatcgtcacagcccatgcatttgtaataatcttcttcatagtaatacccatcataatcggaggctttggcaactgactagtccccctaataatcggtgcccccgatatggcgtttccccgcataaacaacataagcttctgactcttacctccctctctcctactcctgctcgcatctgctatagtggaggccggagcaggaacaggttgaacagtctaccctcccttagcagggaactactcccaccctggagcctccgtagacctaaccatcttctccttacacctagcaggtgtctcctctatcttaggggccatcaatttcatcacaacaattatcaatataaaaccccctgccataacccaataccaaacgcccctcttcgtctgatccgtcctaatcacagcagtcctacttctcctatctctcccagtcctagctgctggcatcactatactactaacagaccgcaacctcaacaccaccttcttcgaccccgccggaggaggagaccccattctataccaacacctattctgatttttcggtcaccctgaagtttatattcttatcctaccaggcttcggaataatctcccatattgtaacttactactccggaaaaaaagaaccatttggatacataggtatggtctgagctatgatatcaattggcttcctagggtttatcgtgtgagcacaccatatatttacagtaggaatagacgtagacacacgagcatatttcacctccgctaccataatcatcgctatccccaccggcgtcaaagtatttagctgactcgccacactccacggaagcaatatgaaatgatctgctgcagtgctctgagccctaggattcatctttcttttcaccgtaggtggcctgactggcattgtattagcaaactcatcactagacatcgtactacacgacacgtactacgttgtagctcacttccactatgtcctatcaataggagctgtatttgccatcataggaggcttcattcactgatttcccctattctcaggctacaccctagaccaaacctacgccaaaatccatttcactatcatattcatcggcgtaaatctaaccttcttcccacaacactttctcggcctatccggaatgccccgacgttactcggactaccccgatgcatacaccacatgaaatatcctatcatctgtaggttcattcatttctctaacagcagtaatattaataattttcatgatttgagaagccttcgcttcgaagcgaaaagtcctaatagtagaagaaccctccataaacctggagtgactatatggatgccccccaccctaccacacattcgaagaacccgtatacataaaatctagacaaaaaaggaaggaatcgaaccccccaaagctggtttcaagccaaccccatggcctccatgactttttcaaaaagatattagaaaaaccatttcataactttgtcaaagttaaattataggctaaatcctatatatcttaatggcacatgcagcgcaagtaggtctacaagacgctacttcccctatcatagaagagcttatcacctttcatgatcacgccctcataatcattttccttatctgcttcctagtcctgtatgcccttttcctaacactcacaacaaaactaactaatactaacatctcagacgctcaggaaatagagaccgtctgaactatcctgcccgccatcatcctagtcctcatcgccctcccatccctacgcatcctttacataacagacgaggtcaacgatccctcccttaccatcaaatcaattggccaccaatggtactgaacctacgagtacaccgactacggcggactaatcttcaactcctacatacttcccccattattcctagaaccaggcgacctgcgactccttgacgttgacaatcgagtagtactcccgattgaagcccccattcgtataataattacatcacaagacgtcttgcactcatgagctgtccccacattaggcttaaaaacagatgcaattcccggacgtctaaaccaaaccactttcaccgctacacgaccgggggtatactacggtcaatgctctgaaatctgtggagcaaaccacagtttcatacccatcgtcctagaattaattcccctaaaaatctttgaaatagggcccgtatttaccctatagcaccccctctaccccctctagagcccactgtaaagctaacttagcattaaccttttaagttaaagattaagagaaccaacacctctttacagtgaaatgccccaactaaatactaccgtatggcccaccataattacccccatactccttacactattcctcatcacccaactaaaaatattaaacacaaactaccacctacctccctcaccaaagcccataaaaataaaaaattataacaaaccctgagaaccaaaatgaacgaaaatctgttcgcttcattcattgcccccacaatcctaggcctacccgccgcagtactgatcattctatttccccctctattgatccccacctccaaatatctcatcaacaaccgactaatcaccacccaacaatgactaatcaaactaacctcaaaacaaatgatagccatacacaacactaaaggacgaacctgatctcttatactagtatccttaatcatttttattgccacaactaacctcctcggactcctgcctcactcatttacaccaaccacccaactatctataaacctagccatggccatccccttatgagcgggcgcagtgattataggctttcgctctaagattaaaaatgccctagcccacttcttaccacaaggcacacctacaccccttatccccatactagttattatcgaaaccatcagcctactcattcaaccaatagccctggccgtacgcctaaccgctaacattactgcaggccacctactcatgcacctaattggaagcgccaccctagcaatatcaaccattaaccttccctctacacttatcatcttcacaattctaattctactgactatcctagaaatcgctgtcgccttaatccaagcctacgttttcacacttctagtaagcctctacctgcacgacaacacataatgacccaccaatcgcatgcctatcatatagtaaaacccagcccatgacccctaacaggggccctctcagccctcctaatgacctccggcctagccatgtgatttcacttccactccataacgctcctcatactaggcctactaaccaacacactaaccatataccaatgatggcgcgatgtaacacgagaaagcacataccaaggccaccacacaccacctgtccaaaaaggccttcgatacgggataatcctatttattacctcagaagtttttttcttcgcaggatttttctgagccttttaccactccagcctagcccctaccccccaactaggagggcactggcccccaacaggcatcaccccgctaaatcccctagaagtcccactcctaaacacatccgtattactcgcatcaggagtatcaatcacctgagctcaccatagtctaatagaaaacaaccgaaaccaaataattcaagcactgcttattacaattttactgggtctctattttaccctcctacaagcctcagagtacttcgagtctcccttcaccatttccgacggcatctacggctcaacattttttgtagccacaggcttccacggacttcacgtcattattggctcaactttcctcactatctgcttcatccgccaactaatatttcactttacatccaaacatcactttggcttcgaagccgccgcctgatactggcattttgtagatgtggtttgactatttctgtatgtctccatctattgatgagggtcttactcttttagtataaatagtaccgttaacttccaattaactagttttgacaacattcaaaaaagagtaataaacttcgccttaattttaataatcaacaccctcctagccttactactaataatcattacattttgactaccacaactcaacggctacatagaaaaatccaccccttacgagtgcggcttcgaccctatatcccccgcccgcgtccctttctccataaaattcttcttagtagctattaccttcttattatttgatctagaaattgccctccttttacccctaccatgagccctacaaacaactaacctgccactaatagttatgtcatccctcttattaatcatcatcctagccctaagtctggcctatgagtgactacaaaaaggattagactgagccgaattggtatatagtttaaacaaaacgaatgatttcgactcattaaattatgataatcatatttaccaaatgcccctcatttacataaatattatactagcatttaccatctcacttctaggaatactagtatatcgctcacacctcatatcctccctactatgcctagaaggaataatactatcgctgttcattatagctactctcataaccctcaacacccactccctcttagccaatattgtgcctattgccatactagtctttgccgcctgcgaagcagcggtgggcctagccctactagtctcaatctccaacacatatggcctagactacgtacataacctaaacctactccaatgctaaaactaatcgtcccaacaattatattactaccactgacatgactttccaaaaaacacataatttgaatcaacacaaccacccacagcctaattattagcatcatccccctactattttttaaccaaatcaacaacaacctatttagctgttccccaaccttttcctccgaccccctaacaacccccctcctaatactaactacctgactcctacccctcacaatcatggcaagccaacgccacttatccagtgaaccactatcacgaaaaaaactctacctctctatactaatctccctacaaatctccttaattataacattcacagccacagaactaatcatattttatatcttcttcgaaaccacacttatccccaccttggctatcatcacccgatgaggcaaccagccagaacgcctgaacgcaggcacatacttcctattctacaccctagtaggctcccttcccctactcatcgcactaatttacactcacaacaccctaggctcactaaacattctactactcactctcactgcccaagaactatcaaactcctgagccaacaacttaatatgactagcttacacaatagcttttatagtaaagatacctctttacggactccacttatgactccctaaagcccatgtcgaagcccccatcgctgggtcaatagtacttgccgcagtactcttaaaactaggcggctatggtataatacgcctcacactcattctcaaccccctgacaaaacacatagcctaccccttccttgtactatccctatgaggcataattataacaagctccatctgcctacgacaaacagacctaaaatcgctcattgcatactcttcaatcagccacatagccctcgtagtaacagccattctcatccaaaccccctgaagcttcaccggcgcagtcattctcataatcgcccacggacttacatcctcattactattctgcctagcaaactcaaactacgaacgcactcacagtcgcatcataatcctctctcaaggacttcaaactctactcccactaatagctttttgatgacttctagcaagcctcgctaacctcgccttaccccccactattaacctactgggagaactctctgtgctagtaaccacattctcctgatcaaatatcactctcctactcacaggactcaacatactagtcacagccctatactccctctacatatttaccacaacacaatggggctcactcacccaccacattaacaacataaaaccctcattcacacgagaaaacaccctcatgttcatacacctatcccccattctcctcctatccctcaaccccgacatcattaccgggttttcctcttgtaaatatagtttaaccaaaacatcagattgtgaatctgacaacagaggcttacgaccccttatttaccgagaaagctcacaagaactgctaactcatgcccccatgtctaacaacatggctttctcaacttttaaaggataacagctatccattggtcttaggccccaaaaattttggtgcaactccaaataaaagtaataaccatgcacactactataaccaccctaaccctgacttccctaattccccccatccttaccaccctcgttaaccctaacaaaaaaaactcatacccccattatgtaaaatccattgtcgcatccacctttattatcagtctcttccccacaacaatattcatgtgcctagaccaagaagttattatctcgaactgacactgagccacaacccaaacaacccagctctccctaagcttcaaactagactacttctccataatattcatccctgtagcattgttcgttacatggtccatcatagaattctcactgtgatatataaactcagacccaaacattaatcagttcttcaagtatctactcattttcctaattaccatactaatcttagttaccgctaacaacctattccaactgttcatcggctgagagggcgtaggaattatatccttcttgctcatcagttgatgatacgcccgagcagatgccaacacagcagccattcaagcaatcctatacaaccgtatcggcgatatcggtttcatcctcgccttagcatgatttatcctacactccaactcatgagacccacaacaaatagcccttctaaacgctaatccaagcctcaccccactactaggcctcctcctagcagcagcaggcaaatcagcccaattaggtctccacccctgactcccctcagccatagaaggccccaccccagtctcagccctactccactcaagcactatagttgtagcaggaatcttcttactcatccgcttccaccccctagcagaaaatagcccactaatccaaactctaacactatgcttaggcgctatcaccactctgttcgcagcagtctgcgcccttacacaaaatgacatcaaaaaaatcgtagccttctccacttcaagtcaactaggactcataatagttacaatcggcatcaaccaaccacacctagcattcctgcacatctgtacccacgccttcttcaaagccatactatttatgtgctccgggtccatcatccacaaccttaacaatgaacaagatattcgaaaaataggaggactactcaaaaccatacctctcacttcaacctccctcaccattggcagcctagcattagcaggaatacctttcctcacaggtttctactccaaagaccacatcatcgaaaccgcaaacatatcatacacaaacgcctgagccctatctattactctcatcgctacctccctaacaagcgcctatagcactcgaataattcttctcaccctaacaggtcaacctcgcttccctacccttactaacattaacgaaaataaccccaccctactaaaccccattaaacgcctggcagccggaagcctattcgcaggatttctcattactaacaacatttcccccgcatcccccttccaaacaacaatccccctctacctaaaactcacggccctcgctgtcactttcctaggacttctaacagccctagacctcaactacctaaccaacaaacttaaaataaaatccccactatgcacattttatttctccaacatactcggattctaccctagcatcacacaccgcacaatcccctatctaggccttcttacgagccaaaacctgcccctactcctcctagacctaacctgactagaaaagctattacctaaaacaatttcacagcaccaaatctccacctccatcatcacctcaacccaaaaaggcataattaaactttacttcctctctttcttcttcccactcatcctaaccttactcctaatcacataacctattcccccgagcaatctcaattacaatatatacaccaacaaacaatgttcaaccagtaactactactaatcaacgcccataatcatacaaagcccccgcaccaataggatcctcccgaatcaaccctgacccctctccttcataaattattcagcttcctacactattaaagtttaccacaaccaccaccccatcatactctttcacccacagcaccaatcctacctccatcgctaaccccactaaaacactcaccaagacctcaacccctgacccccatgcctcaggatactcctcaatagccatcgctgtagtatatccaaagacaaccatcattccccctaaataaattaaaaaaactattaaacccatataacctcccccaaaattcagaataataacacacccgaccacgccgctaacaatcaatactaaacccccataaataggagaaggcttagaagaaaaccccacaaaccccattactaaacccacactcaacagaaacaaagcatacatcattattctcgcacggactacaaccacgaccaatgatatgaaaaaccatcgttgtatttcaactacaagaacaccaatgaccccaatacgcaaaattaaccccctaataaaattaattaaccactcattcatcgacctccccaccccatccaacatctccgcatgatgaaacttcggctcactccttggcgcctgcctgatcctccaaatcaccacaggactattcctagccatgcactactcaccagacgcctcaaccgccttttcatcaatcgcccacatcactcgagacgtaaattatggctgaatcatccgctaccttcacgccaatggcgcctcaatattctttatctgcctcttcctacacatcgggcgaggcctatattacggatcatttctctactcagaaacctgaaacatcggcattatcctcctgcttgcaactatagcaacagccttcataggctatgtcctcccgtgaggccaaatatcattctgaggggccacagtaattacaaacttactatccgccatcccatacattgggacagacctagttcaatgaatctgagggggctactcagtagacagtcccaccctcacacgattctttacctttcacttcatcttacccttcattattgcagccctagcagcactccacctcctattcttgcacgaaacgggatcaaacaaccccctaggaatcacctcccattctgataaaatcaccttccacccttactacacaatcaaagacgccctcggcttacttctcttccttctctccttaatgacattaacactattctcaccagacctcctaggcgacccagacaattataccctagccaaccccttaaacacccctccccacatcaagcccgaatgatatttcctattcgcctacacaattctccgatccgtccctaacaaactaggaggcgtccttgccctactactatccatcctcatcctagcaataatccccatcctccatatatccaaacaacaaagcataatatttcgcccactaagccaatcactttattgactcctagccgcagacctcctcattctaacctgaatcggaggacaaccagtaagctacccctttaccatcattggacaagtagcatccgtactatacttcacaacaatcctaatcctaataccaactatctccctaattgaaaacaaaatactcaaatgggcctgtccttgtagtataaactaatacaccagtcttgtaaaccggagatgaaaacctttttccaaggacaaatcagagaaaaagtctttaactccaccattagcacccaaagctaagattctaatttaaactattctctgttctttcatggggaagcagatttgggtaccacccaagtattgactcacccatcaacaaccgctatgtatttcgtacattactgccagccaccatgaatattgtacggtaccataaatacttgaccacctgtagtacataaaaacccaatccacatcaaaaccccctccccatgcttacaagcaagtacagcaatcaaccttcaactatcacacatcaactgcaactccaaagccacccctcacccactaggatatcaacaaacctacccatccttaacagtacatggtacataaagccatttaccgtacatagcacattacagtcaaatcccttctcgtccccacggatgacccccctcagataggagtcccttgaccaccatcctccgtgaaatcaatatcccgcacaagagtgctactctcctcgctccgggcccataacacttgggggtagctaaagtgaactgtatccgacatctggttcctacttcagggccataaagcctaaatagcccacacgttccccttaaataagacatcacgatg

SEQ ID NO: 158 - DNA, 16570 bp, Homo sapiens mitochondrial
  3108: "n" refers to a nucleotide at position 3107 of the Cambridge Reference Sequence (CRS, Anderson et al. 1981 Nature 290:457-465), later determined to be absent from the human mtDNA sequence according to the revised CRS (rCRS, Andrews et al. 1999 Nature Genetics 23:147); "n" therefore represents a single nucleotide deletion at a position corresponding to nucleotide 3107 of SEQ ID NO:1 as provided herein.
gatcacaggtctatcaccctattaaccactcacgggagctctccatgcatttggtattttcgtctggggggtgtgcacgcgatagcattgcgagacgctggagccggagcaccctatgtcgcagtatctgtctttgattcctgcctcatcctattatttatcgcacctacgttcaatattacaggcgaacatacttactaaagtgtgttaattaattaatgcttgtaggacataataataacaattgaatgtctgcacagccgctttccacacagacatcataacaaaaaatttccaccaaaccccccctcccccgccttctggccacagcacttaaacacatctctgccaaaccccaaaaacaaagaaccctaacaccagcctaaccagatttcaaattttatcttttggcggtatgcacttttaacagtcaccccccaactaacacattattttcccctcccactcccatactactaatctcatcaatacaaccctcgcccatcctacccagcacacacacaccgctgctaaccccataccccgaaccaaccaaaccccaaagacaccccccacagtttatgtagcttacctcctcaaagcaatacactgaaaatgtttagacgggctcacatcaccccataaacaaataggtttggtcctagcctttctattagctcttagtaagattacacatgcaagcatccccgttccagtgagttcaccctctaaatcaccacgatcaaaagggacaagcatcaagcacgcagcaatgcagctcaaaacgcttagcctagccacacccccacgggaaacagcagtgattaacctttagcaataaacgaaagtttaactaagctatactaaccccagggttggtcaatttcgtgccagccaccgcggtcacacgattaacccaagtcaatagaagccggcgtaaagggtgttttagatcaccccctccccaataaagctaaaactcacctgagttgtaaaaaactccagttgacacaaaatagactacgaaagtggctttaacatatctgaacacacaatagctaagacccaaactgggattagataccccactatgcttagccctaaacctcaacagttaaatcaacaaaactgctcgccagaacactacgagccacagcttaaaactcaaaggacctggcggtgcttcatacccctctagaggagcctgttctgtaatcgataaaccccgatcaacctcaccacctcttgctcagcctatataccgccatcttcagcaaaccctgatgaaggctacaaagtaagcgcaagtacccacgtaaagacgttaggtcaaggtgtagcccatgaggtggcaagaaatgggctacattttctaccccagaaaactacgatagcccttatgaaacttaagggtcgaaggtggatttagcagtaaactgagagtagagtgcttagttgaacagggccctgaagcgcgtacacaccgcccgtcaccctcctcaagtatacttcaaaggacatttaactaaaacccctacgcatttatatagaggagacaagtcgtaacatggtaagtgtactggaaagtgcacttggacgaaccagagtgtagcttaacacaaagcacccaacttacacttaggagatttcaacttaacttgaccgctctgagctaaacctagccccaaacccactccaccttactaccagacaaccttagccaaaccatttacccaaataaagtataggcgatagaaattgaaacctggcgcaatagatatagtaccgcaagggaaagatgaaaaattatagccaagcataatatagcaaggactaacccctataccttctgcataatgaattaactagaaataactttgcaaggagagccaaagctaagacccccgaaaccagacgagctacctaagaacagctaaaagagcacacccgtctatgtagcaaaatagtgggaagatttataggtagaggcgacaaacctaccgagcctggtgatagctggttgtccaagatagaatcttagttcaactttaaatttgcccacagaaccctctaaatccccttgtaaatttaactgttagtccaaagaggaacagctctttggacactaggaaaaaaccttgtagagagagtaaaaaatttaacacccatagtaggcctaaaagcagccaccaattaagaaagcgttcaagctcaacacccactacctaaaaaatcccaaacatataactgaactcctcacacccaattggaccaatctatcaccctatagaagaactaatgttagtataagtaacatgaaaacattctcctccgcataagcctgcgtcagattaaaacactgaactgacaattaacagcccaatatctacaatcaaccaacaagtcattattaccctcactgtcaacccaacacaggcatgctcataaggaaaggttaaaaaaagtaaaaggaactcggcaaatcttaccccgcctgtttaccaaaaacatcacctctagcatcaccagtattagaggcaccgcctgcccagtgacacatgtttaacggccgcggtaccctaaccgtgcaaaggtagcataatcacttgttccttaaatagggacctgtatgaatggctccacgagggttcagctgtctcttacttttaaccagtgaaattgacctgcccgtgaagaggcgggcatgacacagcaagacgagaagaccctatggagctttaatttattaatgcaaacagtacctaacaaacccacaggtcctaaactaccaaacctgcattaaaaatttcggttggggcgacctcggagcagaacccaacctccgagcagtacatgctaagacttcaccagtcaaagcgaactactatactcaattgatccaataacttgaccaacggaacaagttaccctagggataacagcgcaatcctattctagagtccatatcaacaatagggtttacgacctcgatgttggatcaggacatcccgatggtgcagccgctattaaaggttcgtttgttcaacgattaaagtcctacgtgatctgagttcagaccggagtaatccaggtcggtttctatctacnttcaaattcctccctgtacgaaaggacaagagaaataaggcctacttcacaaagcgccttcccccgtaaatgatatcatctcaacttagtattatacccacacccacccaagaacagggtttgttaagatggcagagcccggtaatcgcataaaacttaaaactttacagtcagaggttcaattcctcttcttaacaacatacccatggccaacctcctactcctcattgtacccattctaatcgcaatggcattcctaatgcttaccgaacgaaaaattctaggctatatacaactacgcaaaggccccaacgttgtaggcccctacgggctactacaacccttcgctgacgccataaaactcttcaccaaggagcccctaaaacccgccacatctaccatcaccctctacatcaccgccccgaccttagctctcaccatcgctcttctactatgaacccccctccccatacccaaccccctggtcaacctcaacctaggcctcctatttattctagccacctctagcctagccgtttactcaatcctctgatcagggtgagcatcaaactcaaactacgccctgatcggcgcactgcgagcagtagcccaaacaatctcatatgaagtcaccctagccatcattctactatcaacattactaataagtggctcctttaacctctccacccttatcacaacacaagaacacctctgattactcctgccatcatgacccttggccataatatgatttatctccacactagcagagaccaaccgaacccccttcgaccttgccgaaggggagtccgaactagtctcaggcttcaacatcgaatacgccgcaggccccttcgccctattcttcatagccgaatacacaaacattattataataaacaccctcaccactacaatcttcctaggaacaacatatgacgcactctcccctgaactctacacaacatattttgtcaccaagaccctacttctaacctccctgttcttatgaattcgaacagcatacccccgattccgctacgaccaactcatacacctcctatgaaaaaacttcctaccactcaccctagcattacttatatgatatgtctccatacccattacaatctccagcattccccctcaaacctaagaaatatgtctgataaaagagttactttgatagagtaaataataggagcttaaacccccttatttctaggactatgagaatcgaacccatccctgagaatccaaaattctccgtgccacctatcacaccccatcctaaagtaaggtcagctaaataagctatcgggcccataccccgaaaatgttggttatacccttcccgtactaattaatcccctggcccaacccgtcatctactctaccatctttgcaggcacactcatcacagcgctaagctcgcactgattttttacctgagtaggcctagaaataaacatgctagcttttattccagttctaaccaaaaaaataaaccctcgttccacagaagctgccatcaagtatttcctcacgcaagcaaccgcatccataatccttctaatagctatcctcttcaacaatatactctccggacaatgaaccataaccaatactaccaatcaatactcatcattaataatcataatggctatagcaataaaactaggaatagccccctttcacttctgagtcccagaggttacccaaggcacccctctgacatccggcctgcttcttctcacatgacaaaaactagcccccatctcaatcatataccaaatctctccctcactaaacgtaagccttctcctcactctctcaatcttatccatcatagcaggcagttgaggtggattaaaccaaacccagctacgcaaaatcttagcatactcctcaattacccacataggatgaataatagcagttctaccgtacaaccctaacataaccattcttaatttaactatttatattatcctaactactaccgcattcctactactcaacttaaactccagcaccacgaccctactactatctcgcacctgaaacaagctaacatgactaacacccttaattccatccaccctcctctccctaggaggcctgcccccgctaaccggctttttgcccaaatgggccattatcgaagaattcacaaaaaacaatagcctcatcatccccaccatcatagccaccatcaccctccttaacctctacttctacctacgcctaatctactccacctcaatcacactactccccatatctaacaacgtaaaaataaaatgacagtttgaacatacaaaacccaccccattcctccccacactcatcgcccttaccacgctactcctacctatctccccttttatactaataatcttatagaaatttaggttaaatacagaccaagagccttcaaagccctcagtaagttgcaatacttaatttctgtaacagctaaggactgcaaaaccccactctgcatcaactgaacgcaaatcagccactttaattaagctaagcccttactagaccaatgggacttaaacccacaaacacttagttaacagctaagcaccctaatcaactggcttcaatctacttctcccgccgccgggaaaaaaggcgggagaagccccggcaggtttgaagctgcttcttcgaatttgcaattcaatatgaaaatcacctcggagctggtaaaaagaggcctaacccctgtctttagatttacagtccaatgcttcactcagccattttacctcacccccactgatgttcgccgaccgttgactattctctacaaaccacaaagacattggaacactatacctattattcggcgcatgagctggagtcctaggcacagctctaagcctccttattcgagccgagctgggccagccaggcaaccttctaggtaacgaccacatctacaacgttatcgtcacagcccatgcatttgtaataatcttcttcatagtaatacccatcataatcggaggctttggcaactgactagttcccctaataatcggtgcccccgatatggcgtttccccgcataaacaacataagcttctgactcttacctccctctctcctactcctgctcgcatctgctatagtggaggccggagcaggaacaggttgaacagtctaccctcccttagcagggaactactcccaccctggagcctccgtagacctaaccatcttctccttacacctagcaggtgtctcctctatcttaggggccatcaatttcatcacaacaattatcaatataaaaccccctgccataacccaataccaaacgcccctcttcgtctgatccgtcctaatcacagcagtcctacttctcctatctctcccagtcctagctgctggcatcactatactactaacagaccgcaacctcaacaccaccttcttcgaccccgccggaggaggagaccccattctataccaacacctattctgatttttcggtcaccctgaagtttatattcttatcctaccaggcttcggaataatctcccatattgtaacttactactccggaaaaaaagaaccatttggatacataggtatggtctgagctatgatatcaattggcttcctagggtttatcgtgtgagcacaccatatatttacagtaggaatagacgtagacacacgagcatatttcacctccgctaccataatcatcgctatccccaccggcgtcaaagtatttagctgactcgccacactccacggaagcaatatgaaatgatctgctgcagtgctctgagccctaggattcatctttcttttcaccgtaggtggcctgactggcattgtattagcaaactcatcactagacatcgtactacacgacacgtactacgttgtagctcacttccactatgtcctatcaataggagctgtatttgccatcataggaggcttcattcactgatttcccctattctcaggctacaccctagaccaaacctacgccaaaatccatttcactatcatattcatcggcgtaaatctaactttcttcccacaacactttctcggcctatccggaatgccccgacgttactcggactaccccgatgcatacaccacatgaaacatcctatcatctgtaggctcattcatttctctaacagcagtaatattaataattttcatgatttgagaagccttcgcttcgaagcgaaaagtcctaatagtagaagaaccctccataaacctggagtgactatatggatgccccccaccctaccacacattcgaagaacccgtatacataaaatctagacaaaaaaggaaggaatcgaaccccccaaagctggtttcaagccaaccccatggcctccatgactttttcaaaaaggtattagaaaaaccatttcataactttgtcaaagttaaattataggctaaatcctatatatcttaatggcacatgcagcgcaagtaggtctacaagacgctacttcccctatcatagaagagcttatcacctttcatgatcacgccctcataatcattttccttatctgcttcctagtcctgtatgcccttttcctaacactcacaacaaaactaactaatactaacatctcagacgctcaggaaatagaaaccgtctgaactatcctgcccgccatcatcctagtcctcatcgccctcccatccctacgcatcctttacataacagacgaggtcaacgatccctcccttaccatcaaatcaattggccaccaatggtactgaacctacgagtacaccgactacggcggactaatcttcaactcctacatacttcccccattattcctagaaccaggcgacctgcgactccttgacgttgacaatcgagtagtactcccgattgaagcccccattcgtataataattacatcacaagacgtcttgcactcatgagctgtccccacattaggcttaaaaacagatgcaattcccggacgtctaaaccaaaccactttcaccgctacacgaccgggggtatactacggtcaatgctctgaaatctgtggagcaaaccacagtttcatgcccatcgtcctagaattaattcccctaaaaatctttgaaatagggcccgtatttaccctatagcaccccctctaccccctctagagcccactgtaaagctaacttagcattaaccttttaagttaaagattaagagaaccaacacctctttacagtgaaatgccccaactaaatactaccgtatggcccaccataattacccccatactccttacactattcctcatcacccaactaaaaatattaaacacaaactaccacctacctccctcaccaaagcccataaaaataaaaaattataacaaaccctgagaaccaaaatgaacgaaaatctgttcgcttcattcattgcccccacaatcctaggcctacccgccgcagcactgatcattctatttccccctctattgatccccacctccaaatatctcatcaacaaccgactaatcaccacccaacaatgactaatcaaactaacctcaaaacaaatgataaccatacacaacactaaaggacgaacctgatctcttatactagtatccttaatcatttttattgccacaactaacctcctcggactcctgcctcactcatttacaccaaccacccaactatctataaacctagccatggccatccccttatgagcgggcgcagtgattataggctttcgctctaagattaaaaatgccctagcccacttcttaccacaaggcacacctacaccccttatccccatactagttattatcgaaaccatcagcctactcattcaaccaatagccctggccgtacgcctaaccgctaacattactgcaggccacctactcatgcacctaattggaagcaccaccctagcaatatcaaccattaaccttccctctacacttatcatcttcacaattctaattctactgactatcctagaaatcgctgtcgccttaatccaagcctacgttttcacacttctagtaagcctctacctgcacgacaacacataatgacccaccaatcacatgcctatcatatagtaaaacccagcccatgacccctaacaggggccctctcagccctcctaatgacctccggcctagccatgtgatttcacttccactccataacgctcctcatactaggcctactaaccaacacactaaccatataccaatgatggcgcgatgtaacacgagaaagcacataccaaggccaccacacaccacctgtccaaaaaggccttcgatacgggataatcctatttattacctcagaagtttttttcttcgcaggatttttctgagccttttaccactccagcctagcccctaccccccaattaggagggcactggcccccaacaggcatcaccccgctaaatcccctagaagtcccactcctaaacacatccgtattactcgcatcaggagtatcaatcacctgagctcaccatagtctaatagaaagcaaccgaaaccaaataattcaagcactgctcattacaattttactgggtctctattttaccctcctacaagcctcagagtacttcgagtctcccttcaccatttccgacggcatctacggctcaacattttttgtagccacaggcttccacggacttcacgtcattattggctcaactttcctcactatctgcttcatccgccaactaatatttcactttacatccaaacatcactttggcttcgaagccgccgcctgatactggcattttgtagatgtggtttgactatttctgtatgtctccatctattgatgagggtcttactcttttagtataaatagtaccgttaacttccaattaactagttttgacaacattcaaaaaagagtaataaacttcgccttaattttaataatcaacaccctcctagccttactactaataattattacattttgactaccacaactcaacggctacatagaaaaatccaccccttacgagtgcggcttcgaccctatatcccccgcccgcgtccctttctccataaaattcttcttagtagctattaccttcttattatttgatctagaaattgccctccttttacccctaccatgagccctacaaacaactaacctgccactaatagttatgtcatccctcttattaatcatcatcctagccctaagtctggcctatgagtgactacaaaaaggattagactgagccgaattggtatatagtttaaacaaaacgaatgatttcgactcattaaattatgataatcatatttaccaaatgcccctcatttacataaatattatactagcatttaccatctcacttctaggaatactagtatatcgctcacacctcatgtcctccctattatgcctagaaggaataatactatcgctgttcattatagctactctcataaccctcaacacccactccctcttagccaatattgtgcctattgccatactagtctttgccgcctgcgaagcagcggtgggcctagccctactagtctcaatctccaacacatatggcctagactacgtacataacctaaacctactccaatgctaaaactaatcgtcccaacaattatattactaccactgacatgactttccaaaaaacacataatttgaatcaacacaaccacccacagcctaattattagcatcatccctctactattttttaaccaaatcaacaacaacctatttagctgttccccaaccttttcctccgaccccctaacaacccccctcctaatactaactacctgactcctacccctcacaatcatggcaagccaacgccacttatccagtgaaccactatcacgaaaaaaactctacctctctatactaatctccctacaaatctccttaattataacattcacagccacagaactaatcatattttatatcttcttcgaaaccacacttatccccaccttggctatcatcacccgatgaggcaaccagccagaacgcctgaacgcaggcacatacttcctattctacaccctagtaggctcccttcccctactcatcgcactaatttacactcacaacaccctaggctcactaaacattctactactcaccctcactgcccaagaactatcaaactcctgagccaacaacttaatatgactagcttacacaatagcttttatagtaaagatacctctttacggactccacttatgactccctaaagcccatgtcgaagcccccatcgctgggtcaatagtacttgccgcagtactcttgaaactaggcggctatggcataatacgcctcacactcattctcaaccccctgacaaaacacatagcctaccccttccttgtactatccctatgaggcataattataacaagctccatctgcctacgacaaacagacctaaaatcgctcattgcatactcttcaatcagccacatagccctcgtagtaacagccattctcatccaaaccccctgaagcttcaccggcgcagtcattctcataatcgcccacggacttacatcctcattactattctgcctagcaaactcaaactacgaacgcactcacagtcgcatcataatcctctctcaaggacttcaaactctactcccactaatagctttttgatgacttctagcaagcctcgctaacctcgccttaccccccactattaacctactgggagaactctctgtgctagtaaccacgttctcctgatcaaatatcactctcctacttacaggactcaacatactagtcacagccctatactccctctacatatttaccacaacacaatggggctcactcacccaccacattaacaacataaaaccctcattcacacgagaaaacaccctcatgttcatacacctatcccccattctcctcctatccctcaaccccgacatcattaccgggttttcctcttgtaaatatagtttaaccaaaacatcagattgtgaatctgacaacagaggcttacgaccccttatttaccgagaaagctcacaagaactgctaactcatgcccccatgtctaacaacatggctttctcaacttttaaaggataacagctatccattggtcttaggccccaagaattttggtgcaactccaaataaaagtaataaccatgcacactactataaccaccctaaccctaacttccctaattccccccatccttaccaccctcgttaaccctaacaaaaaaaactcatacccccattatgtaaaatccattgtcgcatccacctttattatcagtctcttccccacaacaatattcatgtgcctagaccaagaagttattatctcgaactgacactgagccacaacccaaacaacccagctctccctaagcttcaaactagactacttctccataatattcatccctgtagcattgttcgttacatggtccatcatagaattctcactgtgatatataaactcagacccaaacattaatcagttcttcaaatatctactcatcttcctaattaccatactaatcttagttaccgctaacaacctattccaactgttcatcggctgagagggcgtaggaattatatccttcttgctcatcagttgatgatacgcccgagcagatgccaacacagcagccattcaagcaatcctatacaaccgtatcggcgatatcggtttcatcctcgccttagcatgatttatcctacactccaactcatgagacccacaacaaatagcccttctaaacgctaatccaagcctcaccccactactaggcctcctcctagcagcagcaggcaaatcagcccaattaggtctccacccctgactcccctcagccatagaaggccccaccccagtctcagccctactccactcaagcactatagttgtagcaggaatcttcttactcatccgcttccaccccctagcagaaaatagcccactaatccaaactctaacactatgcttaggcgctatcaccactctgttcgcagcagtctgcgcccttacacaaaatgacatcaaaaaaatcgtagccttctccacttcaagtcaactaggactcataatagttacaatcggcatcaaccaaccacacctagcattcctgcacatctgtacccacgccttcttcaaagccatactatttatgtgctccgggtccatcatccacaaccttaacaatgaacaagatattcgaaaaataggaggactactcaaaaccatacctctcacttcaacctccctcaccattggcagcctagcattagcaggaatacctttcctcacaggtttctactccaaagaccacatcatcgaaaccgcaaacatatcatacacaaacgcctgagccctatctattactctcatcgctacctccctgacaagcgcctatagcactcgaataattcttctcaccctaacaggtcaacctcgcttccccacccttactaacattaacgaaaataaccccaccctactaaaccccattaaacgcctggcagccggaagcctattcgcaggatttctcattactaacaacatttcccccgcatcccccttccaaacaacaatccccctctacctaaaactcacagccctcgctgtcactttcctaggacttctaacagccctagacctcaactacctaaccaacaaacttaaaataaaatccccactatgcacattttatttctccaacatactcggattctaccctagcatcacacaccgcacaatcccctatctaggccttcttacgagccaaaacctgcccctactcctcctagacctaacctgactagaaaagctattacctaaaacaatttcacagcaccaaatctccacctccatcatcacctcaacccaaaaaggcataattaaactttacttcctctctttcttcttcccactcatcctaaccctactcctaatcacataacctattcccccgagcaatttcaattacaatatatacaccaacaaacaatgttcaaccagtaactactactaatcaacgcccataatcatacaaagcccccgcaccaataggatcctcccgaatcaaccctgacccctctccttcataaattattcagcttcctacactattaaagtttaccacaaccaccaccccatcatactctttcacccacagcaccaatcctacctccatcgctaaccccactaaaacactcaccaagacctcaacccctgacccccatgcctcaggatactcctcaatagccatcgctgtagtatatccaaagacaaccatcattccccctaaataaattaaaaaaactattaaacccatataacctcccccaaaattcagaataataacacacccgaccacaccgctaacaatcaatactaaacccccataaataggagaaggcttagaagaaaaccccacaaaccccattactaaacccacactcaacagaaacaaagcatacatcattattctcgcacggactacaaccacgaccaatgatatgaaaaaccatcgttgtatttcaactacaagaacaccaatgaccccaatacgcaaaattaaccccctaataaaattaattaaccactcactcatcgacctccccaccccatccaacatctccgcatgatgaaacttcggctcactccttggcgcctgcctgatcctccaaatcaccacaggactattcctagccatgcactactcaccagacgcctcaaccgccttttcatcaatcgcccacatcactcgagacgtaaattatggctgaatcatccgctaccttcacgccaatggcgcctcaatattctttatctgcctcttcctacacatcgggcgaggcctatattacggatcatttctctactcagaaacctgaaacatcggcattatcctcctgcttgcaactatagcaacagccttcataggctatgtcctcccgtgaggccaaatatcattctgaggggccacagtaattacaaacttactatccgccatcccatacattgggacagacctagttcaatgaatctgaggaggctactcagtagacagtcccaccctcacacgattctttacctttcacttcatcttgcccttcattattgcagccctagcagcactccacctcctattcttgcacgaaacgggatcaaacaaccccctaggaatcacctcccattccgataaaatcaccttccacccttactacacaatcaaagacgccctcggcttacttctcttccttctctccttaatgacattaacactattctcaccagacctcctaggcgacccagacaattataccctagccaaccccttaaacacccctccccacatcaagcccgaatgatatttcctattcgcctacacaattctccgatccgtccctaacaaactaggaggcgtccttgccctattactatccatcctcatcctagcaataatccccatcctccatatatccaaacaacaaagcataatatttcgcccactaagccaatcactttattgactcctagccgcagacctcctcattctaacctgaatcggaggacaaccagtaagctacccttttaccatcattggacaagtagcatccgtactatacttcacaacaatcctaatcctaataccaactatctccctaattgaaaacaaaatactcaaatgggcctgtccttgtagtataaactaatacaccagtcttgtaaaccggagatgaaaacctttttccaaggacaaatcagagaaaaagtctttaactccaccattagcacccaaagctaagattctaatttaaactattctctgttctttcatggggaagcagatttgggtaccacccaagtattgactcacccatcaacaaccgctatgtatctcgtacattactgccagccaccatgaatattgtacggtaccataaatacttgaccacctgtagtacataaaaacccaatccacatcaaaaccccctccccatgcttacaagcaagtacagcaatcaaccctcaactatcacacatcaactgcaactccaaagccacccctcacccactaggataccaacaaacctacccacccttaacagtacatagcacataaagccatttaccgtacatagcacattacagtcaaatcccttctcgtccccatggatgacccccctcagataggggtcccttgaccaccatcctccgtgaaatcaatatcccgcacaagagtgctactctcctcgctccgggcccataacacttgggggtagctaaagtgaactgtatccgacatctggttcctacttcagggccataaagcctaaatagcccacacgttccccttaaataagacatcacgatg

SEQ ID NO: 159 - DNA, 16568 bp, Homo sapiens mitochondrial
  3106: "n" refers to a nucleotide at position 3107 of the Cambridge Reference Sequence (CRS, Anderson et al. 1981 Nature 290:457-465), later determined to be absent from the human mtDNA sequence according to the revised CRS (rCRS, Andrews et al. 1999 Nature Genetics 23:147); "n" therefore represents a single nucleotide deletion at a position corresponding to nucleotide 3107 of SEQ ID NO:1 as provided herein.
gatcacaggtctatcaccctattaaccactcacgggagctctccatgcatttggtattttcgtctggggggtgtgcacgcgatagcattgcgagacgctggagccggagcaccctatgtcgcagtatctgtctttgattcctgcctcatcccattatttatcgcacctacgttcaatattatagtcgagcatacctattaaagtgtgttaattaattaatgcttgtaggacataataataacaattaaatgtctgcacagccgctttccacacagacatcataacaaaaaatttccaccaaaccccccctcccccgccttctggccacagcacttaaacacatctctgccaaaccccgaaaacaaagaaccctaacaccagcctaaccagatttcaaattttatcttttggcggtatgcacttttaacagtcaccccccaactaacacattattttcccctcccactcccatactactaatctcatcaatacaacccccgcccatcctacccagcacacacaccgctgctaaccccataccccgaaccaaccaaaccccaaagacaccccccacagtttatgtagcttacctcctcaaagcaatacactgaaaatgtttagacgggctcacatcaccccataaacaaataggtttggtcctagcctttctattagctcttagtaagattacacatgcaagcatccccactccagtgagttcaccctctaaatcaccacgatcaaaagggacaagcatcaagcacgcaacaatgcagctcaaaacgcttagcctagccacacccccacgggaaacagcagtgataaacctttagcaataaacgaaagtttaactaagctatactaaccccagggttggtcaatttcgtgccagccaccgcggtcacacgattaacccaagtcaatagaagccggcgtaaagagtgttttagatcaccccctccccaataaagctaaaactcacctgagttgtaaaaaactccagttgacacaaaataaactacgaaagtggctttaacatatctgaacacacaatagctaagacccaaactgggattagataccccactatgcttagccctaaacctcaacagttaaatcaacaaaactgctcgccagaacactacgagccacagcttaaaactcaaaggacctggcggtgcttcatatccctctagaggagcctgttctgtaatcgataaaccccgatcaacctcaccacctcttgctcagcctatataccgccatcttcagcaaaccctgatgaaggctacaaagtaagcgcaagtacccacgtaaagacgttaggtcaaggtgtagcccatgaggtggcaagaaatgggctacattttctaccccagaaaactacgatagcccttatgaaacttaagggtcgaaggtggatttagcagtaaactaagagtagagtgcttagttgaacagggccctgaagcgcgtacacaccgcccgtcaccctcctcaagtatacttcaaaggacatttaactaaaacccctacgcatttatatagaggagacaagtcgtaacatggtaagtgtactggaaagtgcacttggacgaaccagagtgtagcttaacacaaagcacccaacttacacttaggagatttcaacttaacttgaccgctctgagctaaacctagccccaaacccactccaccttactaccagacaaccttagccaaaccatttacccaaacaaagtataggcgatagaaattgaaacctggcgcaatagatatagtaccgcaagggaaagatgaaaaattataaccaagcataatatagcaaggactaacccctataccttctgcataatgaattaactagaaataactttgcaaggagagccaaagctaagacccccgaaaccagacgagctacctaagaacagctaaaagagcacacccgtctatgtagcaaaatagtgggaagatttataggtagaggcgacaaacctaccgagcctggtgatagctggttgtccaagatagaatcttagttcaactttaaatttgcccacagaaccctctaaatccccttgtaaatttaactgttagtccaaagaggaacagctctttggacactaggaaaaaaccttgtagagagagtaaaaaatttaacacccatagtaggcctaaaagcagccaccaattaagaaagcgttcaagctcaacacccactacctaaaaaatcccaaacatataactgaactcctcacacccaattggaccaatctatcaccctatagaagaactaatgttagtataagtaacatgaaaacattctcctccgcataagcctgcgtcagatcaaaacactgaactgacaattaacagcccaatatctacaatcaaccaacaagtcattattaccctcactgtcaacccaacacaggcatgctcataaggaaaggttaaaaaaagtaaaaggaactcggcaaatcttaccccgcctgtttaccaaaaacatcacctctagcatcaccagtattagaggcaccgcctgcccagtgacacatgtttaacggccgcggtaccctaaccgtgcaaaggtagcataatcacttgttccttaaatagggacctgtatgaatggctccacgagggttcagctgtctcttacttttaaccagtgaaattgacctgcccgtgaagaggcgggcatgacacagcaagacgagaagaccctatggagctttaatttattaatgcaaacaatacctaacagacccacaggtcctaaactaccaaacctgcattaaaaatttcggttggggcgacctcggagcagaacccaacctccgagcagtacatgctaagacttcaccagtcaaagcgaactaccatactcaattgatccaataacttgaccaacggaacaagttaccctagggataacagcgcaatcctattctagagtccatatcaacaatagggtttacgacctcgatgttggatcaggacatcccgatggtgcagccgctattaaaggttcgtttgttcaacgattaaagtcctacgtgatctgagttcagaccggagtaatccaggtcggtttctatctacnttcaaattcctccctgtacgaaaggacaagagaaataaggcctacttcacaaagcgccttcccccgtaaatgatatcatctcaacttagtattatacccacacccacccaagaacagggtttgttaagatggcagagcccggtaatcgcataaaacttaaaactttacagtcagaggttcaattcctcttcttaacaacacacccatggccaacctcctactcctcattgtacccattctaatcgcaatggcattcctaatgcttaccgaacgaaaaattctaggctatatacaactacgcaaaggccccaacgttgtaggcccctacgggctactacaacccttcgctgacgccataaaactcttcaccaaagagcccctaaaacccgccacatctaccatcaccctctacatcaccgccccgaccttagctctcaccatcgctcttctactatgaacccccctccccatacccaaccccctggttaacctcaacctaggcctcctatttattctagccacctctagcctagccgtttactcaatcctctgatcaggatgagcatcaaactcaaactacgccctaatcggcgcactgcgagcagtagcccaaacaatctcatatgaagtcaccctagccatcattctactatcaacattactaataagtggctcctttaacctctccacccttatcacaacacaagaacacctctgattactcctgccatcatgacccttggccataatatgatttatctccacactagcagagaccaaccgaacccccttcgaccttgccgaaggggagtccgaactagtctcaggcttcaacatcgaatacgccgcaggccccttcgccctattcttcatagccgaatacacaaacattattataataaacaccctcaccactacaatcttcctaggaacaacatatgacgcactctcccctgaactctacacaacatattttgtcaccaagaccctacttctgacctccctgttcttatgaattcgaacagcatacccccgattccgctacgaccaactcatacacctcctatgaaaaaacttcctaccactcaccctagcattacttatatgatatgtctccatacccattacaatctccagcattccccctcaaacctaagaaatatgtctgataaaagagttactttgatagagtaaataataggagcttaaacccccttatttctaggactatgagaatcgaacccatccctgagaatccaaaattctccgtgccacctatcacaccccatcctaaagtaaggtcagctaaataagctatcgggcccataccccgaaaatgttggttatacccttcccgtactaattaatcccctggcccaacccgtcatctactctaccatctttgcaggcacactcatcacagcgctaagctcgcactgattttttacctgagtaggcctagaaataaacatgctagcttttattccagttctaaccaaaaaaataaaccctcgttccacagaagctgccatcaagtatttcctcacgcaagcaaccgcatccataatccttctaatagctatcctcttcaacaatatactctccggacaatgaaccataaccaatactaccaatcaatactcatcattaataatcataatggctatagcaataaaactaggaatagccccctttcacttctgagtcccagaggttacccaaggcacccctctgacatccggcctgcttcttctcacatgacaaaaactagcccccatctcaatcatataccaaatctctccctcactaaacgtaagccttctcctcactctctcaatcttatccatcatagcaggcagttgaggtggattaaaccaaacccagctacgcaaaatcttagcatactcctcaattacccacataggatggataatagcaattctaccgtacaaccctaacataaccattcttaatttaactatttatattatcctaactactaccgcattcctactactcaacttaaactccagcaccacgaccctactactatctcgcacctgaaacaagctaacatgactaacacccttaattccatccaccctcctctccctaggaggcctgcccccgctaaccggctttttgcccaaatgggccattatcgaagaattcacaaaaaacaatagcctcatcatccccaccatcatagccaccatcaccctccttaacctctacttctacctacgcctaatctactccacctcaatcacactactccccatatccaacaacgtaaaaataaaatgacagtttgaacatacaaaacccaccccattcctccccacactcatcgcccttaccacgctactcctacctatctccccttttatactaataatcttatagaaatttaggttaaatacagaccaagagccttcaaagccctcagtaagttgcaatacttaatttctgtaacagctaaggactgcaaaaccccactctgcatcaactgaacgcaaatcagccactttaattaagctaagccctcactagaccaatgggacttaaacccacaaacacttagttaacagctaagcaccctaatcaactggcttcaatctacttctcccgccgccgggaaaaaaggcgggagaagccccggcaggtttgaagctgcttcttcgaatttgcaattcaatatgaaaatcacctcggagctggtaaaaagaggcctaacccctgtctttagatttacagtccaatgcttcactcagccattttacctcacccccactgatgttcgccgaccgttgactattctctacaaaccacaaagacattggaacactatacctattattcggcgcatgagctggagtcctaggcacagctctaagcctccttattcgagccgagctgggccagccaggcaaccttctaggtaacgaccacatctacaacgttatcgtcacagcccatgcatttgtaataatcttcttcatagtaatacccatcataatcggaggctttggcaactgactagttcccctaataatcggtgcccccgatatggcgtttccccgcataaacaacataagcttctgactcttacctccctctctcctactcctgctcgcatctgctatagtggaggccggagcaggaacaggttgaacagtctaccctcccttagcagggaactactcccaccctggagcctccgtagacctaaccatcttctccttacacctagcaggtgtctcctctatcttaggggccatcaatttcatcacaacaattatcaatataaaaccccctgccataacccaataccaaacgcccctcttcgtctgatccgtcctaatcacagcagtcctacttctcctatctctcccagtcctagctgctggcatcactatactactaacagaccgcaaccttaacaccaccttcttcgaccccgccggaggaggagaccccattctataccaacacctattctgatttttcggtcaccctgaagtttatattcttatcctaccaggcttcggaataatctcccatattgtaacttactactccggaaaaaaagaaccatttggatacataggtatggtctgagctatgatatcaattggcttcctagggtttatcgtgtgagcacaccatatatttacagtaggaatagacgtagacacacgagcatatttcacctccgccaccataatcatcgctatccccaccggcgtcaaagtatttagctgactcgccacactccacggaagcaatatgaaatgatctgctgcagtgctctgagccctaggattcatctttcttttcaccgtaggtggcctgactggcattgtattagcaaactcatcgctagacatcgtactacacgacacgtactacgttgtagctcacttccactatgtcctatcaataggggctgtatttgccatcataggaggcttcattcactgatttcccctattctcaggctacaccctagaccaaacctacgccaaaatccatttcgctatcatattcatcggcgtaaatctaactttcttcccacaacactttctcggcctatccggaatgccccgacgttactcggactaccccgatgcatacaccacatgaaatatcctatcatctgtaggctcattcatttctctaacagcagtaatattaataattttcatgatttgagaagccttcgcttcgaagcgaaaagtcctaatagtagaagaaccctccataaacctggagtgactacatggatgccccccaccctaccacacattcgaagaacccgtatacataaaatctagacaaaaaaggaaggaatcgaaccccccaaagctggtttcaagccaaccccatggcctccatgactttttcaaaaagatattagaaaaaccatttcataactttgtcaaagttaaattataggctaaatcctatatatcttaatggcacatgcagcgcaagtaggtctacaagacgctacttcccctatcatagaagagcttatcacctttcatgatcacgccctcataatcattttccttatctgcttcctagtcctgtatgcccttttcctaacactcacaacaaaactaactaatactaacatctcagacgctcaggaaatagaaaccgtctgaactatcctgcccgccatcatcctagtcctcatcgccctcccatccctacgcatcctttacataacagacgaggtcaacgatccctctcttaccatcaaatcaattggccaccaatggtactgaacctacgagtacaccgactacggcggactaatcttcaactcctacatacttcccccattattcctagaaccaggcgacctgcgactccttgacgttgacaatcgagtagtactcccgattgaagcccccattcgtataataattacatcacaagacgtcttgcactcatgagctgtccccacattaggcttaaaaacagatgcaattcccggacgtctaaaccaaaccactttcaccgctacacgaccgggggtatactacggtcaatgctctgaaatctgtggagcaaaccacagtttcatgcccatcgtcctagaattaattcccctaaaaatctttgaaatggggcccgtatttaccctatagcaccccctctaccccctctagagcccactgtaaagctaacttagcattaaccttttaagttaaagattaagagaaccaacacctctttacagtgaaatgccccaactaaatactaccgtatggcccaccataattacccccatactccttacactattcctcatcacccaactaaaaatattaaacacaaactaccacttacctccctcaccaaagcccataaaaataaaaaattataacaaaccctgagaaccaaaatgaacgaaaatctgttcgcttcattcattgcccccacaatcctaggcctacccgccgcagtactgatcattctatttccccctctattgatccccacctccaaatatctcatcaacaaccgactaattaccacccaacaatgactaatcaaactaacctcaaaacaaatgatagccatacacaacactaaaggacgaacctgatctcttatactagtatccttaatcatttttattgccacaactaacctcctcggactcctgcctcactcatttacaccaaccacccaactatctataaacctagccatggccatccccttatgagcgggcgcagtgattataggctttcgctctaagattaaaaatgccctagcccacttcttaccacaaggcacacctacaccccttatccccatactagttattatcgaaaccatcagcctactcattcaaccaatagccctggccgtacgcctaaccgctaacattactgcaggccacctactcatgcacctaattggaagcgccaccctagcaatatcaaccattaaccttccctctacacttatcatcttcacaattctaattctactgactatcctagaaatcgctgtcgccttaatccaagcctacgttttcacacttctagtaagcctctacctgcacgacaacacataatgacccaccaatcacatgcctatcatatagtaaaacccagcccatgacccctaacaggggccctctcagccctcctaatgacctccggcctagccatgtgatttcacttccactccataacgctcctcatactaggcctactaaccaacacactaaccatataccaatgatggcgcgatgtaacacgagaaagcacataccaaggccaccacacaccacctgtccaaaaaggccttcgatacgggataatcctatttattacctcagaagtttttttcttcgcaggatttttctgagccttttaccactccagcctagcccctaccccccaactaggagggcactggcccccaacaggcatcaccccgctaaatcccctagaagtcccactcctaaacacatccgtattactcgcatcaggagtatcaatcacctgagctcaccatagtctaatagaaaacaaccgaaaccaaataattcaagcactgcttattacaattttactgggtctctattttaccctcctacaagcctcagagtacttcgagtctcccttcaccatttccgacggcatctacggctcaacattttttgtagccacaggcttccacggacttcacgtcattattggctcaactttcctcactatctgcttcatccgccaactaatatttcactttacatccaaacatcactttggcttcgaagccgccgcctgatactggcattttgtagatgtggtttgactatttctgtatgtctccatctattgatgagggtcttactcttttagtataaatagtaccgttaacttccaattaactagttttgacaacattcaaaaaagagtaataaacttcgccttaattttaataatcaacaccctcctagccttactactaataattattacattttgactaccacaactcaacggctacatagaaaaatccaccccttacgagtgcggcttcgaccctatatcccccgcccgcgtccctttctccataaaattcttcttagtagctattaccttcttattatttgatctagaaattgccctccttttacccctaccatgagccctacaaacaactaacctgccactaatagttatgtcatccctcttattaatcatcatcctagccctaagtctggcctatgagtgactacaaaaaggattagactgagccgaattggtatatagtttaaacaaaacgaatgatttcgactcattaaattatgataatcatatttaccaaatgcccctcatttacataaatattatactagcatttaccatctcacttctaggaatactagtatatcgctcacacctcatatcctccctactatgcctagaaggaataatactatcgctgttcattatagctactctcataaccctcaacacccactccctcttagccaatattgtgcctattgccatactagtctttgccgcctgcgaagcagcggtaggcctagccctactagtctcaatctccaacacatatggcctagactacgtacataacctaaacctactccaatgctaaaactaatcgtcccaacaattatattactaccactgacatgactctccaaaaaacacataatttgaatcaacacaaccacccacagcctaattattagcatcatccccctactattttttaaccaaatcaacaacaacctatttagctgttccccaaccttttcctccgaccccctaacaacccccctcctaatactaactacctgactcctacccctcacaatcatggcaagccaacgccacttatccagtgaaccactatcacgaaaaaaactctacctctctatactaatctccctacaaatctccttaattataacattcacagccacagaactaatcatattttatatcttcttcgaaaccacacttatccccaccttggctatcatcacccgatgaggcaaccagccagaacgcctgaacgcaggcacatacttcctattctacaccctagtaggctcccttcccctactcatcgcactaatttacactcacaacaccctaggctcactaaacattctactactcactctcactgcccaagaactatcaaactcctgagccaacaacttaatatgactagcttacacaatagcttttatagtaaagatacctctttacggactccacttatgactccctaaagcccatgtcgaagcccccatcgctgggtcaatagtacttgccgcagtactcttaaaactaggcggctatggtataatacgcctcacactcattctcaaccccctgacaaaacacatagcctaccccttccttgtactatccctatgaggcataattataacaagctccatctgcctacgacaaacagacctaaaatcgctcattgcatactcttcaatcagccacatagccctcgtagtaacagccattctcatccaaaccccctgaagcttcaccggcgcagtcattctcataatcgcccacggacttacatcctcattactattctgcctagcaaactcaaactacgaacgcactcacagtcgcatcataatcctctctcaaggacttcaaactctactcccactaatagctttttgatgacttctagcaagcctcgctaacctcgccttaccccccactattaacctactgggagaactctctgtgctagtaaccacgttctcctgatcaaatatcactctcctacttacaggactcaacatactagtcacagccctatactccctctacatatttaccacaacacaatggggctcactcacccaccacattaacaacataaaaccctcattcacacgagaaaacaccctcatgttcatacacctatcccccattctcctcctatccctcaaccccgacatcattaccgggttttcctcttgtaaatatagtttaaccaaaacatcagattgtgaatctgacaacagaggcttacgaccccttatttaccgagaaagctcacaagaactgctaactcatgcccccatgtctaacaacatggctttctcaacttttaaaggataacagctatccattggtcttaggccccaaaaattttggtgcaactccaaataaaagtaataaccatgcacactactataaccaccctaaccctgacttccctaattccccccatccttaccaccctcgttaaccctaacaaaaaaaactcatacccccattatgtaaaatccattgtcgcatccacctttattatcagtctcttccccacaacaatattcatgtgcctagaccaagaagtcattatctcgaactgacactgagccacaacccaaacaacccagctctccctaagcttcaaactagactacttctccataatattcatccctgtagcattgttcgttacatggtccatcatagaattctcactgtgatatataaactcagacccaaacattaatcagttcttcaaatatctactcattttcctaattaccatactaatcttagttaccgctaacaacctattccaactgttcatcggctgagagggcgtaggaattatatccttcttgctcatcagttgatgatacgcccgagcagatgccaacacagcagccattcaagcaatcctatacaaccgtatcggcgatatcggtttcatcctcgccttagcatgatttatcctacactccaactcatgagacccacaacaaatagcccttctaaacgctaatccaagcctcaccccactactaggcctcctcctagcagcagcaggcaaatcagcccaattaggtctccacccctgactcccctcagccatagaaggccccaccccagtctcagccctactccactcaagcactatagttgtagcaggagtcttcttactcatccgcttccaccccctagcagaaaatagcccactaatccaaactctaacactatgcttaggcgctatcaccactctgttcgcagcagtctgcgcccttacacaaaatgacatcaaaaaaatcgtagccttctccacttcaagtcaactaggactcataatagttacaatcggcatcaaccaaccacacctagcattcctgcacatctgtacccacgccttcttcaaagccatactatttatgtgctccgggtccatcatccacaaccttaacaatgaacaagatattcgaaaaataggaggactactcaaaaccatacctctcacttcaacctccctcaccattggcagcctagcattagcaggaatacctttcctcacaggtttctattccaaagaccacatcatcgaaaccgcaaacatatcatacacaaacgcctgagccctatctattactctcatcgctacctccctgacaagcgcctatagcactcgaataattcttctcaccctaacaggtcaacctcgcttccctacccttactaacattaacgaaaataaccccaccctactaaaccccattaaacgcctggcagccggaagcctattcgcaggatttctcattactaacaacatttcccccgcatcccccttccaaacaacaatccccctccacctaaaactcacagccctcgctgtcactttcctaggacttctaacagccctagacctcaactacctaaccaacaaacttaaaataaaatacccactatgcacattttatttctccaacatactcggattctaccctagcatcacacaccgcacaatcccctatctaggccttcttacgagccaaaacctacccctactcctcctagacctaacctgactagaaaagctattacctaaaacaatttcacagcaccaaatctccacctccatcatcacctcaacccaaaaaggcataattaaactttacttcctctctttcttcttcccactcatcctaaccctactcctaatcacataacctattcccccgagcaatctcaattacaacatatacaccaacaaacaatgttcagccagtaactactactaatcaacgcccataatcatacaaagcccccgcaccaataggatcctcccgaatcaaccctgacccctctccttcataaattattcagcttcctacactattaaagtttaccacaaccaccaccccatcatactctttcacccacagcaccaatcctacctccatcgctaaccccactaaaacactcaccaagacctcaacccctgacccccatgcctcaggatactcctcaatagccatcgctgtagtatatccaaagacaaccatcattccccctaaataaattaaaaaaactattaaacccatataacctcccccaaaattcagaataataacacacccaaccacaccgctaacaatcaatactaaacccccataaataggagaaggcttagaagaaaaccccacaaaccccattactaaacccacactcaacagaaacaaagcatacatcattattctcgcacggactacaaccacgaccaatgatatgaaaaaccatcgttgtatttcaactacaagaacaccaatgaccccaatacgcaaaattagccccctaataaaattaattaaccactcattcatcgacctccccaccccatccaacatctccgcatgatgaaacttcggctcactccttggcgcctgcctgatcctccaaatcaccacaggactattcctagccatgcactactcaccagacgcctcaaccgccttttcatcaatcgcccacatcactcgagacgtaaattatggctgaatcatccgctaccttcacgccaatggcgcctcaatattctttatctgcctcttcctacacatcgggcgaggcctatattacggatcatttctctactcagaaacctgaaacatcggcattatcctcctgcttgcaaccatagcaacagccttcataggctatgtcctcccgtgaggccaaatatcattctgaggggccacagtaattacaaacttactatccgccatcccatacattgggacagacctagttcaatgaatctgaggaggctactcagtagacagtcccaccctcacacgattctttacctttcacttcatcttgcccttcattattgcagccctagcagcactccacctcctattcttgcacgaaacgggatcaaacaaccccctaggaatcacctcccattccgataaaatcaccttccacccttactacacaatcaaagacgccctcggcttacttctcttccttctctccttaatgacattaacactattctcaccagacctcctaggcgacccagacaattataccctagccaaccccttaaacacccctccccacatcaagcccgaatgatatttcctattcgcctacacaattctccgatccgtccctaacaaactaggaggcgtccttgccctattactatccatcctcatcctagcaataatccccatcctccatatatccaaacaacaaagcataatatttcgcccactaagccaatcactttattgactcctagccgcagacctcctcattctaacctgaatcggaggacaaccagtaagctacccttttaccatcattggacaagtagcatccgtactatacttcacaacaatcctaatcctaataccaactatctccctaattgaaaacaaaatactcaaatgggcctgtccttgtagtataaactaatacaccagtcttgtaaaccggagatgaaaacctttttccaaggacaaatcagagaaaaagtctttaactccaccattagcacccaaagctaagattctaatttaaactattctctgttctttcatggggaagcagatttgggtaccacccaagtattgactcacccatcaacaaccgctatgtatttcgtacattactgccagccaccatgaatattgcacggtaccataaatacttgaccacctgtagtacataaaaacccaatccacatcaaaaccctccccccatgcttacaagcaagtacagcaatcaaccttcaactatcacacatcaactgcaactccaaagccaccccttacccattaggatatcaacaaacctacccgcccttaacagtacatagcacataaagccatttaccgtacatagcacattacagtcaaatcccttctcgtccccatggatgacccccctcagataggggtcccttgaccaccatcctccgtgaaatcaatatcccgcacaagagtgctactctcctcgctccgggcccataacacttgggggtagctaaagtgaactgtatccgacatctggttcctacttcagggccataaagcctaaatagcccacacgttccccttaaataagacatcacgatg

SEQ ID NO: 160 - DNA, 16570 bp, Homo sapiens mitochondrial
  3108: "n" refers to a nucleotide at position 3107 of the Cambridge Reference Sequence (CRS, Anderson et al. 1981 Nature 290:457-465), later determined to be absent from the human mtDNA sequence according to the revised CRS (rCRS, Andrews et al. 1999 Nature Genetics 23:147); "n" therefore represents a single nucleotide deletion at a position corresponding to nucleotide 3107 of SEQ ID NO:1 as provided herein.
gatcacaggtctatcaccctattaaccactcacgggagctctccatgcatttggtattttcgtctggggggtgtgcacgcgatagcattgcgagacgctggagccggagcaccctatgtcgcagtatctgtctttgattcctgcctcattctattatttatcgcacctacgttcaatattacagacgagcatacttactgaagtgtgttaattaattaatgcttgtaggacataataataacaattgaatgtctgcacagccgctttccacacagacatcataacaaaaaatttccaccaaaccccccctcccccgccttctggccacagcacttaaacacatctctgccaaaccccaaaaacaaagaaccctaacaccagcctaaccagatttcaaattttatcttttggcggtatgcacttttaacagtcaccccccaactaacacattattttcccctcccactcccatactactaatctcatcaatacaacccccgcccatcctacccagcacacacacaccgctgctaaccccataccccgaaccaaccaaaccccaaagacaccccccacagtttatgtagcttacctcctcaaagcaatacactgaaaatgtttagacgggctcacatcaccccataaacaaataggtttggtcctagcctttctattagctcttagtaagattacacatgcaagcatccccattccagtgagttcaccctctaaatcaccacgatcaaaagggacaagcatcaagcacgcagcaatgcagctcaaaacgcttagcctagccacacccccacgggaaacagcagtgattaacctttagcaataaacgaaagtttaactaagctatactaaccccagggttggtcaatttcgtgccagccaccgcggtcacacgattaacccaagtcaatagaagccggcgtaaagagtgttttagatcaccccctccccaataaagctaaaactcacctgagttgtaaaaaactccagttgacacaaaatagactacgaaagtggctttaacatatctgaacacacaatagctaagacccaaactgggattagataccccactatgcttagccctaaacctcaacagttaaatcaacaaaactgctcgccagaacactacgagccacagcttaaaactcaaaggacctggcggtgcttcatatccctctagaggagcctgttctgtaatcgataaaccccgatcaacctcaccacctcttgctcagcctatataccgccatcttcagcaaaccctgatgaaggctacaaagtaagcgcaagtacccacgtaaagacgttaggtcaaggtgtagcccatgaggtggcaagaaatgggctacattttctaccccagaaaactacgatagcccttatgaaacttaagggtcgaaggtggatttagcagtaaactgagagtagagtgcttagttgaacagggccctgaagcgcgtacacaccgcccgtcaccctcctcaagtatacttcaaaggacatttaactaaaacccctacgcatttatatagaggagacaagtcgtaacatggtaagtgtactggaaagtgcacttggacgaaccagagtgtagcttaacacaaagcacccaacttacacttaggagatttcaacttaacttgaccgctctgagctaaacctagccccaaacccactccaccttactaccagacaaccttagccaaaccatttacccaaataaagtataggcgatagaaattgaaacctggcgcaatagatatagtaccgcaagggaaagatgaaaaattataaccaagcataatatagcaaggactaacccctataccttctgcataatgaattaactagaaataactttgcaaggagagccaaagctaagacccccgaaaccagacgagctacctaagaacagctaaaagagcacacccgtctatgtagcaaaatagtgggaagatttataggtagaggcgacaaacctaccgagcctggtgatagctggttgtccaagatagaatcttagttcaactttaaatttgcccacagaaccctctaaatccccttgtaaatttaactgttagtccaaagaggaacagctctttggacactaggaaaaaaccttgtagagagagtaaaaaatttaacacccatagtaggcctaaaagcagccaccaattaagaaagcgttcaagctcaacacccactacctaaaaaatcccaaacatataactgaactcctcacacccaattggaccaatctatcaccctatagaagaactaatgttagtataagtaacatgaaaacattctcctccgcataagcctgcgtcagatcaaaacactgaactgacaattaacagcccaatatctacaatcaaccaacaagtcattattaccctcactgtcaacccaacacaggcatgctcataaggaaaggttaaaaaaagtaaaaggaactcggcaaatcttaccccgcctgtttaccaaaaacatcacctctagcatcaccagtattagaggcaccgcctgcccagtgacacatgtttaacggccgcggtaccctaaccgtgcaaaggtagcataatcacttgttccttaaatagggacctgtatgaatggctccacgagggttcagctgtctcttacttttaaccagtgaaattgacctgcccgtgaagaggcgggcatgacacagcaagacgagaagaccctatggagctttaatttattaatgcaaacagtacctaacaaacccacaggtcctaaactaccaaacctgcattaaaaatttcggttggggcgacctcggagcagaacccaacctccgagcagtacatgctaagacttcaccagtcaaagcgaactactatactcaattgatccaataacttgaccaacggaacaagttaccctagggataacagcgcaatcctattctagagtccatatcaacaatagggtttacgacctcgatgttggatcaggacatcccgatggtgcagccgctattaaaggttcgtttgttcaacgattaaagtcctacgtgatctgagttcagaccggagtaatccaggtcggtttctatctacnttcaaattcctccctgtacgaaaggacaagagaaataaggcctacttcacaaagcgccttcccccgtaaatgatatcatctcaacttagtattatacccacacccacccaagaacagggtttgttaagatggcagagcccggtaatcgcataaaacttaaaactttacagtcagaggttcaattcctcttcttaacaacatacccatggccaacctcctactcctcattgtacccattctaatcgcaatggcattcctaatgcttaccgaacgaaaaattctaggctatatacaactacgcaaaggccccaacgttgtaggcccctacggactactacaacccttcgctgacgccataaaactcttcaccaaagagcccctaaaacccgccacatctaccatcaccctctacatcaccgccccgaccttagctctcaccatcgctcttctactatgaacccccctccccatacccaaccccctggtcaacctcaacctaggcctcctatttattctagccacctctagcctagccgtttactcaatcctctgatcagggtgagcatcaaactcaaactacgccctgatcggcgcactgcgagcagtagcccaaacaatctcatatgaagtcaccctagccatcattctactatcaacattactaataagtggctcctttaacctctccacccttatcacaacacaagaacacctctgattactcctgccatcatgacccttggccataatatgatttatctccacactagcagagaccaaccgaacccccttcgaccttgccgaaggggagtccgaactagtctcaggcttcaacatcgaatacgccgcaggccccttcgccctattcttcatagccgaatacacaaacattattataataaacaccctcaccactacaatcttcctaggaacaacatatgacgcactctcccctgaactctacacaacatattttgtcaccaagaccctacttctaacctccctgttcttatgaattcgaacagcatacccccgattccgctacgaccaactcatacacctcctatgaaaaaacttcctaccactcaccctagcattacttatatgatatgtctccatacccattacaatctccagcattccccctcaaacctaagaaatatgtctgataaaagagttactttgatagagtaaataataggagcttaaacccccttatttctaggactatgagaatcgaacccatccctgagaatccaaaattctccgtgccacctatcacaccccatcctaaagtaaggtcagctaaataagctatcgggcccataccccgaaaatgttggttatacccttcccgtactaattaatcccctggcccaacccgtcatctactctaccatctttgcaggcacactcatcacagcgctaagctcgcactgattttttacctgagtaggcctagaaataaacatgctagcttttattccagttctaaccaaaaaaataaaccctcgttccacagaagctgccatcaagtatttcctcacgcaagcaaccgcatccataatccttctaatagctatcctcttcaacaatatactctccggacaatgaaccataaccaatactaccaatcaatactcatcattaataatcataatggctatagcaataaaactaggaatagccccctttcacttctgagtcccagaggttacccaaggcacccctctgacatccggcctgcttcttctcacatgacaaaaactagcccccatctcaatcatataccaaatctctccctcactaaacgtaagccttctcctcactctctcaatcttatccatcatagcaggcagttgaggtggattaaaccaaacccagctacgcaaaatcttagcatactcctcaattacccacataggatgaataatagcagttctaccgtacaaccctaacataaccattcttaatttaactatttatattatcctaactactaccgcattcctactactcaacttaaactccagcaccacgaccctactactatctcgcacctgaaacaagctaacatgactaacacccttaattccatccaccctcctctccctaggaggcctgcccccgctaaccggctttttgcccaaatgggccattatcgaagaattcacaaaaaacaatagcctcatcatccccaccatcatagccaccatcaccctccttaacctctacttctacctacgcctaatctactccacctcaatcacactactccccatatctaacaacgtaaaaataaaatgacagtttgaacatacaaaacccaccccattcctccccacactcatcgcccttaccacgctactcctacctatctccccttttatactaataatcttatagaaatttaggttaaatacagaccaagagccttcaaagccctcagtaagttgcaatacttaatttctgtaacagctaaggactgcaaaaccccactctgcatcaactgaacgcaaatcagccactttaattaagctaagcccttactagaccaatgggacttaaacccacaaacacttagttaacagctaagcaccctaatcaactggcttcaatctacttctcccgccgccgggaaaaaaggcgggagaagccccggcaggtttgaagctgcttcttcgaatttgcaattcaatatgaaaatcacctcggagctggtaaaaagaggcctaacccctgtctttagatttacagtccaatgcttcactcagccattttacctcacccccactgatgttcgccgaccgttgactattctctacaaaccacaaagacattggaacactatacctattattcggcgcatgagctggagtcctaggcacagctctaagcctccttattcgagccgagctgggccagccaggcaaccttctaggtaacgaccacatctacaacgttatcgtcacagcccatgcatttgtaataatcttcttcatagtaatacccatcataatcggaggctttggcaactgactagttcccctaataatcggtgcccccgatatggcgtttccccgcataaacaacataagcttctgactcttacccccctctctcctactcctgctcgcatctgctatagtggaggccggagcaggaacaggttgaacagtctaccctcccttagcagggaactactcccaccctggagcctccgtagacctaaccatcttctccttacacctagcaggtgtctcctctatcttaggggccatcaatttcatcacaacaattatcaatataaaaccccctgccataacccaataccaaacgcccctcttcgtctgatccgtcctaatcacagcagtcctacttctcctatctctcccagtcctagctgctggcatcactatactactaacagaccgcaacctcaacaccaccttcttcgaccccgccggaggaggagaccctattctataccaacacctattctgatttttcggtcaccctgaagtttatattcttatcctaccaggcttcggaataatctcccatattgtaacttactactccggaaaaaaagaaccatttggatacataggtatggtctgagctatgatatcaattggcttcctagggtttatcgtgtgagcacaccatatatttacagtaggaatagacgtagacacacgagcatatttcacctccgctaccataatcatcgctatccccaccggcgtcaaagtatttagctgactcgccacactccacggaagcaatatgaaatgatctgctgcagtgctctgagccctaggattcatctttcttttcaccgtaggtggcctgactggcattgtattagcaaactcatcactagacatcgtactacacgacacgtactacgttgtagctcacttccactatgtcctatcaataggagctgtatttgccatcataggaggcttcattcactgatttcccctattctcaggctacaccctagaccaaacctacgccaaaatccatttcactatcatattcatcggcgtaaatctaactttcttcccacaacactttctcggcctatccggaatgccccgacgttactcggactaccccgatgcatacaccacatgaaacatcctatcatctgtaggctcattcatttctctaacagcagtaatattaataattttcatgatttgagaagccttcgcttcgaagcgaaaagtcctaatagtagaagaaccctccataaacctggagtgactatatggatgccccccaccctaccacacattcgaagaacccgtatacataaaatctagacaaaaaaggaaggaatcgaaccccccaaagctggtttcaagccaaccccatggcctccatgactttttcaaaaaggtattagaaaaaccatttcataactttgtcaaagttaaattataggctaaatcctatatatcttaatggcacatgcagcgcaagtaggtctacaagacgctacttcccctatcatagaagagcttatcacctttcatgatcacgccctcataatcattttccttatctgcttcctagtcctgtatgcccttttcctaacactcacaacaaaactaactaatactaacatctcagacgctcaggaaatagaaaccgtctgaactatcctgcccgccatcatcctagtcctcatcgccctcccatccctacgcatcctttacataacagacgaggtcaacgatccctcccttaccatcaaatcaattggccaccaatggtactgaacctacgagtacaccgactacggcggactaatcttcaactcctacatacttcccccattattcctagaaccaggcgacctgcgactccttgacgttgacaatcgagtagtactcccgattgaagcccccattcgtataataattacatcacaagacgtcttgcactcatgagctgtccccacattaggcttaaaaacagatgcaattcccggacgtctaaaccaaaccactttcaccgctacacgaccgggggtatactacggtcaatgctctgaaatctgtggagcaaaccacagtttcatgcccatcgtcctagaattaattcccctaaaaatctttgaaatagggcccgtatttaccctatagcaccccctctaccccctctagagcccactgtaaagctaacttagcattaaccttttaagttaaagattaagagaaccaacacctctttacagtgaaatgccccaactaaatactaccgtatggcccaccataattacccccatactccttacactattcctcatcacccaactaaaaatattaaacacaaactaccacctacctccctcaccaaagcccataaaaataaaaaattataacaaaccctgagaaccaaaatgaacgaaaatctgttcgcttcattcattgcccccacaatcctaggcctacccgccgcagtactgatcattctatttccccctctattgatccccacctccaaatatctcatcaacaaccgattaatcaccacccaacaatgactaatcaaactaacctcaaaacaaatgatagccatacacaacactaaaggacgaacctgatctcttatactagtatccttaatcatttttattgccacaactaacctcctcggactcctgcctcactcatttacaccaaccacccaactatctataaacctagccatggccatccccttatgagcgggcgcagtgattataggctttcgctctaagattaaaaatgccctagcccacttcttaccacaaggcacacctacaccccttatccccatactagttattatcgaaaccatcagcctactcattcaaccaatagccctggccgtacgcctaaccgctaacattactgcaggccacctactcatgcacctaattggaagcgccaccctagcaatatcaaccattaaccttccctctacacttatcatcttcacaattctaattctactgactatcctagaaatcgctgtcgccttaatccaagcctacgttttcacacttctagtaagcctctacctgcacgacaacacataatgacccaccaatcacatgcctatcatatagtaaaacccagcccatgacccctaacaggggccctctcagccctcctaatgacctccggcctagccatgtgatttcacttccactccataacgctcctcatactaggcctactaaccaacacactaaccatataccaatgatggcgcgatgtaacacgagaaagcacataccaaggccaccacacaccacctgtccaaaaaggccttcgatacgggataatcctatttattacctcagaagtttttttcttcgcaggatttttctgagccttttaccactccagcctagcccctaccccccaactaggagggcactggcccccaacaggcatcaccccgctaaatcccctagaagtcccactcctaaacacatccgtattactcgcatcaggagtatcaatcacctgagctcaccatagtctaatagaaaacaaccgaaaccaaataattcaagcactgcttattacaattttactgggtctctattttaccctcctacaagcctcagagtacttcgagtctcccttcaccatttccgacggcatctacggctcaacattttttgtagccacaggcttccacggacttcacgtcattattggctcaactttcctcactatctgcttcatccgccaactaatatttcactttacatccaaacatcactttggcttcgaagccgccgcctgatactggcattttgtagatgtggtttgactatttctgtatgtctccatctattgatgagggtcttactcttttagtataaatagtaccgttaacttccaattaactagttttgacaacattcaaaaaagagtaataaacttcgccttaattttaataatcaacaccctcctagccttactactaataattattacattttgactaccacaactcaacggctacatagaaaaatccaccccttacgagtgcggcttcgaccctatatcccccgcccgcgtccctttctccataaaattcttcttagtagctattaccttcttattatttgatctagaaattgccctccttttacccctaccatgagccctacaaacaactaacctgccactaatagttatgtcatccctcttattaatcatcatcctagccctaagtctggcctatgagtgactacaaaaaggattagactgagccgaattggtatatagtttaaacaaaacgaatgatttcgactcattaaattatgataatcatatttaccaaatgcccctcatttacataaatattatactagcatttaccatctcacttctaggaatactagtatatcgctcacacctcatatcctccctactatgcctagaaggaataatactatcgctgttcattatagctactctcataaccctcaacacccactccctcttagccaatattgtgcctattgccatactagtctttgccgcctgcgaagcagcggtgggcctagccctactagtctcaatctccaacacatatggcctagactacgtacataacctaaacctactccaatgctaaaactaatcgtcccaacaattatattactaccactgacatgactttccaaaaagcacataatttgaatcaacacaaccacccacagcctaattattagcatcatccccctactattttttaaccaaatcaacaacaacctatttagctgttccccaaccttttcctccgaccccctaacaacccccctcctaatactaactacctgactcctacccctcacaatcatggcaagccaacgccacttatccagtgaaccactatcacgaaaaaaactctacctctctatactaatctccctacaaatctccttaattataacattcacagccacagaactaatcatattttatatcttcttcgaaaccacacttatccccaccttggctatcatcacccgatgaggcaaccagccagaacgcctgaacgcaggcacatacttcctattctacaccctagtaggctcccttcccctactcatcgcactaatttacactcacaacaccctaggctcactaaacattctactactcactctcactgcccaagaactatcaaactcctgagccaacaacttaatatgactagcttacacaatagcttttatagtaaagatacctctttacggactccacttatgactccctaaagcccatgtcgaagcccccatcgctgggtcaatagtacttgccgcagtactcttaaaactaggcggctatggtataatacgcctcacactcattctcaaccccctgacaaaacacatagcctaccccttccttgtactatccctatgaggcataattataacaagctccatctgcctacgacaaacagacctaaaatcgctcattgcatactcttcaatcagccacatagccctcgtagtaacagccattctcatccaaaccccctgaagcttcaccggcgcagtcattctcataatcgcccacggacttacatcctcattactattctgcctagcaaactcaaactacgaacgcactcacagtcgcatcataatcctctctcaaggacttcaaactctactcccactaatagctttttgatgacttctagcaagcctcgctaacctcgccttaccccccactattaacctactgggagaactctctgtgctagtaaccacgttctcctgatcaaatatcactctcctacttacaggactcaacatactagtcacagccctatactccctctacatatttaccacaacacaatggggctcactcacccaccacattaacaacataaaaccctcattcacacgagaaaacaccctcatgttcatacacctatcccccattctcctcctatccctcaaccccgacatcattaccgggttttcctcttgtaaatatagtttaaccaaaacatcagattgtgaatctgacaacagaggcttacgaccccttatttaccgagaaagctcacaagaactgctaactcatgcccccatgtctaacaacatggctttctcaacttttaaaggataacagctatccattggtcttaggccccaaaaattttggtgcaactccaaataaaagtaataaccatgcacactactataaccaccctaaccctgacttccctaattccccccatcctcaccaccctcgttaaccctaacaaaaaaaactcatacccccattatgtaaaatccattgtcgcatccacctttattatcagtctcttccccacaacaatattcatgtgcctagaccaagaagttattatctcgaactgacactgagccacaacccaaacaacccagctctccctaagcttcaaactagactacttctccataatattcatccctgtagcattgttcgttacatggtccatcatagaattctcactgtgatatataaactcagacccaaacattaatcagttcttcaaatatctactcattttcctaattaccatactaatcttagttaccgctaacaacctattccaactgttcatcggctgagagggcgtaggaattatatccttcttgctcatcagttgatgatacgcccgagcagatgccaacacagcagccattcaagcaatcctatacaaccgtatcggcgatatcggtttcatcctcgccttagcatgatttatcctacactccaactcatgagacccacaacaaatagcccttctaaacgctaatccaagcctcaccccactactaggcctcctcctagcagcagcaggcaaatcagcccaattaggtctccacccctgactcccctcagccatagaaggccccaccccagtctcagccctactccactcaagcactatagttgtagcaggaatcttcttactcatccgcttccaccccctagcagaaaatagcccactaatccaaactctaacactatgcttaggcgctatcaccactctgttcgcagcagtctgcgcccttacacaaaatgacatcaaaaaaatcgtagccttctccacttcaagtcaactaggactcataatagttacaatcggcatcaaccaaccacacctagcattcctgcacatctgtacccacgccttcttcaaagccatactatttatgtgctccgggtccatcatccacaaccttaacaatgaacaagatattcgaaaaataggaggactactcaaaaccatacctctcacttcaacctccctcaccattggcagcctagcattagcaggaatacctttcctcacaggtttctactccaaagaccacatcatcgaaaccgcaaacatatcatacacaaacgcctgagccctatctattactctcatcgctacctccctgacaagcgcctatagcactcgaataattcttctcaccctaacaggtcaacctcgcttccccacccttactaacattaacgaaaataaccccaccctactaaaccccattaaacgcctggcagccggaagcctattcgcaggatttctcattactaacaacatttcccccgcatcccccttccaaacaacaatccccctctacctaaaactcacagccctcgctgtcactttcctaggacttctaacagccctagacctcaactacctaaccaacaaacttaaaataaaatccccactatgcacattttatttctccaacatactcggattctaccctagcatcacacaccgcacaatcccctatctaggccttcttacgagccaaaacctgcccctactcctcctagacctaacctgactagaaaagctattacctaaaacaatttcacagcaccaaatctccacctccatcatcacctcaacccaaaaaggcataattaaactttacttcctctctttcttcttcccactcatcctaaccctactcctaatcacataacctgttcccccgagcaatctcaattacaatatatacaccaacaaacaatgttcaaccagtaaccactactaatcaacgcccataatcatacaaagcccccgcaccaataggatcctcccgaatcaaccctgacccctctccttcataaattattcagcttcctacactattaaagtttaccacaaccaccaccccatcatactctttcacccacagcaccaatcctacctccatcgctaaccccactaaaacactcaccaagacctcaacccctgacccccatgcctcaggatactcctcaatagccatcgctgtagtatatccaaagacaaccatcattccccctaaataaattaaaaaaactattaaacccatataacctcccccaaaattcagaataataacacacccgaccacaccgctaacaatcaatactaaacccccataaataggagaaggcttagaagaaaaccccacaaaccccattactaaacccacactcaacagaaacaaagcatacatcattattctcgcacggactacaaccacgaccaatgatatgaaaaaccatcgttgtatttcaactacaagaacaccaatgaccccaatacgcaaaattaaccccctaataaaattaattaaccactcattcatcgacctccccaccccatccaacatctccgcatgatgaaacttcggctcactccttggcgcctgcctgatcctccaaatcaccacaggactattcctagccatgcactactcaccagacgcctcaaccgccttttcatcaatcgcccacatcactcgagacgtaaattatggctgaatcatccgctaccttcacgccaatggcgcctcaatattctttatctgcctcttcctacacatcgggcgaggcctatattacggatcatttctctactcagaaacctgaaacatcggcattatcctcctgcttgcaactatagcaacagccttcataggctatgtcctcccgtgaggccaaatatcattctgaggggccacagtaattacaaacttactatccgccatcccatacattgggacagacctagttcaatgaatctgaggaggctactcagtagacagtcccaccctcacacgattctttacctttcacttcatcttacccttcattattgcagccctagcagcactccacctcctattcttgcacgaaacgggatcaaacaaccccctaggaatcacctcccattccgataaaatcaccttccacccttactacacaatcaaagacgccctcggcttacttctcttccttctctccttaatgacattaacactattctcaccagacctcctaggcgacccagacaattataccctagccaaccccttaaacacccctccccacatcaagcccgaatgatatttcctattcgcctacacaattctccgatccgtccctaacaaactaggaggcgtccttgccctattactatccatcctcatcctagcaataatccccatcctccacatatccaaacaacaaagcataatatttcgcccactaagccaatcactttattgactcctagccgcagacctcctcattctaacctgaatcggaggacaaccagtaagctacccttttaccatcattggacaagtagcatccgtactatacttcacaacaatcctaatcctaataccaactatctccctaattgaaaacaaaatactcaaatgggcctgtccttgtagtataaactaatacaccagtcttgtaaaccggagatgaaaaccttcttccaaggacaaatcagagaaaaagtctttaactccaccattagcacccaaagctaagattctaatttaaactattctctgttctttcatggggaagcagatttgggtaccacccaagtattgactcacccatcaacaaccgctatgtatttcgtacattactgccagccaccatgaatattgtacggtaccataaatacttgaccacctgtagtacataaaaacccaatccacatcaaaactccctccccatgcttacaagcaagtacagcaatcaaccttcaactatcacacatcaactgcaactccaaagccacccctcacccactaggataccaacaaacctacccacccttaacagtacatagcacataaagccatttatcgtacatagcacattacagtcaaatcccttctcgtccccatggatgacccccctcagataggggtcccttgaccaccatcctccgtgaaatcaatatcccgcacaagagtgctactctcctcgctccgggcccataacacttgggggtagctaaagtgaactgtatccgacatctggttcctacttcagggccataaagcctaaatagcccacacgttccccttaaataagacatcacgatg

SEQ ID NO: 161 - DNA, 16570 bp, Homo sapiens mitochondrial
  3108: "n" refers to a nucleotide at position 3107 of the Cambridge Reference Sequence (CRS, Anderson et al. 1981 Nature 290:457-465), later determined to be absent from the human mtDNA sequence according to the revised CRS (rCRS, Andrews et al. 1999 Nature Genetics 23:147); "n" therefore represents a single nucleotide deletion at a position corresponding to nucleotide 3107 of SEQ ID NO:1 as provided herein.
gatcacaggtctatcaccctattaaccactcacgggagctctccatgcatttggtattttcgtctggggggtgtgcacgcgatagcattgcgagacgctggagccggagcaccctatgtcgcagtatctgtctttgattcctgccccattctattatttatcgcacctacgttcaatattacaggcgaacatacctactaaagtgtgttaattaattaatgcttgtaggacataataataacaattgaatgtctgcacagccgctttccacacagacatcataacaaaaaatttccaccaaaccccccctcccccgccttctggccacagcacttaaacacatctctgccaaaccccaaaaacaaagaaccctaacaccagcctaaccagatttcaaattttatcttttggcggtatgcacttttaacagtcaccccccaactaacacattatttttccctcccactcccatactactaatctcatcaatacaacccccgcccatcctacccagcacacacacaccgctgctaaccccataccccgaaccaaccaaaccccaaagacaccccccacagtttatgtagcttacctcctcaaagcaatacactgaaaatgtttagacgggctcacatcaccccataaacaaataggtttggtcctagcctttctattagctcttagtaagattacacatgcaagcatccccgttccagtgagttcaccctctaaatcaccacgatcaaaagggacaagcatcaagcacgcaacaatgcagctcaaaacgcttagcctagccacacccccacgggaaacagcagtgattaacctttagcaataaacgaaagtttaactaagctatactaaccctagggttggtcaatttcgtgccagccaccgcggtcacacgattaacccaagtcaatagaagccggcgtaaagagtgttttagatcaccccctccccaataaagctaaaactcacctgagttgtaaaaaactccagttgacacaaaataaactacgaaagtggctttaacatatctgaacacacaatagctaagacccaaactgggattagataccccactatgcttagccctaaacctcaacagttaaatcaacaaaactgctcgccagaacactacgagccacagcttaaaactcaaaggacctggcggtgcttcatatccctctagaggagcctgttctgtaatcgataaaccccgatcaacctcaccacctcttgctcagcctatataccgccatcttcagcaaaccctgatgaaggctacaaagtaagcgcaagtacccacgtaaagacgttaggtcaaggtgtagcccatgaggtggcaagaaatgggctacattttctaccccagaaaactacgatagcccttatgaaacttaagggtcgaaggtggatttagcagtaaactgagagtagagtgcttagttgaacagggccctgaagcgcgtacacaccgcccgtcaccctcctcaagtatacttcaaaggacatttaactaaaacccctacgcatttatatagaggagacaagtcgtaacatggtaagtgtactggaaagtgcacttggacgaaccagagtgtagcttaacacaaagcacccaacttacacttaggagatttcaacttaacttgaccgctctgagctaaacctagccccaaacccactccaccttactaccagacaaccttagccaaaccatttacccaaataaagtataggcgatagaaattgaaacctggcgcaatagatatagtaccgcaagggaaagatgaaaaattataaccaagcataatatagcaaggactaacccctataccttctgcataatgaattaactagaaataactttgcaaggagagccaaagctaagacccccgaaaccagacgagctacctaagaacagctaaaagagcacacccgtctatgtagcaaaatagtgggaagatttataggtagaggcgacaaacctaccgagcctggtgatagctggttgtccaagatagaatcttagttcaactttaaatttgcccacagaaccctctaaatccccttgtaaatttaactgttagtccaaagaggaacagctctttggacactaggaaaaaaccttgtagagagagtaaaaaattcaacacccatagtaggcctaaaagcagccaccaattaagaaagcgttcaagctcaacacccactacctaaaaaatcccaaacatataactgaactcctcacacccaattggaccaatctatcaccctatagaagaactaatgttagtataagtaacatgaaaacattctcctctgcataagcctgcgtcagattaaaacactgaactgacaattaacagcccaatatctacaatcaaccaacaagtcattattacccccactgtcaacccaacacaggcatgctcataaggaaaggttaaaaaaagtaaaaggaactcggcaaatcttaccccgcctgtttaccaaaaacatcacctctagcatcaccagtattagaggcaccgcctgcccagtgacacatgtttaacggccgcggtaccctaaccgtgcaaaggtagcataatcacttgttccttaaatagggacctgtatgaatggctccacgagggttcagctgtctcttacttttaaccagtgaaattgacctgcccgtgaagaggcgggcatgacacagcaagacgagaagaccctatggagctttaatttattaatgcaaacagtacctaacaaacccacaggtcctaaactaccaaacctgcattaaaaatttcggttggggcgacctcggagcagaacccaacctccgagcagtacatgctaagacttcaccagtcaaagcgaactactatactcaattgatccaataacttgaccaacggaacaagttaccctagggataacagcgcaatcctattctagagtccatatcaacaatagggtttacgacctcgatgttggatcaggacatcccgatggtgcagccgctattaaaggttcgtttgttcaacgattaaagtcctacgtgatctgagttcagaccggagtaatccaggtcggtttctatctacnttcaaattcctccctgtacgaaaggacaagagaaataaggcctacttcacaaagcgccttcccccgtaaatgatatcatctcaacttagtattatacccacacccacccaagaacagggtttgttaagatggcagagcccggtaatagcataaaacttaaaactttacagtcagaggttcaattcctcttcttaacaacatacccatggccaacctcctactcctcattgtacccattctaatcgcaatggcattcctaatgcttaccgaacgaaaaattctaggctatatacaactacgcaaaggccccaacgttgtaggcccctgcgggctactacaacccttcgctgacgccataaaactcttcaccaaagagcccctaaaacccgccacatctaccatcaccctctacatcaccgccccgaccttagctctcaccatcgctcttctactatgaacccccctccccatacccaaccccctggttaacctcaacctaggcctcctatttattctagccacctctagcctagccgtttactcaatcctctgatcagggtgagcatcaaactcaaactacgccctaatcggcgcactgcgagcagtagcccaaacaatctcatatgaagtcaccctagccatcattctactatcaacattactaataagtggctcctttaacctctccacccttatcacaacacaagaacacctctgattactcctgccatcatgacccttggccataatatgatttatctccacactagcagagaccaaccgaacccccttcgaccttgccgaaggggagtccgaactagtctcaggcttcaacatcgaatacgccgcaggccccttcgccctattcttcatagccgaatacacaaacattattataataaacaccctcaccactacaatcttcctaggaacaacatatgacgcactctcccctgaactctacacaacatattttgtcaccaagaccctacttctgacctccctgttcttatgaattcgaacagcatacccccgattccgctacgaccaactcatacacctcctatgaaaaaacttcctaccactcaccctagcattacttatatgatatgtctccatacccattacaatctccagcattccccctcaaacctaagaaatatgtctgataaaagagttactttgatagagtaaataataggagcttaaacccccttatttctaggactatgagaatcgaacccatccctgagaatccaaaattctccgtgccacctatcacaccccatcctaaagtaaggtcagctaaataagctatcgggcccataccccgaaaatgttggttatacccttcccgtactaattaatcccctggcccaacccgtcatctactctaccatctttgcaggcacactcatcacagcgctaagctcgcactgattttttacctgagtaggcctagaaataaacatgctagcttttattccagttctaaccaaaaaaataaaccctcgttccacagaagctgccatcaagtatttcctcacgcaagcaaccgcatccataatccttctaatagctatcctcttcaacaatatactctccggacaatgaaccataaccaatactaccaatcaatactcatcattaataatcataatggctatagcaataaaactaggaatagccccctttcacttctgagtcccagaggttacccaaggcacccctctgacatccggcctgcttcttctcacatgacaaaaactagcccccatctcaatcatataccaaatctctccctcactaaacgtaagccttctcctcactctctcaatcttatccatcatagcaggcagttgaggtggattaaaccaaacccagctacgcaaaatcttagcatactcctcaattacccacataggatgaataatagcagttctaccgtacaaccctaacataaccattcttaatttaactatttatattatcctaactactaccgcattcctactactcaacttaaactccagcaccacgaccctactactatctcgcacctgaaacaagctaacatgactaacacccttaattccatccaccctcctctccctaggaggcctgcccccgctaaccggctttttgcccaaatgggccattatcgaagaattcacaaaaaacaatagcctcatcatccccaccatcatagccaccatcaccctccttaacctctacttctacctacgcctaatctactccacctcaatcacactactccccatatctaacaacgtaaaaataaaatgacagtttgaacatacaaaacccaccccattcctccccacactcatcgcccttaccacgctactcctacctatctccccttttatactaataatcttatagaaatttaggttaaatacagaccaagagccttcaaagccctcagtaagttgcaatacttaatttctgtaacagctaaggactgcaaaaccccactctgcatcaactgaacgcaaatcagccactttaattaagctaagcccttactagaccaatgggacttaaacccacaaacacttagttaacagctaagcaccctaatcaactggcttcaatctacttctcccgccgccgggaaaaaaggcgggagaagccccggcaggtttgaagctgcttcttcgaatttgcaattcaatatgaaaatcacctcggagctggtaaaaagaggcctaacccctgtctttagatttacagtccaatgcttcactcagccattttacctcacccccactgatgttcgccgaccgttgactattctctacaaaccacaaagacattggaacactatacctattattcggcgcatgagctggagtcctaggcacagctctaagcctccttattcgagccgagctgggccagccaggcaaccttctaggtaacgaccacatctacaacgttatcgtcacagcccatgcatttgtaataatcttcttcatagtaatacccatcataatcggaggctttggcaactgactagttcccctaataatcggtgcccccgatatggcgtttccccgcataaacaacataagcttctgactcttacctccctctctcttactcctgctcgcatctgctatagtggaggccggagcaggaacaggttgaacagtctaccctcccttagcagggaactactcccaccctggagcctccgtagacctaaccatcttctccttacacctagcaggtgtctcctctatcttaggggccatcaatttcatcacaacaattatcaatataaaaccccctgccataacccaataccaaacgcccctcttcgtctgatccgtcctaatcacagcagtcctacttctcctatctctcccagtcctagctgctggcatcactatactactaacagaccgcaacctcaacaccaccttcttcgaccccgccggaggaggagaccccattctataccaacacctattctgatttttcggtcaccctgaagtttatattcttatcctaccaggcttcggaataatctcccatattgtaacttactactccggaaaaaaagaaccatttggatacataggtatggtctgagctatgatatcaattggcttcctagggtttatcgtgtgagcacaccatatatttacagtaggaatagacgtagacacacgagcatatttcacctccgctaccataatcatcgctatccccaccggcgtcaaagtatttagctgactcgccacactccacggaagcaatatgaaatgatctgctgcagtgctctgagccctaggattcatctttcttttcaccgtaggtggcctgactggcattgtattagcaaactcatcactagacatcgtactacacgacacgtactacgttgtagctcacttccactatgtcctatcaataggagctgtatttgccatcataggaggcttcattcactgatttcccctattctcaggctacaccctagaccaaacctacgccaaaatccatttcactatcatattcatcggcgtaaatctaactttcttcccacaacactttctcggcctatccggaatgccccgacgttactcggactaccccgatgcatacaccacatgaaatatcctatcatctgtaggctcattcatttctctaacagcagtaatattaataattttcatgatttgagaagccttcgcttcgaagcgaaaagtcctaatagtagaagaaccctccataaacctggagtgactatatggatgccccccaccctaccacacattcgaagaacccgtatacataaaatctagacaaaaaaggaaggaatcgaaccccccaaagctggtttcaagccaaccccatggcctccatgactttttcaaaaagatattagaaaaaccatttcataactttgtcaaagttaaattataggctaaatcctatatatcttaatggcacatgcagcgcaagtaggtctacaagacgctacttcccctatcatagaagagcttatcacctttcatgatcacgccctcataatcattttccttatctgcttcctagtcctgtatgcccttttcctaacactcacaacaaaactaactaatactaacatctcagacgctcaggaaatagaaaccgtctgaactatcctgcccgccatcatcctagtcctcatcgccctcccatccctacgcatcctttacataacagacgaggtcaacgatccctcccttaccatcaaatcaattggccaccaatggtactgaacctacgagtacaccgactacggcggactaatcttcaactcctacatacttcccccattattcctagaaccaggcgacctgcgactccttgacgttgacaatcgagtagtactcccgattgaagcccccattcgtataataattacatcacaagacgtcttgcactcatgagctgtccccacattaggcttaaaaacagatgcaattcccggacgtctaaaccaaaccactttcaccgctacacgaccgggggtatactacggtcaatgctctgaaatctgtggagcaaaccacagtttcatacccatcgtcctagaattaattcccctaaaaatctttgaaatagggcccgtatttaccctatagcaccccctctaccccctctagagcccactgtaaagctaacttagcattaaccttttaagttaaagattaagagaaccaacacctctttacagtgaaatgccccaactaaatactaccgtatggcccaccataattacccccatactccttacactattcctcatcacccaactaaaaatattaaacacaaactaccacctacctccctcaccaaagcccataaaaataaaaaattataacaaaccctgagaaccaaaatgaacgaaaatctgttcgcttcattcattgcccccacaatcctaggcctacccgccgcagtactgatcattctatttccccctctattgatccccacctccaaatatctcatcaacaaccgactaatcaccacccaacaatgactaatcaaactaacctcaaaacaaatgatagccatacacaacactaaaggacgaacctgatctcttatactagtatccttaatcatttttattgccacaactaacctcctcggactcctgcctcactcatttacaccaaccacccaactatctataaacctagccatggccatccccttatgagcaggcgcagtgattataggctttcgctctaagattaaaaatgccctagcccacttcttaccacaaggcacacctacaccccttatccccatactagttattatcgaaaccatcagcctactcattcaaccaatagccctggccgtacgcctaaccgctaacattactgcaggccacctactcatgcacctaattggaagcgccaccctagcaatatcaaccattaaccttccctctacacttatcatcttcacaattctaattctactgactatcctagaaatcgctgtcgccttaatccaagcctacgttttcacacttctagtaagcctctacctgcacgacaacacataatgacccaccaatcgcatgcctatcatatagtaaaacccagcccatgacccctaacaggggccctctcagccctcctaatgacctccggcctagccatgtgatttcacttccactccataacgctcctcatactaggcctactaaccaacacactaaccatataccaatgatggcgcgatgtaacacgagaaagcacataccaaggccaccacacaccacctgtccaaaaaggccttcgatacgggataatcctatttattacctcagaagtttttttcttcgcaggatttttctgagccttttaccactccagcctagcccctaccccccaactaggagggcactgacccccaacaggcatcaccccgctaaatcccctagaagtcccactcctaaacacatccgtattactcgcatcaggagtatcaatcacctgagctcaccatagtctaatagaaaacaaccgaaaccaaataattcaagcactgcttattacaattttactgggtctctattttaccctcctacaagcctcagagtacttcgagtctcccttcaccatttccgacggcatctacggctcaacattttttgtagccacaggcttccacggacttcacgtcattattggctcaactttcctcactatctgcttcatccgccaactaatatttcactttacatccaaacatcactttggcttcgaagccgccgcctgatactggcattttgtggatgtggtttgactatttctgtatgtctccatctattgatgagggtcttactcttttagtataaatagtaccgttaacttccaattaactagttttgacaacattcaaaaaagagtaataaacttcgccttaattttaataatcaacaccctcctagccttactactaataatcattacattttgactaccacaactcaacggctacatagaaaaatccaccccttacgagtgcggcttcgaccctatatcccccgcccgcgtccctttctccataaaattcttcttagtagctattaccttcttattatttgatctagaaattgccctccttttacccctaccatgagccctacaaacaactaacctgccactaatagttatgtcatccctcttattaatcatcatcctagccctaagtctggcctatgagtgactacaaaaaggattagactgagccgaattggtatatagtttaaacaaaacgaatgatttcgactcattaaattatgataatcatatttaccaaatgcccctcatttacataaatattatactagcatttaccatctcacttctaggaatactagtatatcgctcacacctcatatcctccctactatgcctagaaggaataatactatcgctgttcattatagctactctcataaccctcaacacccactccctcttagccaatattgtgcctattgccatactagtctttgccgcctgcgaagcagcggtgggcctagccctgctagtctcaatctccaacacatatggcctagactacgtacataacctaaacctactccaatgctaaaactaatcgtcccaacaattatattactaccactgacatgactttccaaaaaacacataatttgaatcaacacaaccacccacagcctaattattagcatcatccccctactattttttaaccaaatcaacaacaacctatttagctgttccccaaccttttcctccgaccccctaacaacccccctcttaatactaactacctgactcctacccctcacaatcatggcaagccaacgccacttatccagtgaaccactatcacgaaaaaaactctacctctctatactaatctccctacaaatctccttaattataacattcacagccacagaactaatcatattttatatcttcttcgaaaccacacttatccccaccttggctatcatcacccgatgaggcaaccagccagaacgcctgaacgcaggcacatacttcctattctacaccctagtaggctcccttcccctactcatcgcactaatttacactcacaacaccctaggctcactaaacattctactactcactctcactgcccaagaactatcaaactcctgagccaacaacttaatatgactagcctacacaatagcttttatagtaaagatacctctttacggactccacttatgactccctaaagcccatgtcgaagcccccatcgctgggtcaatagtacttgccgcagtactcttaaaactaggcggctatggtataatacgcctcacactcattctcaaccccctgacaaaacacatagcctaccccttccttgtactatccctatgaggcataattataacaagctccatctgcctacgacaaacagacctaaaatcgctcattgcatactcttcaatcagccacatagccctcgtagtaacagccattctcatccaaaccccctgaagcttcaccggcgcagtcattctcataatcgcccacggacttacatcctcattactattctgcctagcaaactcaaactacgaacgcactcacagtcgcatcataatcctctctcaaggacttcaaactctactcccactaatagctttttgatgacttctagcaagcctcgctaacctcgccttaccccccactattaacctactgggagaactctctgtgctagtaaccacgttctcctgatcaaatatcactctcctactcacaggactcaacatactagtcacagccctatactccctctacatatttaccacaacacaatggggctcactcacccaccacattaacaacataaaaccctcattcacacgagaaaacaccctcatgttcatacacctatcccccattctcctcctatccctcaaccccgacatcattaccgggttttcctcttgtaaatatagtttaaccaaaacatcagattgtgaatctgacaacagaggcttacgaccccttatttaccgagaaagctcacaagaactgctaactcatgcccccatgtctaacaacatggctttctcaacttttaaaggataacagctatccattggtcttaggccccaaaaattttggtgcaactccaaataaaagtaataaccatgcacactactataaccaccctaaccctgacttccctaattccccccatccttaccaccctcgttaaccctaacaaaaaaaactcatacccccattatgtaaaatccattgtcgcatccacctttattatcagtctcttccccacaacaatattcatgtgcctagaccaagaagttattatctcgaactgacactgagccacaacccaaacaacccagctctccctaagcttcaaactagactacttctccataatattcatccctgtagcattgttcgttacatggtccatcatagaattctcactgtgatatataaactcagacccaaacattaatcagttcttcaaatatctactcattttcctaattaccatactaatcttagttaccgctaacaacctattccaactgttcatcggctgagagggcgtaggaattatatccttcttgctcatcagttgatgatacgcccgagcagatgccaacacagcagccattcaagcaatcctatacaaccgtatcggcgatatcggtttcatcctcgccttagcatgatttatcctacactccaactcatgagacccacaacaaatagcccttctaaacgctaatccaagcctcaccccactactaggcctcctcctagcagcagcaggcaaatcagcccaattaggtctccacccctgactcccctcagccatagaaggccccaccccagtctcagccctactccactcaagcactatagttgtagcaggaatcttcttactcatccgcttccaccccctagcagaaaatagcccactaatccaaactctaacactatgcttaggcgctatcaccactctgttcgcagcagtctgcgcccttacacaaaatgacatcaaaaaaatcgtagccttctccacttcaagtcaactaggactcataatagttacaatcggcatcaaccaaccacacctagcattcctgcacatctgtacccacgccttcttcaaagccatactatttatgtgctccgggtccatcatccacaaccttaacaatgaacaagatattcgaaaaataggaggactactcaaaaccatacctctcacttcaacctccctcaccattggcagcctagcattagcaggaatacctttcctcacaggtttctactccaaagaccacatcatcgaaaccgcaaacatatcatacacaaacgcctgagccctatctattactctcatcgctacctccctaacaagcgcctatagcactcgaataattcttctcaccctaacaggtcaacctcgcttccctacccttactaacattaacgaaaataaccccaccctactaaaccccattaaacgcctggcagccggaagcctattcgcaggatttctcattactaacaacatttcccccgcatcccccttccaaacaacaatccccctctacctaaaactcacagccctcgctgtcactttcctaggacttctaacagccctagacctcaactacctaaccaacaaacttaaaataaaatccccactatgcacattttatttctccaacatactcggattctaccctagcatcacacaccgcacaatcccctatctaggccttcttacgagccaaaacctgcccctactcctcctagacctaacctgactagaaaagctattacctaaaacaatttcacagcaccaaatctccacctccatcatcacctcaacccaaaaaggcataattaaactttacttcctctctttcttcttcccactcatcctaaccctactcctaatcacataacctattcccccgagcaatctcaattacaatatatacaccaacaaacaatgttcaaccagtaactactactaatcaacgcccataatcatacaaagcccccgcaccaataggatcctcccgaatcaaccctgacccctctccttcataaattattcagcttcctacactattaaagtttaccacaaccaccaccccatcatactctttcacccacagcaccaatcctacctccatcgctaaccccactaaaacactcaccaagacctcaacccctgacccccatgcctcaggatactcctcaatagccatcgctgtagtatatccaaagacaaccatcattccccctaaataaattaaaaaaactattaaacccatataacctcccccaaaattcagaataataacacacccgaccacaccgctaacaatcaatactaaacccccataaataggagaaggcttagaagaaaaccccacaaaccccattactaaacccacactcaacagaaacaaagcatacatcattattctcgcacggactacaaccacgaccaatgatatgaaaaaccatcgttgtatttcaactacaagaacaccaatgaccccaatacgcaaaattaaccccctaataaaattaattaaccactcattcatcgacctccccaccccatccaacatctccgcatgatgaaactttggctcactccttggcgcctgcctgatcctccaaatcaccacaggactattcctagccatgcactactcaccagacgcctcaaccgccttttcatcaatcgcccacatcactcgagacgtaaattatggctgaatcatccgctaccttcacgccaatggcgcctcaatattctttatctgcctcttcctacacatcgggcgaggcctatattacggatcatttctctactcagaaacctgaaacatcggcattatcctcctgcttgcaactatagcaacagccttcataggctatgtcctcccgtgaggccaaatatcattctgaggggccacagtaattacaaacttactatccgccatcccatacattgggacagacctagttcaatgaatctgaggaggctactcagtagacagttccaccctcacacgattctttacctttcacttcatcttacccttcattattgcagccctagcagcactccacctcctattcttgcacgaaacgggatcaaacaaccccctaggaatcacctcccattccgataaaatcaccttccacccttactacacaatcaaagacgccctcggcttacttctcttccttctccccttaatgacattaacactattctcaccagacctcctaggcgacccagacaattataccctagccaaccccttaaacacccctccccacatcaagcccgaatgatatttcctattcgcctacacaattctccgatccgtccctaacaaactaggaggcgtccttgccctattactatccatcctcatcctagcaataatccccatcctccatatatccaaacaacaaagcataatatttcgcccgctaagccaatcactttattgactcctagccgcagacctcctcattctaacctgaatcggaggacaaccagtaacctacccttttaccatcattggacaagtagcatccgtactatacttcacaacaatcctaatcctaataccaactatctccctaattgaaaacaaaatactcaaatgggcctgtccttgtagtataaactaatacaccagtcttgtaaaccggagatgaaaacctttttccaaggacaaatcagagaaaaagtctttaactccaccattagcacccaaagctaagattctaatttaaactattctctgttctttcatggggaagcagatttgggtaccacccaagtattgactcacccatcaacaaccgctatgtatctcgtacattactgccagccaccatgaatattgtacagtaccataaatacttgaccacctgtagtacataaaaacccaatccacatcaaaacccccccctcatgcttacaagcaagtacagcaatcaaccctcaactatcacacatcaactgcaactccaaagccacccctcacccactaggatatcaacaaacctacccacccttagcagtacatagcacataaagccatttaccgtacatagcacattacagtcaaatctcttctcgtccccatggatgacccccctcagataggagtcccttggccaccatcctccgtgaaatcaatatcccgcacaagagtgctactctcctcgctccgggcccataacacttgggggtagctaaagtgaactgtatccgacatctggttcctacttcagggtcataaagcctaaatagcccacacgttccccttaaataagacatcacgatg

SEQ ID NO: 162 - DNA, 16571 bp, Homo sapiens mitochondrial
  3109: "n" refers to a nucleotide at position 3107 of the Cambridge Reference Sequence (CRS, Anderson et al. 1981 Nature 290:457-465), later determined to be absent from the human mtDNA sequence according to the revised CRS (rCRS, Andrews et al. 1999 Nature Genetics 23:147); "n" therefore represents a single nucleotide deletion at a position corresponding to nucleotide 3107 of SEQ ID NO:1 as provided herein.
gatcacaggtctatcaccctattaaccactcacgggagctctccatgcatttggtattttcgtctggggggtgtgcacgcgatagcattgcgagacgctggagccggagcaccctatgtcgcagtatctgtctttgattcctgccccatcctattatttatcgcacctacgttcaatattacagacgaacatacttactaaagtgtgttaattaattaatgcttgtaagacataataataacaattgaatgtctgcacagccgctttccacacagacatcataacaaaaaattttcaccaaaccccccctcccccgccttctggccacagcacttaaacacatctctgccaaaccccaaaaacaaagaaccctaacaccagcctaaccagatttcaaattttatcttttggcggtatgcacttttaacagtcaccccccaactaacacattattttcccctctcactcccatactactaatctcatcaacacaacccccgcccatcctacccagcacacacacaccgctgctaaccccataccccgaaccaaccaaaccccaaagacacccccccacagtttatgtagcttaccccctcaaagcaatacactgaaaatgtttagacgggctcacatcaccccataaacaaataggtttggtcctagcctttctattagctcttagtaagattacacatgcaagcatccccgttccagtgagttcaccctctaaatcaccacgatcaaaagggacaagcatcaagcacgcagcaatgcagctcaaaacgcttagcctagccacacccccacgggaaacagcagtgattaacctttagcaataaacgaaagtttaactaagctatactaaccccagggttggtcaatttcgtgccagccaccgcggtcacacgattaacccaagtcaatagaagccggcgtaaagagtgttttagatcaccccctccccaataaagctaaaactcacctgagttgtaaaaaactccagttgacacaaaatagactacgaaagtggctttaacatatctgaacacacaatagctaagacccaaactgggattagataccccactatgcttagccctaaacctcaacagttaaatcaacaaaactgctcgccagaacactacgagccacagcttaaaactcaaaggacctggcggtgcttcatatccctctagaggagcctgttctgtaatcgataaaccccgatcaacctcaccacctcttgctcagcctatataccgccatcttcagcaaaccctgatgaaggctacaaagtaagcgcaagtacccacgtaaagacgttaggtcaaggtgtagcccatgaggtggcaagaaatgggctacattttctaccccagaaaactacgatagcccttatgaaacttaagggtcgaaggtggatttagcagtaaactgagagtagagtgcttagttgaacagggccctgaagcgcgtacacaccgcccgtcaccctcctcaagtatacttcaaaggacatttaactaaaacccctacgcatttatatagaggagacaagtcgtaacatggtaagtgtactggaaagtgcacttggacgaaccagagtgtagcttaacacaaagcacccaacttacacttaggagatttcaacttaacttgaccgctctgagctaaacctagccccaaacccactccaccttactaccagacaaccttagccaaaccatttacccaaataaagtataggcgatagaaattgaaacctggcgcaatagatatagtaccgcaagggaaagatgaaaaattataaccaagcataatatagcaaggactaacccctataccttctgcataatgaattaactagaaataactttgcaaggagagccaaagctaagacccccgaaaccagacgagctacctaagaacagctaaaagagcacacccgtctatgtagcaaaatagtgggaagatttataggtagaggcgacaaacctaccgagcctggtgatagctggttgtccaagatagaatcttagttcaactttaaatttgcccacagaaccctctaaatccccttgtaaatttaactgttagtccaaagaggaacagctctttggacactaggaaaaaaccttgtagagagagtaaaaaatttaacacccatagtaggcctaaaagcagccaccaattaagaaagcgttcaagctcaacacccactacctaaaaaatcccaaacatataactgaactcctcacacccaattggaccaatctatcaccctatagaagaactaatgttagtataagtaacatgaaaacattctcctccgcataagcctgcgtcagattaaaacactgaactgacaattaacagcccaatatctacaatcaaccaacaagtcattattaccctcactgtcaacccaacacaggcatgctcataaggaaaggttaaaaaaagtaaaaggaactcggcaaatcttaccccgcctgtttaccaaaaacatcacctctagcatcaccagtattagaggcaccgcctgcccagtgacacatgtttaacggccgcggtaccctaaccgtgcaaaggtagcataatcacttgttccttaaatagggacctgtatgaatggctccacgagggttcagctgtctcttacttttaaccagtgaaattgacctgcccgtgaagaggcgggcatgacacagcaagacgagaagaccctatggagctttaatttattaatgcaaacagtacctaacaaacccacaggtcctaaactaccaaacctgcattaaaaatttcggttggggcgacctcggagcagaacccaacctccgagcagtacatgctaagacttcaccagtcaaagcgaactactatactcaattgatccaataacttgaccaacggaacaagttaccctagggataacagcgcaatcctattctagagtccatatcaacaatagggtttacgacctcgatgttggatcaggacatcccaatggtgcagccgctattaaaggttcgtttgttcaacgattaaagtcctacgtgatctgagttcagaccggagtaatccaggtcggtttctatctacnttcaaattcctccctgtacgaaaggacaagagaaataaggcctacttcacaaagcgccttcccccgtaaatgatatcatctcaacttagtattatacccacacccacccaagaacagggtttgttaagatggcagagcccggtaatcgcataaaacttaaaactttacagtcagaggttcaattcctcttcttaacaacatacccatggccaacctcctactcctcattgtacccattctaatcgcaatggcattcctaatgcttaccgaacgaaaaattctaggctatatacaactacgcaaaggccccaacgttgtaggcccctacgggctactacaacccttcgctgacgccataaaactcttcaccaaagagcccctaaaacccgccacatctaccatcaccctctacatcaccgccccgaccttagctctcaccatcgctcttctactatgaacccccctccccatacccaaccccctggtcaacctcaacctaggcctcctatttattctagccacctctagcctagccgtttactcaatcctctgatcagggtgagcatcaaactcaaactacgccctgatcggcgcactgcgagcagtagcccaaacaatctcatatgaagtcaccctagccatcattctactatcaacattactaataagtggctcctttaacctctccacccttatcacaacacaagaacacctctgattactcctgccatcatgacccttggccataatatgatttatctccacactagcagagaccaaccgaacccccttcgaccttgccgaaggggagtccgaactagtctcaggcttcaacatcgaatacgccgcaggccccttcgccctattcttcatagccgaatacacaaacattattataataaacaccctcaccactacaatcttcctaggaacaacatatgacgcactctcccctgaactctacacaacatattttgtcaccaagaccctacttctaacctccctgttcttatgaattcgaacagcatacccccgattccgctacgaccaactcatacacctcctatgaaaaaacttcctaccactcaccctagcattacttatatgacatgtctccatacccattacaatctccagcattccccctcaaacctaagaaatatgtctgataaaagagttactttgatagagtaaataataggagcttaaacccccttatttctaggactatgagaatcgaacccatccctgagaatccaaaattctccgtgccacctatcacaccccatcctaaagtaaggtcagctaaataagctatcgggcccataccccgaaaatgttggttatacccttcccgtactaattaatcccctggcccaacccgtcatctactctaccatctttgcaggcacactcatcacagcgctaagctcgcactgattttttacctgagtaggcctagaaataaacatgctagcttttattccagttctaaccaaaaaaataaaccctcgttccacagaagctgccatcaagtatttcctcacgcaagcaaccgcatccataatccttctaatagctatcctcttcaacaatatactctccggacaatgaaccataaccaatactaccaatcaatactcatcattaataatcataatggctatagcaataaaactaggaatagccccctttcacttctgagtcccagaggttacccaaggcacccctctgacatccggcctgcttcttctcacatgacaaaaactagcccccatctcaatcatataccaaatctctccctcactaaacgtaagccttctcctcactctctcaatcttatccatcatagcaggcagttgaggtggattaaaccaaacccagctacgcaaaatcttagcatactcctcaattacccacataggatgaataatagcagttctaccgtacaaccctaacataaccattcttaatttaactatttatattatcctaactactaccgcattcctactactcaacttaaactccagcaccacgaccctactactatctcgcacctgaaacaagctaacatgactaacacccttaattccatccaccctcctctccctaggaggcctgcccccgctaaccggctttttgcccaaatgggccattatcgaagaattcacaaaaaacaatagcctcatcatccccaccatcatagccaccatcaccctccttaacctctacttctacctacgcctaatctactccacctcaatcacactactccccatatctaacaacgtaaaaataaaatgacagtttgaacatacaaaacccaccccattcctccccacactcatcgcccttaccacgctactcctacctatctccccttttatactaataatcttatagaaatttaggttaaatacagaccaagagccttcaaagccctcagtaagttgcaatacttaatttctgtaacagctaaggactgcaaaaccccactctgcatcaactgaacgcaaatcagccactttaattaagctaagcccttactagaccaatgggacttaaacccacaaacacttagttaacagctaagcaccctaatcaactggcttcaatctacttctcccgccgccgggaaaaaaggcgggagaagccccggcaggtttgaagctgcttcttcgaatttgcaattcaatatgaaaatcacctcggagctggtaaaaagaggcctaacccctgtctttagatttacagtccaatgcttcactcagccattttacctcacccccactgatgttcgccgaccgttgactattctctacaaaccacaaagacattggaacactatacctattattcggcgcatgagctggagtcctaggcacagctctaagcctccttattcgagccgagctgggccagccaggcaaccttctaggtaacgaccacatctacaacgttatcgtcacagcccatgcatttgtaataatcttcttcatagtaatacccatcataatcggaggctttggcaactgactagttcccctaataatcggtgcccccgatatggcgtttccccgcataaacaacataagcttctgactcttacctccctctctcctactcctgctcgcatctgctatagtggaggccggagcaggaacaggttgaacagtctaccctcccttagcagggaactactcccaccctggagcctccgtagacctaaccatcttctccttacacctagcaggtgtctcctctatcttaggggccatcaatttcatcacaacaattatcaatataaaaccccctgccataacccaataccaaacgcccctcttcgtctgatcagtcctaatcacagcagtcctacttctcctatctctcccagtcctagctgctggcatcactatactactaacagaccgcaacctcaacactaccttcttcgaccccgccggaggaggagaccccattctataccaacacctattctgatttttcggtcaccctgaagtttatattcttatcctaccaggcttcggaataatctcccatattgtaacttactactccggaaaaaaagaaccatttggatacataggtatggtctgagctatgatatcaattggcttcctagggtttatcgtgtgagcacaccatatatttacagtaggaatagacgtagacacacgagcatatttcacctccgctaccataatcatcgctatccccaccggcgtcaaagtatttagctgactcgccacactccacggaagcaatatgaaatgatctgctgcagtgctctgagccctaggattcatctttcttttcaccgtaggtggcctgactggcattgtattagcaaactcatcactagacatcgtactacacgacacgtactacgttgtagctcacttccactatgtcctatcaataggagctgtatttgccatcataggaggcttcattcactgatttcccctattctcaggctacaccctagaccaaacctacgccaaaatccatttcactatcatattcatcggcgtaaatctaactttcttcccacaacactttctcggcctatccggaatgccccgacgttactcggactaccccgatgcatacaccacatgaaacatcctatcatctgtaggctcattcatttctctaacagcagtaatattaataattttcatgatttgagaagccttcgcttcgaagcgaaaagtcctaatagtagaagaaccctccataaacctggagtgactatatggatgccccccaccctaccacacattcgaagaacccgtatacataaaatctagacaaaaaaggaaggaatcgaaccccccaaagctggtttcaagccaaccccatggcctccatgactttttcaaaaaggtattagaaaaaccatttcataactttgtcaaagttaaattataggctaaatcctatatatcttaatggcacatgcagcgcaagtaggtctacaagacgctacttcccctatcatagaagagcttatcacctttcatgatcacgccctcataatcattttccttatctgcttcctagtcctgtatgcccttttcctaacactcacaacaaaactaactaatactaacatctcagacgctcaggaaatagaaaccgtctgaactatcctgcccgccatcatcctagtcctcatcgccctcccatccctacgcatcctttacataacagacgaggtcaacgatccctcccttaccatcaaatcaattggccaccaatggtactgaacctacgagtacaccgactacggcggactaatcttcaactcctacatacttcccccattattcctagaaccaggcgacctgcgactccttgacgttgacaatcgagtagtactcccgattgaagcccccattcgtataataattacatcacaagacgtcttgcactcatgagctgtccccacattaggcttaaaaacagatgcaattcccggacgtctaaaccaaaccactttcaccgctacacgaccgggggtatactacggtcaatgctctgaaatctgtggagcaaaccacagtttcatgcccatcgtcctagaattaattcccctaaaaatctttgaaatagggcccgtatttaccctatagcaccccctctaccccctctagagcccactgtaaagctaacttagcattaaccttttaagttaaagattaagagaaccaacacctctttacagtgaaatgccccaactaaatactaccgtatggcccaccataattacccccatactccttacactattcctcatcacccaactaaaaatattaaacacaaactaccacctacctccctcaccaaagcccataaaaataaaaaattataacaaaccctgagaaccaaaatgaacgaaaatctgttcgcttcattcattgcccccacaatcctaggcctacccgccgcagtactgatcattctatttccccctctattgatccccacctccaaatatctcatcaacaaccgactaatcaccacccaacaatgactaatcaaactaacctcaaaacaaatgataaccatacacaacactaaaggacgaacctgatctcttatactagtatccttaatcatttttattgccacaactaacctcctcggactcctgcctcactcatttacaccaaccacccaactatctataaacctagccatggccatccccttatgagcgggcgcagtgattataggctttcgctctaagattaaaaatgccctagcccacttcttaccacaaggcacacctacaccccttatccccatactagttattatcgaaaccatcagcctactcattcaaccaatagccctggccgtacgcctaaccgctaacattactgcaggccacctactcatgcacctaattggaagcgccaccctagcaatatcaaccattaaccttccctctacacttatcatcttcacaattctaattctactgactatcctagaaatcgctgtcgccttaatccaagcctacgttttcacacttctagtaagcctctacctgcacgacaacacataatgacccaccaatcacatgcctatcatatagtaaaacccagcccatgacccctaacaggggccctctcagccctcctaatgacctccggcctagccatgtgatttcacttccactccataacgctcctcatactaggcctactaaccaacacactaaccatataccaatgatggcgcgatgtaacacgagaaagcacataccaaggccaccacacaccacctgtccaaaaaggccttcgatacgggataatcctatttattacctcagaagtttttttcttcgcaggatttttctgagccttttaccactccagcctagcccctaccccccaattaggagggcactggcccccaacaggcatcaccccgctaaatcccctagaagtcccactcctaaacacatccgtattactcgcatcaggagtatcaatcacctgagctcaccatagtctaatagaaaacaaccgaaaccaaataattcaagcactgcttattacaattttactgggtctctattttaccctcctacaagcctcagagtacttcgagtctcccttcaccatttccgacggcatctacggctcaacattttttgtagccacaggcttccacggacttcacgtcattattggctcaactttcctcactatctgcttcatccgccaactaatatttcactttacatccaaacatcactttggcttcgaagccgccgcctgatactggcattttgtagatgtggtttgactatttctgtatgtctccatctattgatgagggtcttactcttttagtataaatagtaccgttaacttccaattaactagttttgacaacattcaaaaaagagtaataaacttcgccttaattttaataatcaacaccctcctagccttactactaataattattacattttgactaccacaactcaacggctacatagaaaaatccaccccttacgagtgcggcttcgaccctatatcccccgcccgcgtccctttctccataaaattcttcttagtagctattaccttcttattatttgatctagaaattgccctccttttacccctaccatgagccctacaaacaactaacctgccactaatagttatgtcatccctcttattaatcatcatcctagccctaagtctggcctatgagtgactacaaaaaggattagactgagccgaattggtatatagtttaaacaaaacgaatgatttcgactcattaaattatgataatcatatttaccaaatgcccctcatttacataaatattatactagcatttaccatctcacttctaggaatactagtatatcgctcacacctcatatcctccctactatgcctagaaggaataatactatcgctgttcattatagctactctcataaccctcaacacccactccctcttagccaatattgtgcctattgccatactagtctttgccgcctgcgaagcagcggtgggcctagccctactagtctcaatctccaacacatatggcctagactacgtacataacctaaacctactccaatgctaaaactaatcgtcccaacaattatattactaccactgacatgactttccaaaaaacacataatttgaatcaacacaaccacccacagcctaattattagcatcatccctctactattttttaaccaaatcaacaacaacctatttagctgttccccaaccttttcctccgaccccctaacaacccccctcctaatactaactacctgactcctacccctcacaatcatggcaagccaacgccacttatccagtgaaccactatcacgaaaaaaactctacctctctatactaatctccctacaaatctccttaattataacattcacagccacagaactaatcatattttatatcttcttcgaaaccacacttatccccaccttggctatcatcacccgatgaggcaaccagccagaacgcctgaacgcaggcacatacttcctattctacaccctagtaggctcccttcccctactcatcgcactgatttacactcacaacaccctaggctcactaaacattctactactcactctcactgcccaagaactatcaaactcctgagccaacaacttaatatgactagcttacacaatagcttttatagtaaagatacctctttacggactccacttatgactccctaaagcccatgtcgaagcccccatcgctgggtcaatagtacttgccgcagtactcttaaaactaggcggctatggtataatacgcctcacactcattctcaaccccctgacaaaacacatagcctaccccttccttgtactatccctatgaggcataattataacaagctccatctgcctacgacaaacagacctaaaatcgctcattgcatactcttcaatcagccacatagccctcgtagtaacagccattctcatccaaaccccctgaagcttcaccggcgcagtcattctcataatcgcccacggacttacatcctcattactattctgcctagcaaactcaaactacgaacgcactcacagtcgcatcataatcctctctcaaggacttcaaactctactcccactaatagctttttgatgacttctagcaagcctcgctaacctcgccttaccccccactattaacctactgggagaactctctgtgctagtaaccacgttctcctgatcaaatatcactctcctacttacaggactcaacatactagtcacagccctatactccctctacatatttaccacaacacaatggggctcactcacccaccacattaacaacataaaaccctcattcacacgagaaaacaccctcatgttcatacacctatcccccattctcctcctatccctcaaccccgacatcattaccggattttcctcttgtaaatatagtttaaccaaaacatcagattgtgaatctgacaacagaggcttacgaccccttatttaccgagaaagctcacaagaactgctaactcatgcccccatgtctaacaacatggctttctcaacttttaaaggataacagctatccattggtcttaggccccaaaaattttggtgcaactccaaataaaagtaataaccatgcacactactataaccaccctaaccctgacttccctaattccccccatccttaccaccctcgttaaccctaacaaaaaaaactcatacccccattatgtaaaatccattgtcgcatccacctttattatcagtctcttccccacaacaatattcatgtgcctagaccaagaagttattatctcgaactgacactgagccacaacccaaacaacccagctctccctaagcttcaaactagactacttctccataatattcatccctgtggcattgttcgttacatggtccatcatagaattctcactgtgatatataaactcagacccaaacattaatcagttcttcaaatatctactcatcttcctaattaccatactaatcttagttaccgctaacaacctattccaactgttcatcggctgagagggcgtaggaattatatccttcttgctcatcagttgatgatacgcccgagcagatgccaacacagcagccattcaagcaatcctatacaaccgtatcggcgatatcggtttcatcctcgccttagcatgatttatcctacactccaactcatgagacccacaacaaatagcccttctaaacgctaatccaagcctcaccccactactaggcctcctcctagcagcagcaggcaaatcagcccaattaggtctccacccctgactcccctcagccatagaaggccccaccccagtctcagccctactccactcaagcactatagttgtagcaggaatcttcttactcatccgcttccaccccctagcagaaaatagcccactaatccaaactctaacactatgcttaggcgctatcaccactctgttcgcagcagtctgcgcccttacacaaaatgacatcaaaaaaatcgtagccttctccacttcaagtcaactaggactcataatagttacaatcggcatcaaccaaccacacctagcattcctgcacatctgtacccacgccttcttcaaagccatactatttatgtgctccgggtccatcatccacaaccttaacaatgaacaagatattcgaaaaataggaggactactcaaaaccatacctctcacttcaacctccctcaccattggcagcctagcattagcaggaatacctttcctcacaggtttctactccaaagaccacatcatcgaaaccgcaaacatatcatacacaaacgcctgagccctatctattactctcatcgctacctccctgacaagcgcctatagcactcgaataattcttctcaccctaacaggtcaacctcgcttccccacccttactaacattaacgaaaataaccccgccctactaaaccccattaaacgcctgacagccggaagcctattcgcaggatttctcattactaacaacatttcccccgcatcccccttccaaacaacaatccccctctacctaaaactcacagccctcgctgtcactttcctaggacttctaacagccctagacctcaactacctaaccaacaaacttaaaataaaatccccactatgcacattttatttctccaacatactcggattctaccctagcatcacacaccgcacaatcccctatctaggccttcttacgagccaaaacctgcccctactcctcctagacctaacctgactagaaaagctattacctaaaacaatttcacagcaccaaatctccacctccatcatcacctcaacccaaaaaggcataattaaactttacttcctctctttcttcttcccactcatcctaaccctactcctaatcacataacctattcccccgagcaatctcaattacaatatatacaccaacaaacaatgttcaaccagtaactactactaatcaacgcccataatcatacaaagcccccgcaccaataggatcctcccgaatcaaccctgacccctctccttcataaattattcagcttcctacactattaaagtttaccacaaccaccaccccatcatactctttcacccacagcaccaatcctacctccatcgctaaccccactaaaacactcaccaagacctcaacccctgacccccatgcctcaggatactcctcaatagccatcgctgtagtatatccaaagacaaccatcattccccctaaataaattaaaaaaactattaaacccatataacctcccccaaaattcagaataataacacacccgaccacaccgctaacaatcaatactaaacccccataaataggagaaggcttagaagaaaaccccacaaaccccattactaaacccacactcaacagaaacaaagcatacatcattattctcgcacggactacaaccacgaccaatgatatgaaaaaccatcgttgtatttcaactacaagaacaccaatgaccccaatacgcaaaattaaccccctaataaaattaattaaccactcactcatcgacctccccaccccatccaacatctccgcatgatgaaacttcggctcactccttggcgcctgcctgatcctccaaatcaccacaggactattcctagccatgcactactcaccagacgcctcaaccgccttttcatcaatcgcccacatcactcgagacgtaaattatggctgaatcatccgctaccttcacgccaatggcgcctcaatattctttatctgcctcttcctacacatcgggcgaggcctatattacggatcatttctctactcagaaacctgaaacatcggcattatcctcctgcttgcaactatagcaacagccttcataggctatgtcctcccgtgaggccaaatatcattctgaggggccacagtaattacaaacttactatccgccatcccatacattgggacagacctagttcaatgaatctgaggaggctactcagtagacagtcccaccctcacacgattctttacctttcacttcatcttgcccttcattattgcagccctagcagcactccacctcctattcttgcacgaaacgggatcaaacaaccccctaggaatcacctcccattccgataaaatcaccttccacccttactacacaatcaaagacgccctcggcttacttctcttcattctctccttaatgacattaacactattctcaccagacctcctaggcgacccagacaattataccctagccaaccccttaaacacccctccccacatcaagcccgaatgatatttcctattcgcctacacaattctccgatccgtccctaacaaactaggaggcgtccttgccctattactatccatcctcatcctagcaataatccccatcctccatatatccaaacaacaaagcataatatttcgcccactaagccaatcactttattgactcctagccgcagacctcctcattctaacctgaatcggaggacaaccagtaagctacccttttaccatcattggacaagtagcatccgtactatacttcacaacaatcctaatcctaataccaactatctccctaattgaaaacaaaatactcaaatgggcctgtccttgtagtataaactaatacaccagtcttgtaaaccggagatgaaaacctttttccaaggacaaatcagagaaaaagtctttaactccaccattagcacccaaagctaagattctaatttaaactattctctgttctttcatggggaagcagatttgggtaccacccaagtattgacttacccatcaacaaccgctatgtacttcgtacattactgccagccaccatgaatattgcacggtaccataaatacttgaccacctgtagtacataaaaacccaatccacatcaaaaccccctccccatgcttacaagcaagtacagcaatcaaccctcaactatcacacatcaactgcaactccaaagccacctctcacccactaggataccaacaaacctacccacccttaacagtacatagtacataaagccatttaccgtacatagcacattacagtcaaatcccttctcgtccccatggatgacccccctcagataggggtcccttgaccaccatcctccgtgaaatcaatatcccgcacaagagtgctactctcctcgctccgggcccataacacttgggggtagctaaagtgaactgtatccgacatctggttcctacttcagggtcataaagcctaaatagcccacacgttccccttaaataagacatcacgatg

SEQ ID NO: 163 - DNA, 16575 bp, Homo sapiens mitochondrial
  3113: "n" refers to a nucleotide at position 3107 of the Cambridge Reference Sequence (CRS, Anderson et al. 1981 Nature 290:457-465), later determined to be absent from the human mtDNA sequence according to the revised CRS (rCRS, Andrews et al. 1999 Nature Genetics 23:147); "n" therefore represents a single nucleotide deletion at a position corresponding to nucleotide 3107 of SEQ ID NO:1 as provided herein.
gatcacaggtctatcaccctattaaccactcacgggagctctccatgcatttggtattttcgtctggggggtgtgcacgcgatagcattgcgagacgctggagccggagcaccctatgtcgcagtatctgtctttgattcctgccccatcccattatttatcgcacctacgttcaatattacaggcgaacatacctactaaagtgtgttaattaattaatgcttgtaggacataataataacaattgaatgtctgcacagccgctttccacacagacatcataacaaaaaatttccaccaaaccccccctcccccccgcttctggccacagcacttaaacacatctctgccaaaccccaaaaacaaagaaccctaacaccagcctaaccagatttcaaattttatcttttggcggtatgcacttttaacagtcaccccccaactaacacattattttcccctcccactcccatactactaatctcatcaatacaacccccgcccatcctacccagcacacacacaccaccagctgctaaccccataccccgaaccaaccaaaccccaaagacaccccccacagtttatgtagcttacctcctcaaagcaatacactgaaaatgtttagacgggctcacatcaccccataaacaaataggtttggtcctagcctttctattagctcttagtaagattacacatgcaagcatccccgttccagtgagttcaccctctaaatcaccacgatcaaaagggacaagcatcaagcacgcaacaatgcagctcaaaacgcttagcctagccacacccccacgggaaacagcagtgattaacctttagcaataaacgaaagtttaactaagctatactaaccccagggttggtcaatttcgtgccagccaccgcggtcacacgattaacccaagtcaatagaagccggcgtaaagagtgttttagatcaccccctccccaataaagctaaaactcacctgagttgtaaaaaactccagttgacacaaaataaactacgaaagtggctttaacatatctgaacacacaatagctaagacccaaactgggattagataccccactatgcttagccctaaacctcaacagttaaatcaacaaaactgctcgccagaacactacgagccacagcttaaaactcaaaggacctggcggtgcttcatatccctctagaggagcctgttctgtaatcgataaaccccgatcaacctcaccacctcttgctcagcctatataccgccatcttcagcaaaccctgatgaaggctacaaagtaagcgcaagtacccacgtaaagacgttaggtcaaggtgtagcccatgaggtggcaagaaatgggctacattttctaccccagaaaactacgatagcccttatgaaacttaagggtcgaaggtggatttagcagtaaactgagagtagagtgcttagttgaacagggccctgaagcgcgtacacaccgcccgtcaccctcctcaagtatacttcaaaggacatttaactaaaacccctacgcatttatatagaggagacaagtcgtaacatggtaagtgtactggaaagtgcacttggacgaaccagagtgtagcttaacacaaagcacccaacttacacttaggagatttcaacttaacttgaccgctctgagctaaacctagccccaaacccactccaccttactaccagacaaccttagccaaaccatttacccaaataaagtataggcgatagaaattgaaacctggcgcaatagatatagtaccgcaagggaaagatgaaaaattataaccaagcataatatagcaaggactaacccctataccttctgcataatgaattaactagaaataactttgcaaggagagccaaagctaagacccccgaaaccagacgagctacctaagaacagctaaaagagcacacccgtctatgtagcaaaatagtgggaagatttataggtagaggcgacaaacctaccgagcctggtgatagctggttgtccaagatagaatcttagttcaactttaaatttgcccacagaaccctctaaatccccttgtaaatttaactgttagtccaaagaggaacagctctttggacactaggaaaaaaccttgtagagagagtaaaaaatttaacacccatagtaggcctaaaagcagccaccaattaagaaagcgttcaagctcaacacccactacctaaaaaatcccaaacatataactgaactcctcacacccaattggaccaatctatcaccctatagaagaactaatgttagtataagtaacatgaaaacattctcctccgcataagcctgcgtcagattaaaacactgaactgacaattaacagcccaatatctacaatcaaccaacaagtcattattacccccactgtcaacccaacacaggcatgctcataaggaaaggttaaaaaaagtaaaaggaactcggcaaatcttaccccgcctgtttaccaaaaacatcacctctagcatcaccagtattagaggcaccgcctgcccagtgacacatgtttaacggccgcggtaccctaaccgtgcaaaggtagcataatcacttgttccttaaatagggacctgtatgaatggctccacgagggttcagctgtctcttacttttaaccagtgaaattgacctgcccgtgaagaggcgggcatgacacagcaagacgagaagaccctatggagctttaatttattaatgcaaacagtacctaacaaacccacaggtcctaaactactaaacctgcattaaaaatttcggttggggcgacctcggagcagaacccaacctccgagcagtacatgctaagacttcaccagtcaaagcgaactactatactcaattgatccaataacttgaccaacggaacaagttaccctagggataacagcgcaatcctattctagagtccatatcaacaatagggtttacgacctcgatgttggatcaggacatcccgatggtgcagccgctattaaaggttcgtttgttcaacgattaaagtcctacgtgatctgagttcagaccggagtaatccaggtcggtttctatctacnttcaaattcctccctgtacgaaaggacaagagaaataaggcctacttcacaaagcgccttcccccgtaaatgatatcatctcaacttagtattatacccacacccacccaagaacagggtttgttaagatggcagagcccggtaatcgcataaaacttaaaactttacagtcagaggttcaattcctcttcttaacaacatacccatggccaacctcctactcctcattgtacccattctaatcgcaatggcattcctaatgcttaccgaacgaaaaattctaggctatatacaactacgcaaaggccccaacgttgtaggcccctacgggctactacaacccttcgctgacgccataaaactcttcaccaaagagcccctaaaacccgccacatctaccatcaccctctacatcaccgccccgaccttagctctcaccatcgctcttctactatgaacccccctccccatacccaaccccctggttaacctcaacctaggcctcctatttattctagccacctctagcctagccgtttactcaatcctctgatcagggtgagcatcaaactcaaactacgccctgatcggcgcactgcgagcagtagcccaaacaatctcatatgaagtcaccctagccatcattctactatcaacattactaataagtggctcctttaacctctccacccttatcacaacacaagaacacctctgattactcctgccatcatgacccttggccataatatgatttatctccacactagcagagaccaaccgaacccccttcgaccttgccgaaggggaatccgaactagtctcaggcttcaacatcgaatacgccgcaggccccttcgccctattcttcatagccgaatacacaaacattattataataaacaccctcaccactacaatcttcctaggaacaacatatgacgcactctcccctgaactctacacaacatattttgtcaccaagaccctacttctgacctccctgttcttatgaattcgaacagcatacccccgattccgctacgaccaactcatacacctcctatgaaaaaacttcctaccactcaccctagcattacttatatgatatgtctccatacccattacaatctccagcattccccctcaaacctaagaaatatgtctgataaaagagttactttgatagagtaaataataggagcttaaacccccttatttctaggactatgagaatcgaacccatccctgagaatccaaaattctccgtgccacctatcacaccccatcctaaagtaaggtcagctaaataagctatcgggcccataccccgaaaatgttggttatacccttcccgtactaattaatcccctggcccaacccgtcatctactctaccatctttgcaggcacactcatcacagcgctaagctcgcactgattttttacctgagtaggcctagaaataaacatgctagcttttattccagttctaaccaaaaaaataaaccctcgttccacagaagctgccatcaagtatttcctcacgcaagcaaccgcatccataatccttctaatagctatcctcttcaacaatatactctccggacaatgaaccataaccaatactaccaatcaatactcatcattaataatcataatggctatagcaataaaactaggaatagccccctttcacttctgagtcccagaggttacccaaggcacccctctgacatccggcctgcttcttctcacatgacaaaaactagcccccatctcaatcatataccaaatctctccctcactaaacgtaagccttctcctcactctctcaatcttatccatcatagcaggcagttgaggtggattaaaccaaacccagctacgcaaaatcttagcatactcctcaattacccacataggatgaataatagcagttctaccgtacaaccctaacataaccattcttaatttaactatttatattatcctaactactaccgcattcctactactcaacttaaactccagcaccacgaccctactactatctcgcacctgaaacaagctaacatgactaacacccttaattccatccaccctcctctccctaggaggcctgcccccgctaaccggctttttgcccaaatgggccattatcgaagaattcacaaagaacaatagcctcatcatccccaccatcatagccaccatcaccctccttaacctctacttctacctacgcctaatctactccacctcaatcacactactccccatatctaacaacgtaaaaataaaatgacagtttgaacatacaaaacccaccccattcctccccacactcatcgcccttaccacgctactcctacctatctccccttttatactaataatcttatagaaatttaggttaaatacagaccaagagccttcaaagccctcagtaagttgcaatacttaatttctgtaacagctaaggactgcaaaaccccactctgcatcaactgaacgcaaatcagccactttaattaagctaagcccttactagaccaatgggacttaaacccacaaacacttagttaacagctaagcaccctaatcaactggcttcaatctacttctcccgccgccgggaaaaaaggcgggagaagccccggcaggtttgaagctgcttcttcgaatttgcaattcaatatgaaaatcacctcggagctggtaaaaagaggcctaacccctgtctttagatttacagtccaatgcttcactcagccattttacctcacccccactgatgttcgccgaccgttgactattctctacaaaccacaaagacattggaacactatacctattattcggcgcatgagctggagtcctaggcacagctctaagcctccttattcgagccgagctgggccagccaggcaaccttctaggtaacgaccacatctacaacgttatcgtcacagcccatgcatttgtaataatcttcttcatagtaatacccatcataatcggaggctttggcaactgactagtccccctaataatcggtgcccccgatatggcgtttccccgcataaacaacataagcttctgactcttacctccctctctcctactcctgctcgcatctgctatagtggaggccggagcaggaacaggttgaacagtctaccctcccttagcagggaactactcccaccctggagcctccgtagacctaaccatcttctccttacacctagcaggtgtctcctctatcttaggggccatcaatttcatcacaacaattatcaatataaaaccccctgccataacccaataccaaacgcccctcttcgtctgatccgtcctaatcacagcagtcctacttctcctatctctcccagtcctagctgctggcatcactatactactaacagaccgcaacctcaacaccaccttcttcgaccccgccggaggaggagaccccattctataccaacacctattctgatttttcggtcaccctgaagtttatattcttatcctaccaggcttcggaataatctcccatattgtaacttactactccggaaaaaaagaaccatttggatacataggtatggtctgagctatgatatcaattggcttcctagggtttatcgtgtgagcacaccatatatttacagtaggaatagacgtagacacacgagcatatttcacctccgctaccataatcatcgctatccccaccggcgtcaaagtatttagctgactcgccacactccacggaagcaatatgaaatgatctgctgcagtgctctgagccctaggattcatctttcttttcaccgtaggtggcctgactggcattgtattagcaaactcatcactagacatcgtactacacgacacgtactacgttgtagctcacttccactatgtcctatcaataggagctgtatttgccatcataggaggcttcattcactgatttcccctattctcaggctacaccctagaccaaacctacgccaaaatccatttcactatcatattcatcggcgtaaatctaaccttcttcccacaacactttctcggcctatccggaatgccccgacgttactcggactaccccgatgcatacaccacatgaaatatcctatcatctgtaggttcattcatttctctaacagcagtaatattaataattttcatgatttgagaagccttcgcttcgaagcgaaaagtcctaatagtagaagaaccctccataaacctggagtgactatatggatgccccccaccctaccacacattcgaagaacccgtatacataaaatctagacaaaaaaggaaggaatcgaaccccccaaagctggtttcaagccaaccccatggcctccatgactttttcaaaaagatattagaaaaaccatttcataactttgtcaaagttaaattataggctaaatcctatatatcttaatggcacatgcagcgcaagtaggtctacaagacgctacttcccctatcatagaagagcttatcacctttcatgatcacgccctcataatcattttccttatctgcttcctagtcctgtatgcccttttcctaacactcacaacaaaactaactaatactaacatctcagacgctcaggaaatagagaccgtctgaactatcctgcccgccatcatcctagtcctcatcgccctcccatccctacgcatcctttacataacagacgaggtcaacgatccctcccttaccatcaaatcaattggccaccaatggtactgaacctacgagtacaccgactacggcggactaatcttcaactcctacatacttcccccattattcctagaaccaggcgacctgcgactccttgacgttgacaatcgagtagtactcccgattgaagcccccattcgtataataattacatcacaagacgtcttgcactcatgagctgtccccacattaggcttaaaaacagatgcaattcccggacgtctaaaccaaaccactttcaccgctacacgaccgggggtatactacggtcaatgctctgaaatctgtggagcaaaccacagtttcatacccatcgtcctagaattaattcccctaaaaatctttgaaatagggcccgtatttaccctatagcaccccctctaccccctctagagcccactgtaaagctaacttagcattaaccttttaagttaaagattaagagaaccaacacctctttacagtgaaatgccccaactaaatactaccgtatggcccaccataattacccccatactccttacactattcctcatcacccaactaaaaatattaaacacaaactaccacctacctccctcaccaaagcccataaaaataaaaaattataacaaaccctgagaaccaaaatgaacgaaaatctgttcgcttcattcattgcccccacaatcctaggcctacccgccgcagtactgatcattctatttccccctctattgatccccacctccaaatatctcatcaacaaccgactaatcaccacccaacaatgactaatcaaactaacctcaaaacaaatgatagccatacacaacactaaaggacgaacctgatctcttatactagtatccttaatcatttttattgccacaactaacctcctcggactcctgcctcactcatttacaccaaccacccaactatctataaacctagccatggccatccccttatgagcgggcgcagtgattataggctttcgctctaagattaaaaatgccctagcccacttcttaccacaaggcacacctacaccccttatccccatactagttattatcgaaaccatcagcctactcattcaaccaatagccctggccgtacgcctaaccgctaacattactgcaggccacctactcatgcacctaattggaagcgccaccctagcaatatcaaccattaaccttccctctacacttatcatcttcacaattctaattctactgactatcctagaaatcgctgtcgccttaatccaagcctacgttttcacacttctagtaagcctctacctgcacgacaacacataatgacccaccaatcgcatgcctatcatatagtaaaacccagcccatgacccctaacaggggccctctcagccctcctaatgacctccggcctagccatgtgatttcacttccactccataacgctcctcatactaggcctactaaccaacacactaaccatataccaatgatggcgcgatgtaacacgagaaagcacataccaaggccaccacacaccacctgtccaaaaaggccttcgatacgggataatcctatttattacctcagaagtttttttcttcgcaggatttttctgagccttttaccactccagcctagcccctaccccccaactaggagggcactggcccccaacaggcatcaccccgctaaatcccctagaagtcccactcctaaacacatccgtattactcgcatcaggagtatcaatcacctgagctcaccatagtctaatagaaaacaaccgaaaccaaataattcaagcactgcttattacaattttactgggtctctattttaccctcctacaagcctcagagtacttcgagtctcccttcaccatttccgacggcatctacggctcaacattttttgtagccacaggcttccacggacttcacgtcattattggctcaactttcctcactatctgcttcatccgccaactaatatttcactttacatccaaacatcactttggcttcgaagccgccgcctgatactggcattttgtagatgtggtttgactatttctgtatgtctccatctattgatgagggtcttactcttttagtataaatagtaccgttaacttccaattaactagttttgacaacattcaaaaaagagtaataaacttcgccttaattttaataatcaacaccctcctagccttactactaataatcattacattttgactaccacaactcaacggctacatagaaaaatccaccccttacgagtgcggcttcgaccctatatcccccgcccgcgtccctttctccataaaattcttcttagtagctattaccttcttattatttgatctagaaattgccctccttttacccctaccatgagccctacaaacaactaacctgccactaatagttatgtcatccctcttattaatcatcatcctagccctaagtctggcctatgagtgactacaaaaaggattagactgagccgaattggtatatagtttaaacaaaacgaatgatttcgactcattaaattatgataatcatatttaccaaatgcccctcatttacataaatattatactagcatttaccatctcacttctaggaatactagtatatcgctcacacctcatatcctccctactatgcctagaaggaataatactatcgctgttcattatagctactctcataaccctcaacacccactccctcttagccaatattgtgcctattgccatactagtctttgccgcctgcgaagcagcggtgggcctagccctactagtctcaatctccaacacatatggcctagactacgtacataacctaaacctactccaatgctaaaactaatcgtcccaacaattatattactaccactgacatgactttccaaaaaacacataatttgaatcaacacaaccacccacagcctaattattagcatcatccccctactattttttaaccaaatcaacaacaacctatttagctgttccccaaccttttcctccgaccccctaacaacccccctcctaatactaactacctgactcctacccctcacaatcatggcaagccaacgccacttatccagtgaaccactatcacgaaaaaaactctacctctctatactaatctccctacaaatctccttaattataacattcacagccacagaactaatcatattttatatcttcttcgaaaccacacttatccccaccttggctatcatcacccgatgaggcaaccagccagaacgcctgaacgcaggcacatacttcctattctacaccctagtaggctcccttcccctactcatcgcactaatttacactcacaacaccctaggctcactaaacattctactactcactctcactgcccaagaactatcaaactcctgagccaacaacttaatatgactagcttacacaatagcttttatagtaaagatacctctttacggactccacttatgactccctaaagcccatgtcgaagcccccatcgctgggtcaatagtacttgccgcagtactcttaaaactaggcggctatggtataatacgcctcacactcattctcaaccccctgacaaaacacatagcctaccccttccttgtactatccctatgaggcataattataacaagctccatctgcctacgacaaacagacctaaaatcgctcattgcatactcttcaatcagccacatagccctcgtagtaacagccattctcatccaaaccccctgaagcttcaccggcgcagtcattctcataatcgcccacggacttacatcctcattactattctgcctagcaaactcaaactacgaacgcactcacagtcgcatcataatcctctctcaaggacttcaaactctactcccactaatagctttttgatgacttctagcaagcctcgctaacctcgccttaccccccactattaacctactgggagaactctctgtgctagtaaccacattctcctgatcaaatatcactctcctactcacaggactcaacatactagtcacagccctatactccctctacatatttaccacaacacaatggggctcactcacccaccacattaacaacataaaaccctcattcacacgagaaaacaccctcatgttcatacacctatcccccattctcctcctatccctcaaccccgacatcattaccgggttttcctcttgtaaatatagtttaaccaaaacatcagattgtgaatctgacaacagaggcttacgaccccttatttaccgagaaagctcacaagaactgctaactcatgcccccatgtctaacaacatggctttctcaacttttaaaggataacagctatccattggtcttaggccccaaaaattttggtgcaactccaaataaaagtaataaccatgcacactactataaccaccctaaccctgacttccctaattccccccatccttaccaccctcgttaaccctaacaaaaaaaactcatacccccattatgtaaaatccattgtcgcatccacctttattatcagtctcttccccacaacaatattcatgtgcctagaccaagaagttattatctcgaactgacactgagccacaacccaaacaacccagctctccctaagcttcaaactagactacttctccataatattcatccctgtagcattgttcgttacatggtccatcatagaattctcactgtgatatataaactcagacccaaacattaatcagttcttcaagtatctactcattttcctaattaccatactaatcttagttaccgctaacaacctattccaactgttcatcggctgagagggcgtaggaattatatccttcttgctcatcagttgatgatacgcccgagcagatgccaacacagcagccattcaagcaatcctatacaaccgtatcggcgatatcggtttcatcctcgccttagcatgatttatcctacactccaactcatgagacccacaacaaatagcccttctaaacgctaatccaagcctcaccccactactaggcctcctcctagcagcagcaggcaaatcagcccaattaggtctccacccctgactcccctcagccatagaaggccccaccccagtctcagccctactccactcaagcactatagttgtagcaggaatcttcttactcatccgcttccaccccctagcagaaaatagcccactaatccaaactctaacactatgcttaggcgctatcaccactctgttcgcagcagtctgcgcccttacacaaaatgacatcaaaaaaatcgtagccttctccacttcaagtcaactaggactcataatagttacaatcggcatcaaccaaccacacctagcattcctgcacatctgtacccacgccttcttcaaagccatactatttatgtgctccgggtccatcatccacaaccttaacaatgaacaagatattcgaaaaataggaggactactcaaaaccatacctctcacttcaacctccctcaccattggcagcctagcattagcaggaatacctttcctcacaggtttctactccaaagaccacatcatcgaaaccgcaaacatatcatacacaaacgcctgagccctatctattactctcatcgctacctccctaacaagcgcctatagcactcgaataattcttctcaccctaacaggtcaacctcgcttccctacccttactaacattaacgaaaataaccccaccctactaaaccccattaaacgcctggcagccggaagcctattcgcaggatttctcattactaacaacatttcccccgcatcccccttccaaacaacaatccccctctacctaaaactcacggccctcgctgtcactttcctaggacttctaacagccctagacctcaactacctaaccaacaaacttaaaataaaatccccactatgcacattttatttctccaacatactcggattctaccctagcatcacacaccgcacaatcccctatctaggccttcttacgagccaaaacctgcccctactcctcctagacctaacctgactagaaaagctattacctaaaacaatttcacagcaccaaatctccacctccatcatcacctcaacccaaaaaggcataattaaactttacttcctctctttcttcttcccactcatcctaaccctactcctaatcacataacctattcccccgagcaatctcaattacaatatatacaccaacaaacaatgttcaaccagtaactactactaatcaacgcccataatcatacaaagcccccgcaccaataggatcctcccgaatcaaccctgacccctctccttcataaattattcagcttcctacactattaaagtttaccacaaccaccaccccatcatactctttcacccacagcaccaatcctacctccatcgctaaccccactaaaacactcaccaagacctcaacccctgacccccatgcctcaggatactcctcaatagccatcgctgtagtatatccaaagacaaccatcattccccctaaataaattaaaaaaactattaaacccatataacctcccccaaaattcagaataataacacacccgaccacgccgctaacaatcaatactaaacccccataaataggagaaggcttagaagaaaaccccacaaaccccattactaaacccacactcaacagaaacaaagcatacatcattattctcgcacggactacaaccacgaccaatgatatgaaaaaccatcgttgtatttcaactacaagaacaccaatgaccccaatacgcaaaattaaccccctaataaaattaattaaccactcattcatcgacctccccaccccatccaacatctccgcatgatgaaacttcggctcactccttggcgcctgcctgatcctccaaatcaccacaggactattcctagccatgcactactcaccagacgcctcaaccgccttttcatcaatcgcccacatcactcgagacgtaaattatggctgaatcatccgctaccttcacgccaatggcgcctcaatattctttatctgcctcttcctacacatcgggcgaggcctatattacggatcatttctctactcagaaacctgaaacatcggcattatcctcctgcttgcaactatagcaacagccttcataggctatgtcctcccgtgaggccaaatatcattctgaggggccacagtaattacaaacttactatccgccatcccatacattgggacagacctagttcaatgaatctgagggggctactcagtagacagtcccaccctcacacgattctttacctttcacttcatcttacccttcattattgcagccctagcagcactccacctcctattcttgcacgaaacgggatcaaacaaccccctaggaatcacctcccattctgataaaatcaccttccacccttactacacaatcaaagacgccctcggcttacttctcttccttctctccttaatgacattaacactattctcaccagacctcctaggcgacccagacaattataccctagccaaccccttaaacacccctccccacatcaagcccgaatgatatttcctattcgcctacacaattctccgatccgtccctaacaaactaggaggcgtccttgccctactactatccatcctcatcctagcaataatccccatcctccatatatccaaacaacaaagcataatatttcgcccactaagccaatcactttattgactcctagccgcagacctcctcattctaacctgaatcggaggacaaccagtaagctacccctttaccatcattggacaagtagcatccgtactatacttcacaacaatcctaatcctaataccaactatctccctaattgaaaacaaaatactcaaatgggcctgtccttgtagtataaactaatacaccagtcttgtaaaccggagatgaaaacctttttccaaggacaaatcagagaaaaagtctttaactccaccattagcacccaaagctaagattctaatttaaactattctctgttctttcatggggaagcagatttgggtaccacccaagtattgactcacccatcaacaaccgctatgtatttcgtacattactgccagccaccatgaatattgtacggtaccataaatacttgaccacctgtagtacataaaaacccaatccacatcaaaaccccccccccatgcttacaagcaagtacagcaatcaaccttcaactatcacacatcaactgcaactccaaagccacccctcacccactaggatatcaacaaacctacccatccttaacagtacatggtacataaagccatttaccgtacatagcacattacagtcaaatcccttctcgtccccacggatgacccccctcagataggagtcccttgaccaccatcctccgtgaaatcaatatcccgcacaagagtgctactctcctcgctccgggcccataacacttgggggtagctaaagtgaactgtatccgacatctggttcctacttcagggccataaagcctaaatagcccacacgttccccttaaataagacatcacgatg

SEQ ID NO: 164 - DNA, 16569 bp, Homo sapiens mitochondrial
  3107: "n" refers to a nucleotide at position 3107 of the Cambridge Reference Sequence (CRS, Anderson et al. 1981 Nature 290:457-465), later determined to be absent from the human mtDNA sequence according to the revised CRS (rCRS, Andrews et al. 1999 Nature Genetics 23:147); "n" therefore represents a single nucleotide deletion at a position corresponding to nucleotide 3107 of SEQ ID NO:1 as provided herein.
gatcacaggtctatcaccctattaaccactcacgggagctctccatgcatttggtattttcgtctggggggtgtgcacgcgatagcattgcgagacgctggagccggagcaccctatgtcgcagtatctgtctttgattcctgcctcattctattatttatcgcacctacgttcaatattacaggcgaacatacttactaaagtgtgttaattaattaatgcttgtaggacataataataacaattgaatgtctgcacagccgctttccacacagacatcataacaaaaaatttccaccaaaccccccctcccccccgcttctggccacagcacttaaacacatctctgccaaaccccaaaaacaaagaaccctaacaccagcctaaccagatttcaaattttatcttttggcggtatgcacttttaacagtcaccccccaactaacacattattttcccctcccactcccatactactaatctcatcaatacaacccccgcccatcctacccagcacacacaccgctgctaaccccataccccgaaccaaccaaaccccaaagacaccccccacagtttatgtagcttacctcctcaaagcaatacactgaaaatgtttagacgggctcacatcaccccataaacaaataggtttggtcctagcctttctattagctcttagtaagattacacatgcaagcatccccgttccagtgagttcaccctctaaatcaccacgatcaaaaggaacaagcatcaagcacgcagcaatgcagctcaaaacgcttagcctagccacacccccacgggaaacagcagtgattaacctttagcaataaacgaaagtttaactaagctatactaaccccagggttggtcaatttcgtgccagccaccgcggtcacacgattaacccaagtcaatagaagccggcgtaaagagtgttttagatcaccccctccccaataaagctaaaactcacctgagttgtaaaaaactccagttgacacaaaatagactacgaaagtggctttaacatatctgaacacacaatagctaagacccaaactgggattagataccccactatgcttagccctaaacctcaacagttaaatcaacaaaactgctcgccagaacactacgagccacagcttaaaactcaaaggacctggcggtgcttcatatccctctagaggagcctgttctgtaatcgataaaccccgatcaacctcaccacctcttgctcagcctatataccgccatcttcagcaaaccctgatgaaggctacaaagtaagcgcaagtacccacgtaaagacgttaggtcaaggtgtagcccatgaggtggcaagaaatgggctacattttctaccccagaaaactacgatagcccttatgaaacttaagggtcgaaggtggatttagcagtaaactgagagtagagtgcttagttgaacagggccctgaagcgcgtacacaccgcccgtcaccctcctcaagtatacttcaaaggacatttaactaaaacccctacgcatttatatagaggagacaagtcgtaacatggtaagtgtactggaaagtgcacttggacgaaccagagtgtagcttaacacaaagcacccaacttacacttaggagatttcaacttaacttgaccgctctgagctaaacctagccccaaacccactccaccttactaccagacaaccttagccaaaccatttacccaaataaagtataggcgatagaaattgaaacctggcgcaatagatatagtaccgcaagggaaagatgaaaaattataaccaagcataatatagcaaggactaacccctataccttctgcataatgaattaactagaaataactttgcaaggagagccaaagctaagacccccgaaaccagacgagctacctaagaacagctaaaagagcacacccgtctatgtagcaaaatagtgggaagatttataggtagaggcgacaaacctaccgagcctggtgatagctggttgtccaagatagaatcttagttcaactttaaatttgcccacagaaccctctaaatccccttgtaaatttaactgttagtccaaagaggaacagctctttggacactaggaaaaaaccttgtagagagagtaaaaaatttaacacccatagtaggcctaaaagcagccaccaattaagaaagcgttcaagctcaacacccactacctaaaaaatcccaaacatataactgaactcctcacacccaattggaccaatctatcaccctatagaagaactaatgttagtataagtaacatgaaaacattctcctccgcataagcctgcgtcagatcaaaacactgaactgacaattaacagcccaatatctacaatcaaccaacaagtcattattaccctcactgtcaacccaacacaggcatgctcataaggaaaggttaaaaaaagtaaaaggaactcggcaaatcttaccccgcctgtttaccaaaaacatcacctctagcatcaccagtattagaggcaccgcctgcccagtgacacatgtttaacggccgcggtaccctaaccgtgcaaaggtagcataatcacttgttccttaaatagggacctgtatgaatggctccacgagggttcagctgtctcttacttttaaccagtgaaattgacctgcccgtgaagaggcggacatgacacagcaagacgagaagaccctatggagctttaatttattaatgcaaacagtacctaacaaacccacaggtcctaaactaccaaacctgcattaaaaatttcggttggggcgacctcggagcagaacccaacctccgagcagtacatgctaagacttcaccagtcaaagcgaactactatactcaattgatccaataacttgaccaacggaacaagttaccctagggataacagcgcaatcctattctagagtccatatcaacaatagggtttacgacctcgatgttggatcaggacatcccgatggtgcagccgctattaaaggttcgtttgttcaacgattaaagtcctacgtgatctgagttcagaccggagtaatccaggtcggtttctatctacnttcaaattcctccctgtacgaaaggacaagagaaataaggcctacttcacaaagcgccttcccccgtaaatgatatcatctcaacttagtattatacccacacccacccaagaacagggtttgttaagatggcagagcccggtaatcgcataaaacttaaaactttacagtcagaggttcaattcctcttcttaacaacatacccatggccaacctcctactcctcattgtacccattctaatcgcaatggcattcctaatgcttaccgaacgaaaaattctaggctatatacaactacgcaaaggccccaacgttgtaggcccctacgggctactacaacccttcgctgacgccataaaactcttcaccaaagagcccctaaaacccgccacatctaccatcaccctctacatcaccgccccgaccttagctctcaccatcgctcttctactatgaacccccctccccatacccaaccccctggtcaacctcaacctaggcctcctatttattctagccacctctagcctagccgtttactcaatcctctgatcagggtgagcatcaaactcaaactacgccctgatcggcgcactgcgagcagtagcccaaacaatctcatatgaagtcaccctagccatcattctactatcaacattactaataagtggctcctttaacctctccacccttatcacaacacaagaacacctctgattactcctgccatcatgacccttggccataatatgatttatctccacactagcagagaccaaccgaacccccttcgaccttgccgaaggagagtccgaactagtctcaggcttcaacatcgaatacgccgcaggccccttcgccctattcttcatagccgaatacacaaacattattataataaacaccctcaccactacaatcttcctaggaacaacatatgacgcactctcccctgaactctacacaacatattttgtcaccaagaccctacttctaacctccctgttcttatgaattcgaacagcatacccccgattccgctacgaccaactcatacacctcctatgaaaaaacttcctaccactcaccctagcattacttatatgatatgtctccatacccattacaatctccagcattccccctcaaacctaagaaatatgtctgataaaagagttactttgatagagtaaataataggagcttaaacccccttatttctaggactatgagaatcgaacccatccctgagaatccaaaattctccgtgccacctatcacaccccatcctaaagtaaggtcagctaaataagctatcgggcccataccccgaaaatgttggttatacccttcccgtactaattaatcccctggcccaacccgtcatctactctaccatctttgcaggcacactcatcacagcgctaagctcgcactgattttttacctgagtaggcctagaaataaacatgctagcttttattccagttctaaccaaaaaaataaaccctcgttccacagaagctgccatcaagtatttcctcacgcaagcaaccgcatccataatccttctaatagctatcctcttcaacaatatactctccggacaatgaaccataaccaatactaccaatcaatactcatcattaataatcataatggctatagcaataaaactaggaatagccccctttcacttctgagtcccagaggttacccaaggcacccctctgacatccggcctgcttcttctcacatgacaaaaactagcccccatctcaatcatataccaaatctctccctcactaaacgtaagccttctcctcactctctcaatcttatccatcatagcaggcagttgaggtggattaaaccaaacccagctacgcaaaatcttagcatactcctcaattacccacataggatgaataatagcagttctaccgtacaaccctaacataaccattcttaatttaactatttatattatcctaactactaccgcattcctactactcaacttaaactccagcaccacgaccctactactatctcgcacctgaaacaagctaacatgactaacacccttaattccatccaccctcctctccctaggaggcctgcccccgctaaccggctttttgcccaaatgggccattatcgaagaattcacaaaaaacaatagcctcatcatccccaccatcatagccaccatcaccctccttaacctctacttctacctacgcctaatctactccacctcaatcacactactccccatatctaacaacgtaaaaataaaatgacagtttgaacatacaaaacccaccccattcctccccacactcatcgcccttaccacgctactcctacctatctccccttttatactaataatcttatagaaatttaggttaaatacagaccaagagccttcaaagccctcagtaagttgcaatacttaatttctgtaacggctaaggactgcaaaaccccactctgcatcaactgaacgcaaatcagccactttaattaagctaagcccttactagaccaatgggacttaaacccacaaacacttagttaacagctaagcaccctaatcaactggcttcaatctacttctcccgccgccgggaaaaaaggcgggagaagccccggcaggtttgaagctgcttcttcgaatttgcaattcaatatgaaaatcacctcggagctggtaaaaagaggcctaacccctgtctttagatttacagtccaatgcttcactcagccattttacctcacccccactgatgttcgccgaccgttgactattctctacaaaccacaaagacattggaacactatacctattattcggcgcatgagctggagtcctaggcacagctctaagcctccttattcgagccgagctgggccagccaggcaaccttctaggtaacgaccacatctacaacgttatcgtcacagcccatgcatttgtaataatcttcttcatagtaatacccatcataatcggaggctttggcaactgactagttcccctaataatcggtgcccccgatatggcgtttccccgcataaacaacataagcttctgactcttacctccctctctcctactcctgctcgcatctgctatagtggaggccggagcaggaacaggttgaacagtctaccctcccttagcagggaactactcccaccctggagcctccgtagacctaaccatcttctccttacacctagcaggtgtctcctctatcttaggggccatcaatttcatcacaacaattatcaatataaaaccccctgccataacccaataccaaacgcccctcttcgtctgatccgtcctaatcacagcagtcctacttctcctatctctcccagtcctagctgctggcatcactatactactaacagaccgcaacctcaacaccaccttcttcgaccccgccggaggaggagaccccattctataccaacacctattctgatttttcggtcaccctgaagtttatattcttatcctaccaggcttcggaataatctcccatattgtaacttactactccggaaaaaaagaaccatttggatacataggtatggtctgagctatgatatcaattggcttcctagggtttatcgtgtgagcacaccatatatttacagtaggaatagacgtagacacacgagcatatttcacctccgctaccataatcatcgctatccccaccggcgtcaaagtatttagctgactcgccacactccacggaagcaatatgaaatgatctgctgcagtgctctgagccctaggattcatctttcttttcaccgtaggtggcctgactggcattgtattagcaaactcatcactagacatcgtactacacgacacgtactacgttgtagctcacttccactatgtcctatcaataggagctgtatttgccatcataggaggcttcattcactgatttcccctattctcaggctacaccctagaccaaacctacgccaaaatccatttcactatcatattcatcggcgtaaatctaactttcttcccacaacactttctcggcctatccggaatgccccgacgttactcggactaccccgatgcatacaccacatgaaacatcctatcatctgtaggctcattcatttctctaacagcagtaatattaataattttcatgatttgagaagccttcgcttcgaagcgaaaagtcctaatagtagaagaaccctccataaacctggagtgactatatggatgccccccaccctaccacacattcgaagaacccgtatacataaaatctagacaaaaaaggaaggaatcgaaccccccaaagctggtttcaagccaaccccatggcctccatgactttttcaaaaaggtattagaaaaaccatttcataactttgtcaaagttaaattataggctaaatcctatatatcttaatggcacatgcagcgcaagtaggtctacaagacgctacttcccctatcatagaagagcttatcacctttcatgatcacgccctcataatcattttccttatctgcttcctagtcctgtatgcccttttcctaacactcacaacaaaactaactaatactaacatctcagacgctcaggaaatagaaaccgtctgaactatcctgcccgccatcatcctagtcctcatcgccctcccatccctacgcatcctttacataacagacgaggtcaacgatccctcccttaccatcaaatcaattggccaccaatggtactgaacctacgagtacaccgactacggcggactaatcttcaactcctacatacttcccccattattcctagaaccaggcgacctgcgactccttgacgttgacaatcgagtagtactcccgattgaagcccccattcgtataataattacatcacaagacgtcttgcactcatgagctgtccccacattaggcttaaaaacagatgcaattcccggacgtctaaaccaaaccactttcaccgctacacgaccgggggtatactacggtcaatgctctgaaatctgtggagcaaaccacagtttcatgcccatcgtcctagaattaattcccctaaaaatctttgaaatagggcccgtatttaccctatagcaccccctctaccccctctagagcccactgtaaagctaacttagcattaaccttttaagttaaagattaagagaaccaacacctctttacagtgaaatgccccaactaaatactaccgtatggcccaccataattacccccatactccttacactattcctcatcacccaactaaaaatattaaacacaaactaccacctacctccctcaccaaagcccataaaaataaaaaattataacaaaccctgagaaccaaaatgaacgaaaatctgttcgcttcattcattgcccccacaatcctaggcctacccgccgcagtactgatcattctatttccccctctattgatccccacctccaaatatctcatcaacaaccgactaatcaccacccaacaatgactaatcaaactaacctcaaaacaaatgatagccatacacaacactaaaggacgaacctgatctcttatactagtatccttaatcatttttattgccacaactaacctcctcggactcctgcctcactcatttacaccaaccacccaactatctataaacctagccatggccatccccttatgagcgggcgcagtgattataggctttcgctctaagattaaaaatgccctagcccacttcttaccacaaggcacacctacaccccttatccccatactagttattatcgaaaccatcagcctactcattcaaccaatagccctggccgtacgcctaaccgctaacattactgcaggccacctactcatgcacctaattggaagcgccaccctagcaatatcaaccattaaccttccctctacacttatcatcttcacaattctaattctactgactatcctagaaatcgctgtcgccttaatccaagcctacgttttcacacttctagtaagcctctacctgcacgacaacacataatgacccaccaatcacatgcctatcatatagtaaaacccagcccatgacccctaacaggggccctctcagccctcctaatgacctccggcctagccatgtgatttcacttccactccataacgctcctcatactaggcctactaaccaacacactaaccatataccaatgatggcgcgatgtaacacgagaaagcacataccaaggccaccacacaccacctgtccaaaaaggccttcgatacgggataatcctatttattacctcagaagtttttttcttcgtaggatttttctgagccttttaccactccagcctagcccctaccccccaactaggagggcactggcccccaacaggcatcaccccgctaaatcccctagaagtcccactcctaaacacatccgtattactcgcatcaggagtatcaatcacctgagctcaccatagtctaatagaaaacaaccgaaaccaaataattcaagcactgcttattacaattttactgggtctctattttaccctcctacaagcctcagagtacttcgagtctcccttcaccatttccgacggcatctacggctcaacattttttgtagccacaggcttccacggacttcacgtcattattggctcaactttcctcactatctgcttcatccgccaactaatatttcactttacatccaaacatcactttggcttcgaagccgccgcctgatactggcattttgtagatgtggtttgactatttctgtatgtctccatctattgatgagggtcttactcttttagtataaatagtaccgttaacttccaattaactagttttgacaacattcaaaaaagagtaataaacttcgccttaattttaataatcaacaccctcctagccttactactaataattattacattttgactaccacaactcaacggctacatagaaaaatccaccccttacgagtgcggcttcgaccctatatcccccgcccgcgtccctttctccataaaattcttcttagtagctattaccttcttattatttgatctagaaattgccctccttttacccctaccatgagccctacaaacaactaacctgccactaatagttatgtcatccctcttattaatcatcatcctagccctaagtctggcctatgagtgactacaaaaaggattagactgagccgaattggtatatagtttaaacaaaacgaatgatttcgactcattaaattatgataatcatatttaccaaatgcccctcatttacataaatattatactagcatttaccatctcacttctaggaatactagtatatcgctcacacctcatatcctccctactatgcctagaaggaataatactatcgctgttcattatagctactctcataaccctcaacacccactccctcttagccaatattgtgcctattgccatactagtctttgccgcctgcgaagcagcggtgggcctagccctactagtctcaatctccaacacatatggcctagactacgtacataacctaaacctactccaatgctaaaactaatcgtcccaacaattatattactaccactgacatgactttccaaaaagcacataatttgaatcaacacaaccacccacagcctaattattagcatcatccccctactattttttaaccaaatcaacaacaacctatttagctgttccccaaccttttcctccgaccccctaacaacccccctcctaatactaactacctgactcctacccctcacaatcatggcaagccaacgccacttatccagtgaaccactatcacgaaaaaaactctacctctctatactaatctccctacaaatctccttaattataacattcacagccacagaactaatcatattttatatcttcttcgaaaccacacttatccccaccttggctatcatcacccgatgaggcaaccagccagaacgcctgaacgcaggcacatacttcctattctacaccctagtaggctcccttcccctactcatcgcactaatttatactcacaacaccctaggctcactaaacattctactactcactctcactgcccaagaactatcaaactcctgagccaacaacttaatatgactagcttacacaatagcttttatagtaaagatacctctttacggactccacttatgactccctaaagcccatgtcgaagcccccatcgctgggtcaatagtacttgccgcagtactcttaaaactaggcggctatggtataatacgcctcacactcattctcaaccccctgacaaaacacatagcctaccccttccttgtactatccctatgaggcataattataacaagctccatctgcctacgacaaacagacctaaaatcgctcattgcatactcttcaatcagccacatagccctcgtagtaacagccattctcatccaaaccccctgaagcttcaccggcgcagtcattctcataatcgcccacggacttacatcctcattactattctgcctagcaaactcaaactacgaacgcactcacagtcgcatcataatcctctctcaaggacttcaaactctactcccactaatagctttttgatgacttctagcaagcctcgctaacctcgccttaccccccactattaacctactgggagaactctctgtgctagtaaccacgttctcctgatcaaatatcactctcctacttacaggactcaacatactagtcacagccctatactccctctacatatttaccacaacacaatggggctcactcacccaccacattaacaacataaaaccctcattcacacgagaaaacaccctcatgttcatacacctatcccccattctcctcctatccctcaaccccgacatcattaccgggttttcctcttgtaaatatagtttaaccaaaacatcagattgtgaatctgacaacagaggcttacgaccccttatttaccgagaaagctcacaagaactgctaactcatgcccccatgtctaacaacatggctttctcaacttttaaaggataacagctatccattggtcttaggccccaaaaattttggtgcaactccaaataaaagtaataaccatgcacactactataaccaccctaaccctgacttccctaattccccccatccttaccaccctcgttaaccctaacaaaaaaaactcatacccccattatgtaaaatccattgtcgcatccacctttattatcagtctcttccccacaacaatattcatgtgcctagaccaagaagttattatctcgaactgacactgagccacaacccaaacaacccagctctccctaagcttcaaactagactacttctccataatattcatccctgtagcattgttcgttacatggtccatcatagaattctcactgtgatatataaactcagacccaaacattaatcagttcttcaaatatctactcattttcctaattaccatactaatcttagttaccgctaacaacctattccaactgttcatcggctgagagggcgtaggaattatatccttcttgctcatcagttgatgatacgcccgagcagatgccaacacagcagccattcaagcaatcctatacaaccgtatcggcgatatcggtttcatcctcgccttagcatgatttatcctacactccaactcatgagacccacaacaaatagcccttctaaacgctaatccaagcctcaccccactactaggcctcctcctagcagcagcaggcaaatcagcccaattaggtctccacccctgactcccctcagccatagaaggccccaccccagtctcagccctactccactcaagcactatagttgtagcaggaatcttcttactcatccgcttccaccccctagcagaaaatagcccactaatccaaactctaacactatgcttaggcgctatcaccactctgttcgcagcagtctgcgcccttacacaaaatgacatcaaaaaaatcgtagccttctccacttcaagtcaactaggactcataatagttacaatcggcatcaaccaaccacacctagcattcctgcacatctgtacccacgccttcttcaaagccatactatttatgtgctccgggtccatcatccacaaccttaacaatgaacaagatattcgaaaaataggaggactactcaaaaccatacctctcacttcaacctccctcaccattggcagcctagcattagcaggaatacctttcctcacaggtttctactccaaagaccacatcatcgaaaccgcaaacatatcatacacaaacgcctgagccctatctattactctcatcgctacctccctgacaagcgcctatagcactcgaataattcttctcaccctaacaggtcaacctcgcttccccacccttactaacattaacgaaaataaccccaccctactaaaccccattaaacgcctggcagccggaagcctattcgcaggatttctcattactaacaatatttcccccgcatcccccttccaaacaacaatccccctctacctaaaactcacagccctcgctgtcactttcctaggacttctaacagccctagacctcaactacctaaccaacaaacttaaaataaaatccccactatgcacattttatttctccaacatactcggattctaccctagcatcacacaccgcacaatcccctatctaggccttcttacgagccaaaacctgcccctactcctcctagacctaacctgactagaaaagctattacctaaaacaatttcacagcaccaaatctccacctccatcatcacctcaacccaaaaaggcataattaaactttacttcctctctttcttcttcccactcatcctaaccctactcctaatcacataacctattcccccgagcaatctcaattacaatatatacaccaacaaacaatgttcaaccagtaaccactactaatcaacgcccataatcatacaaagcccccgcaccaataggatcctcccgaatcaaccctgacccctctccttcataaattattcagcttcctacactattaaagtttaccacaaccaccaccccatcatactctttcacccacagcaccaatcctacctccatcgctaaccccactaaaacactcaccaagacctcaacccctgacccccatgcctcaggatactcctcaatagccatcgctgtagtatatccaaagacaaccatcattccccctaaataaattaaaaaaactattaaacccatataacctcccccaaaattcagaataataacacacccgaccacaccgctaacaatcaatactaaacccccataaataggagaaggcttagaagaaaaccccacaaaccccattactaaacccacactcaacagaaacaaagcatacatcattattctcgcacggactacaaccacgaccaatgatatgaaaaaccatcgttgtatttcaactacaagaacaccaatgaccccaatacgcaaaattaaccccctaataaaattaattaaccactcattcatcgacctccccaccccatccaacatctccgcatgatgaaacttcggctcactccttggcgcctgcctgatcctccaaatcaccacaggactattcctagccatgcactactcaccagacgcctcaaccgccttttcatcaatcgcccacatcactcgagacgtaaattatggctgaatcatccgctaccttcacgccaatggcgcctcaatattctttatctgcctcttcctacacatcgggcgaggcctatattacggatcatttctctactcagaaacctgaaacatcggcattatcctcctgcttgcaactatagcaacagccttcataggctatgtcctcccgtgaggccaaatatcattctgaggggccacagtaattacaaacttactatccgccatcccatacattgggacagacctagttcaatgaatctgaggaggctactcagtagacagtcccaccctcacacgattctttacctttcacttcatcttacccttcattattgcagccctagcagcactccacctcctattcttgcacgaaacgggatcaaacaaccccctaggaatcacctcccattccgataaaatcaccttccacccttactacacaatcaaagacgccctcggcttacttctcttccttctctccttaatgacattaacactattctcaccagacctcctaggcgacccagacaattataccctagccaaccccttaaacacccctccccacatcaagcccgaatgatatttcctattcgcctacacaattctccgatccgtccctaacaaactaggaggcgtccttgccctattactatccatcctcatcctagcaataatccccatcctccatatatccaaacaacaaagcataatatttcgcccactaagccaatcactttattgactcctagccgcagacctcctcattctaacctgaatcggaggacaaccagtaagctacccttttaccatcattggacaagtagcatccgtactatacttcacaacaatcctaatcctaataccaactatctccctaattgaaaacaaaatactcaaatgggcctgtccttgtagtataaactaatacaccagtcttgtaaaccggagatgaaaacctttttccaaggacaaatcagagaaaaagtctttaactccaccattagcacccaaagctaagattctaatttaaactattctctgttctttcatggggaagcagatttgggtgccacccaagtattgactcacccatcaacaaccgctatgtatttcgtacattactgccagccaccatgaatattgtacggtaccataaatacttgaccacctgtagtacataaaaacccaatccacatcaaaaccccctccccatgcttacaagcaagtacagcaatcaaccttcaactatcacacatcaactgcaactccaaagccaccccttacccactaggataccaacaaacctacccacccttaacagtacatagtacataaagccatttaccgtacatagcacattacagtcaaatcccttctcgtccccatggatgacccccctcagataggggtcccttgaccaccatcctccgtgaaatcaatatcccgcacaagagtgctactctcctcgctccgggcccataacacttgggggtagctaaagtgaactgtatccgacatctggttcctacttcagggccataaagcctaaatagcccacacgttccccttaaataagacatcacgatg

SEQ ID NO: 165 - DNA, 16567 bp, Homo sapiens mitochondrial
  3106: "n" refers to a nucleotide at position 3107 of the Cambridge Reference Sequence (CRS, Anderson et al. 1981 Nature 290:457-465), later determined to be absent from the human mtDNA sequence according to the revised CRS (rCRS, Andrews et al. 1999 Nature Genetics 23:147); "n" therefore represents a single nucleotide deletion at a position corresponding to nucleotide 3107 of SEQ ID NO:1 as provided herein.
gatcacaggtctatcaccctattaaccactcacgggagctctccatgcatttggtattttcgtctggggggtgtgcacgcgatagcattgcgagacgctggagccggagcaccctatgtcgcagtatctgtctttgattcctgcctcatcctattatttatcgcacctacgttcaatattacaggcgaacatacttactaaagtgtgttaattaattaatgcttgtaggacataataataacaattgaatgtctgcacagccgctttccacacagacatcataacaaaaaatttccaccaaaccccccctcccccgccttctggccacagcacttaaacacatctctgccaaaccccaaaaacaaagaaccctaacaccagcctaaccagatttcaaattttatcttttggcggtatgcacttttaacagtcaccccccaactaacacattattttcccctcccactcccatactactaatctcatcaatacaacccccgcccatcctacccagcacacacaccgctgctaaccccataccccgaaccaaccaaaccccaaagacaccccccacagtttatgtagcttacctcctcaaagcaatacactgaaaatgtttagacgggctcacatcaccccataaacaaataggtttggtcctagcctttctattagctcttagtaagattacacatgcaagcatccccgttccagtgagttcaccctctaaatcaccacgatcaaaagggacaagcatcaagcacgcagcaatgcagctcaaaacgcttagcctagccacacccccacgggaaacagcagtgattaacctttagcaataaacgaaagtttaactaagctatactaaccccagggttggtcaatttcgtgccagccaccgcggtcacacgattaacccaagtcaatagaagccggcgtaaagagtgttttagatcaccccctccccaataaagctaaaactcacctgagttgtaaaaaactccagttgacacaaaatagactacgaaagtggctttaacatatctgaacacacaatagctaagacccaaactgggattagataccccactatgcttagccctaaacctcaacagttaaatcaacaaaactgctcgccagaacactacgagccacagcttaaaactcaaaggacctggcggtgcttcatatccctctagaggagcctgttctgtaatcgataaaccccgatcaacctcaccacctcttgctcagcctatataccgccatcttcagcaaaccctgatgaaggctacaaagtaagcgcaagtacccacgtaaagacgttaggtcaaggtgtagcccatgaggtggcaagaaatgggctacattttctaccccagaaaactacgatagcccttatgaaacttaagggtcgaaggtggatttagcagtaaactgagagtagagtgcttagttgaacagggccctgaagcgcgtacacaccgcccgtcaccctcctcaagtatacttcaaaggacatttaactaaaacccctacgcatttatatagaggagacaagtcgtaacatggtaagtgtactggaaagtgcacttggacgaaccagagtgtagcttaacacaaagcacccaacttacacttaggagatttcaacttaacttgaccgctctgagctaaacctagccccaaacccactccaccttactaccagacaaccttagccaaaccatttacccaaataaagtataggcgatagaaattgaaacctggcgcaatagatatagtaccgcaagggaaagatgaaaaattataaccaagcataatatagcaaggactaacccctataccttctgcataatgaattaactagaaataactttgcaaggagagccaaagctaagacccccgaaaccagacgagctacctaagaacagctaaaagagcacacccgtctatgtagcaaaatagtgggaagatttataggtagaggcgacaaacctaccgagcctggtgatagctggttgtccaagatagaatcttagttcaactttaaatttgcccacagaaccctctaaatccccttgtaaatttaactgttagtccaaagaggaacagctctttggacactaggaaaaaaccttgtagagagagtaaaaaatttaacacccatagtaggcctaaaagcagccaccaattaagaaagcgttcaagctcaacacccactacctaaaaaatcccaaacatataactgaactcctcacacccaattggaccaatctatcaccctatagaagaactaatgttagtataagtaacatgaaaacattctcctccgcataagcctgcgtcagattaaaacactgaactgacaattaacagcccaatatctacaatcaaccaacaagtcattattaccctcactgtcaacccaacacaggcatgctcataaggaaaggttaaaaaaagtaaaaggaactcggcaaatcttaccccgcctgtttaccaaaaacatcacctctagcatcaccagtattagaggcaccgcctgcccagtgacacatgtttaacggccgcggtaccctaaccgtgcaaaggtagcataatcacttgttccttaaatagggacctgtatgaatggctccacgagggttcagctgtctcttacttttaaccagtgaaattgacctgcccgtgaagaggcgggcatgacacagcaagacgagaagaccctatggagctttaatttattaatgcaaacagtacctaacaaacccacaggtcctaaactaccaaacctgcattaaaaatttcggttggggcgacctcggagcagaacccaacctccgagcagtacatgctaagacttcaccagtcaaagcgaactactatactcaattgatccaataacttgaccaacggaacaagttaccctagggataacagcgcaatcctattctagagtccatatcaacaatagggtttacgacctcgatgttggatcaggacatcccgatggtgcagccgctattaaaggttcgtttgttcaacgattaaagtcctacgtgatctgagttcagaccggagtaatccaggtcggtttctatctacnttcaaattcctccctgtacgaaaggacaagagaaataaggcctacttcacaaagcgccttcccccgtaaatgatatcatctcaacttagtattatacccacacccacccaagaacagggtttgttaagatggcagagcccggtaatcgcataaaacttaaaactttacagtcagaggttcaattcctcttcttaacaacatacccatggccaacctcctactcctcattgtacccattctaatcgcaatggcattcctaatgcttaccgaacgaaaaattctaggctatatacaactacgcaaaggccccaacgttgtaggcccctacgggctactacaacctttcgctgacgccataaaactcttcaccaaagagcccctaaaacccgccacatctaccatcaccctctacatcaccgccccgaccttagctctcaccatcgctcttctactatgaacccccctccccatacccaaccccctggtcaacctcaacctaggcctcctatttattctagccacctctagcctagccgtttactcaatcctctgatcagggtgagcatcaaactcaaactacgccctgatcggcgcactgcgagcagtagcccaaacaatctcatatgaagtcaccctagccatcattctactatcaacattactaataagtggctcctttaacctctccacccttatcacaacacaagaacacctctgattactcctgccatcatgacccttggccataatatgatttatctccacactagcagagaccaaccgaacccccttcgaccttgccgaaggggagtccgaactagtctcaggcttcaacatcgaatacgccgcaggccccttcgccctattcttcatagccgaatacacaaacattattataataaacaccctcaccactacaatcttcctaggaacaacatatgacgcactctcccctgaactctacacaacatattttgtcaccaagaccctacttctaacctccctgttcttatgaattcgaacagcatacccccgattccgctacgaccaactcatacacctcctatgaaaaaacttcctaccactcaccctagcattacttatatgatatgtctccatacccattacaatctccagcattccccctcaaacctaagaaatatgtctgataaaagagttactttgatagagtaaataataggagcttaaacccccttatttctaggactatgagaatcgaacccatccctgagaatccaaaattctccgtgccacctatcacaccccatcctaaagtaaggtcagctaaataagctatcgggcccataccccgaaaatgttggttatacccttcccgtactaattaatcccctggcccaacccgtcatctactctaccatctttgcaggcacactcatcacagcgctaagctcgcactgattttttacctgagtaggcctagaaataaacatgctagcttttattccagttctaaccaaaaaaataaaccctcgttccacagaagctgccatcaagtatttcctcacgcaagcaaccgcatccataatccttctaatagctatcctcttcaacaatatactctccggacaatgaaccataaccaatactaccaatcaatactcatcattaataatcataatggctatagcaataaaactaggaatagccccctttcacttctgagtcccagaggttacccaaggcacccctctgacatccggcctgcttcttctcacatgacaaaaactagcccccatctcaatcatataccaaatctctccctcactaaacgtaagccttctcctcactctctcaatcttatccatcatagcaggcagttgaggtggattaaaccaaacccagctacgcaaaatcttagcatactcctcaattacccacataggatgaataatagcagttctaccgtacaaccctaacataaccattcttaatttaactatttatattatcctaactactaccgcattcctactactcaacttaaactccagcaccacgaccctactactatctcgcacctgaaacaagctaacatgactaacacccttaattccatccaccctcctctccctaggaggcctgcccccgctaaccggctttttgcccaaatgggccattatcgaagaattcacaaaaaacaatagcctcatcatccccaccatcatagccaccatcaccctccttaacctctacttctacctacgcctaatctactccacctcaatcacactactccccatatctaacaacgtaaaaataaaatgacagtttgaacatacaaaacccaccccattcctccccacactcatcgcccttaccacgctactcctacctatctccccttttatactaataatcttatagaaatttaggttaaatacagaccaagagccttcaaagccctcagtaagttgcaatacttaatttctgtaacagctaaggactgcaaaaccccactctgcatcaactgaacgcaaatcagccactttaattaagctaagcccttactagaccaatgggacttaaacccacaaacacttagttaacagctaagcaccctaatcaactggcttcaatctacttctcccgccgccgggaaaaaaggcgggagaagccccggcagatttgaagctgcttcttcgaatttgcaattcaatatgaaaatcacctcggagctggtaaaaagaggcctaacccctgtctttagatttacagtccaatgcttcactcagccattttacctcacccccactgatgttcgccgaccgttgactattctctacaaaccacaaagacattggaacactatacctattattcggcgcatgagctggagtcctaggcacagctctaagcctccttattcgagccgagctgggccagccaggcaaccttctaggtaacgaccacatctacaacgttatcgtcacagcccatgcatttgtaataatcttcttcatagtaatacccatcataatcggaggctttggcaactgactagttcccctaataatcggtgcccccgatatggcgtttccccgcataaacaacataagcttctgactcttacccccctctctcctactcctgctcgcatctgctatagtggaggccggagcaggaacaggttgaacagtctaccctcccttagcagggaactactcccaccctggagcctccgtagacctaaccatcttctccttacacctagcaggtgtctcctctatcttaggggccatcaatttcatcacaacaattatcaatataaaaccccctgccataacccaataccaaacgcccctcttcgtctgatccgtcctaatcacagcagtcctacttctcctatctctcccagtcctagctgctggcatcactatactactaacagaccgcaacctcaacaccaccttcttcgaccccgccggaggaggagaccccattctataccaacacctattctgatttttcggtcaccctgaagtttatattcttatcctaccaggcttcggaataatctcccatattgtaacttactactccggaaaaaaagaaccatttggatacataggtatggtctgagctatgatatcaattggcttcctagggtttatcgtgtgagcacaccatatatttacagtaggaatagacgtagacacacgagcatatttcacctccgctaccataatcatcgctatccccaccggcgtcaaagtatttagctgactcgccacactccacggaagcaatatgaaatgatctgctgcagtgctctgagccctaggattcatctttcttttcaccgtaggtggcctgactggcattgtattagcaaactcatcactagacatcgtactacacgacacgtactacgttgtagctcacttccactatgtcctatcaataggagctgtatttgccatcataggaggcttcattcactgatttcccctattctcaggctacaccctagaccaaacctacgccaaaatccatttcactatcatattcatcggcgtaaatctaactttcttcccacaacactttctcggcctatccggaatgccccgacgttactcggactaccccgatgcatacaccacatgaaacatcctatcatctgtaggctcattcatttctctaacagcagtaatattaataattttcatgatttgagaagccttcgcttcgaagcgaaaagtcctaatagtagaagaaccctccataaacctggagtgactatatggatgccccccaccctaccacacattcgaagaacccgtatacataaaatctagacaaaaaaggaaggaatcgaaccccccaaagctggtttcaagccaaccccatggcctccatgactttttcaaaaaggtattagaaaaaccatttcataactttgtcaaagttaaattataggctaaatcctatatatcttaatggcacatgcagcgcaagtaggtctacaagatgctacttcccctatcatagaagagcttatcacctttcatgatcacgccctcataatcattttccttatctgcttcctagtcctgtatgcccttttcctaacactcacaacaaaactaactaatactaacatctcagacgctcaggaaatagaaaccgtctgaactatcctgcccgccatcatcctagtcctcatcgccctcccatccctacgcatcctttacataacagacgaggtcaacgatccctcccttaccatcaaatcaattggccaccaatggtactgaacctacgagtacaccgactacggcggactaatcttcaactcctacatacttcccccattattcctagaaccaggcgacctgcgactccttgacgttgacaatcgagtagtactcccgattgaagcccccattcgtataataattacatcacaagacgtcttgcactcatgagctgtccccacattaggcttaaaaacagatgcaattcccggacgtctaaaccaaaccactttcaccgctacacgaccgggggtatactacggtcaatgctctgaaatctgtggagcaaaccacagtttcatgcccatcgtcctagaattaattcccctaaaaatctttgaaatagggcccgtatttaccctatagcaccccctctaccccctctagagcccactgtaaagctaacttagcattaaccttttaagttaaagattaagagaaccaacacctctttacagtgaaatgccccaactaaatactaccgtatggcccaccataattacccccatactccttacactattcctcatcacccaactaaaaatattaaacacaaactaccacctacctccctcaccaaagcccataaaaataaaaaattataacaaaccctgagaaccaaaatggacgaaaatctgttcgcttcattcattgcccccacaatcctaggcctacccgccgcagtactgatcattctatttccccctctattaatccccacctccaaatatctcatcaacaaccgactaatcaccacccaacaatgactaatcaaactaacctcaaaacaaatgatagccatacacaacactaaaggacgaacctgatctcttatactagtatccttaatcatttttattgccacaactaacctcctcggactcctgcctcactcatttacaccaaccacccaactatctataaacctagccatggccatccccttatgagcgggcgcagtgattataggctttcgctctaagattaaaaatgccctagcccacttcttaccacaaggcacacctacaccccttatccccatactagttattatcgaaaccatcagcctactcattcaaccaatagccctggccgtacgcctaaccgctaacattactgcaggccacctactcatgcacctaattggaagcgccaccctagcaatatcaaccattaaccttccctctacacttatcatcttcacaattctaattctactgactatcctagaaatcgctgtcgccttaatccaagcctacgttttcacacttctagtaagcctctacctgcacgacaacacataatgacccaccaatcacatgcctatcatatagtaaaacccagcccatgacccctaacaggggccctctcagccctcctaatgacctccggcctagccatgtgatttcacttccactccataacgctcctcatactaggcctactaaccaacacactaaccatataccaatgatggcgcgatgtaacacgagaaagcacataccaaggccaccacacaccacctgtccaaaaaggccttcgatatgggataatcctatttattacctcagaagtttttttcttcgcaggatttttctgagccttttaccactccagcctagcccctaccccccaactaggagggcactggcccccaacaggcatcaccccgctaaatcccctagaagtcccactcctaaacacatccgtattactcgcatcaggagtatcaatcacctgagctcaccatagtctaatagaaaacaaccgaaaccaaataattcaagcactgcttattacaattttactgggtctctattttaccctcctacaagcctcagagtacttcgagtctcccttcaccatttccgacggcatctacggctcaacattttttgtagccacaggcttccacggacttcacgtcattattggctcaactttcctcactatctgcttcatccgccaactaatatttcactttacatccaaacatcactttggcttcgaagccgccgcctgatactggcattttgtagatgtggtttgactatttctgtatgtctccatctattgatgagggtcttactcttttagtataaatagtaccgttaacttccaattaactagttttgacaacattcaaaaaagagtaataaacttcgccttaattttaataatcgacaccctcctagccttactactaataattattacattttgactaccacaactcaacggctacatagaaaaatccaccccttacgagtgcggcttcgaccctatatcccccgcccgcgtccctttctccataaaattcttcttagtagctattaccttcttattatttgatctagaaattgccctccttttacccctaccatgagccctacaaacaactaacctgccactaatagttatgtcatccctcttattaatcatcatcctagccctaagtctggcctatgaatgactacaaaaaggattagactgagccgaattggtatatagtttaaacaaaacgaatgatttcgactcattaaattatgataatcatatttaccaaatgcccctcatttacataaatattatactagcatttaccatctcacttctaggaatactagtatatcgctcacacctcatatcctccctactatgcctagaaggaataatactatcgctgttcattatagctactctcataaccctcaacacccactccctcttagccaatattgtgcctattgccatactagtctttgccgcctgcgaagcagcggtgggcctagccctactagtctcaatctccaacacatatggcctagactacgtacataacctaaacctactccaatgctaaaactaatcgtcccaacaattatattactaccactgacatgactttccaaaaaacacataatttgaatcaacacaaccacccacagcctaattattagcatcatccccctactattttttaaccaaatcaacaacaacctatttagctgttccccaaccttttcctccgaccccctaacaacccccctcctaatactaactacctgactcctacccctcacaatcatggcaagccaacgccacttatccagtgaaccactatcacgaaaaaaactctacctctctatactaatctccctacaaatctccttaattataacattcacagccacagaactaatcatattttatatcttcttcgaaaccacacttatccccaccttggctatcatcacccgatgaggcaaccagccagaacgcctgaacgcaggcacatacttcctattctacaccctagtaggctcccttcccctactcatcgcactaatttacactcacaacaccctaggctcactaaacattctactactcactctcactgcccaagaactatcaaactcctgagccaacaacttaatatgactagcttacacaatagcttttatagtaaagatacctctttacggactccacttatgactccctaaagcccatgtcgaagcccccatcgctgggtcaatagtacttgccgcagtactcttaaaactaggcggctatggtataatacgcctcacactcattctcaaccccctgacaaaacacatagcctaccccttccttgtactatccctatgaggcataattataacaagctccatctgcctacgacaaacagacctaaaatcgctcattgcatactcttcaatcagccacatagccctcgtagtaacagccattctcatccaaaccccctgaagcttcaccggcgcagtcattctcataatcgcccacggacttacatcctcattactattctgcctagcaaactcaaactacgaacgcactcacagtcgcatcataatcctctctcaagggcttcaaactctactcccactaatagctttttgatgacttctagcaagcctcgctaacctcgccttaccccccactattaacctactgggagaactctctgtgctagtaaccacgttctcctgatcaaatatcactctcctacttacaggactcaacatactagtcacagccctatactccctctacatatttaccacaacacaatggggctcactcacccaccacattaacaacataaaaccctcattcacacgagaaaacaccctcatgttcatacacctatcccccattctcctcctatccctcaaccccgacatcattaccgggttttcctcttgtaaatatagtttaaccaaaacatcagattgtgaatctgacaacagaggcttacgaccccttatttaccgagaaagctcacaagaactgctaactcatgcccccatgtctaacaacatggctttctcaacttttaaaggataacagctatccattggtcttaggccccaaaaattttggtgcaactccaaataaaagtaataaccatgcacactactataaccaccctaaccctgacttccctaattccccccatccttaccaccctcgttaaccctaacaaaaaaaactcatacccccattatgtaaaatccattgtcgcatccacctttattatcagtctcttccccacaacaatattcatgtgcctagaccaagaagttattatctcgaactgacactgagccacaacccaaacaacccagctctccctaagcttcaaactagactacttctccataatattcatccctgtagcattgttcgttacatggtccatcatagaattctcactgtgatatataaactcagacccaaacattaatcagttcttcaaatatctactcattttcctaattaccatactaatcttagttaccgctaacaacctattccaactgttcatcggctgagagggcgtaggaattatatccttcttgctcatcagttgatgatacgcccgagcagatgccaacacagcagccattcaagcaatcctatacaaccgtatcggcgatatcggtttcatcctcgccttagcatgatttatcctacactccaactcatgagacccacaacaaatagcccttctaaacgctaatccaagcctcaccccactactaggcctcctcctagcagcagcaggcaaatcagcccaattaggtctccacccctgactcccctcagccatagaaggccccaccccagtctcagccctactccactcaagcactatagttgtagcaggagtcttcttactcatccgcttccaccccctagcagaaaatagcccactaatccaaactctaacactatgcttaggcgctatcaccactctgttcgcagcagtctgcgcccttacacaaaatgacatcaaaaaaatcgtagccttctccacttcaagtcaactaggactcataatagttacaatcggcatcaaccaaccacacctagcattcctgcacatctgtacccacgccttcttcaaagccatactatttatgtgctccgggtccatcatccacaaccttaacaatgaacaagatattcgaaaaataggaggactactcaaaaccatacctctcacttcaacctccctcaccattggcagcctagcattagcaggaatacctttcctcacaggtttctactccaaagaccacatcatcgaaaccgcaaacatatcatacacaaacgcctgagccctatctattactctcatcgctacctccctgacaagcgcctatagcactcgaataattcttctcaccctaacaggtcaacctcgcttccccacccttactaacattaacgaaaataaccccaccctactaaaccccattaaacgcctggcagccggaagcctattcgcaggatttctcattactaacaacatttcccccgcatcccccttccaaacaacaatccccctctacctaaaactcacagccctcgctgtcactttcctaggacttctaacagccctagacctcaactacctaaccaacaaacttaaaataaaatccccactatgcacattttatttctccaacatactaggattctaccctagcatcacacaccgcacaatcccctatctaggccttcttacgagccaaaacctgcccctactcctcctagacctaacctgactagaaaagctattacctaaaacaatttcacagcaccaaatctccacctccatcatcacctcaacccaaaaaggcataattaaactttacttcctctctttcttcttcccactcatcctaaccctactcctaatcacataacctattcccccgagcaatctcaattacaatatatacaccaacaaacaatgttcaaccagtaactactactaatcaacgcccataatcatacaaagcccccgcaccaataggatcctcccgaatcaaccctgacccctctccttcataaattattcagcttcctacactattaaagtttaccacaaccaccaccccatcatactctttcacccacagcaccaatcctacctccatcgctaaccccactaaaacactcaccaagacctcaacccctgacccccatgcctcaggatactcctcaatagccatcgctgtagtatatccaaagacaaccatcattccccctaaataaattaaaaaaactattaaacccatataacctcccccaaaattcagaataataacacacccgaccacaccgctaacaatcaatactaaacccccataaataggagaaggcttagaagaaaaccccacaaaccccattactaaacccacactcaacagaaacaaagcatacatcattattctcgcacggactacaaccacgaccaatgatatgaaaaaccatcgttgtatttcaactacaagaacaccaatgaccccaatacgcaaaattaaccccctaataaaattaattaaccactcattcatcgacctccccaccccatccaacatctccgcatgatgaaacttcggctcactccttggcgcctgcctgatcctccaaatcaccacaggactattcctagccatgcactactcaccagacgcctcaaccgccttttcatcaatcgcccacatcactcgagacgtaaattatggctgaatcatccgctaccttcacgccaatggcgcctcaatattctttatctgcctcttcctacacatcgggcgaggcctatattacggatcatttctctactcagaaacctgaaacatcggcattaccctcctgcttgcaactatagcaacagccttcataggctatgtcctcccgtgaggccaaatatcattctgaggggccacagtaattacaaacttactatccgccatcccatacattgggacagacctagttcaatgaatctgaggaggctactcagtagacagtcccaccctcacacgattctttacctttcacttcatcttacccttcattgttgcagccctagcagcactccacctcctattcttgcacgaaacgggatcaaacaaccccctaggaatcacctcccattccgataaaatcaccttccacccttactacacaatcaaagacgccctcggcttacttctcttccttctctccttaatgacattaacactattctcaccagacctcctaggcgacccagacaattataccctagccaaccccttaaacacccctccccacatcaagcccgaatgatatttcctattcgcctacacaattctccgatccgtccctaacaaactaggaggcgtccttgccctattactatccatcctcatcctagcaataatccccatcctccatatatccaaacaacaaagcataatatttcgcccactaagccaatcactttattgactcctagccgcagacctcctcattctaacctgaatcggaggacaaccagtaagctacccttttaccatcattggacaagtagcatccgtactatacttcgcaacaatcctaatcctaataccaactatctccctaattgaaaacaaaatactcaaatgggcctgtccttgtagtataaactaatacaccagtcttgtaaaccggagatgaaaaccttttccaaggacaaatcagagaaaaagtctttaactccaccattagcacccaaagctaagattctaatttaaactattctctgttctttcatggggaagcagatttgggtaccacccaagtattgactcacccatcaacaaccgctatgtatttcgtacattactgccagccaccatgaatatcgtacggtaccataaatacttgaccacctgtagtacataaaaacccaatccacatcaaaaccccctccccatgcttacaagcaagtacagcaatcaaccttcaactatcatacatcaactgcaactccaaagccacccctcacccactaggatatcaacaaacctacccacccttaacagtacatagcacataaagccatttaccgtacatagcacattacagtcaaatcccttctcgcccccatggatgacccccctcagataggggtcccttgaccaccatcctccgtgaaatcaatatcccgcacaagagtgctactctcctcgctccgggcccataacacttgggggtagctaaagtgaactgtatccgacatctggttcctacttcagggtcataaagcctaaatagcccacacgttccccttaaataagacatcacgatg

SEQ ID NO: 166 - DNA, 16570 bp, Homo sapiens mitochondrial
  3108: "n" refers to a nucleotide at position 3107 of the Cambridge Reference Sequence (CRS, Anderson et al. 1981 Nature 290:457-465), later determined to be absent from the human mtDNA sequence according to the revised CRS (rCRS, Andrews et al. 1999 Nature Genetics 23:147); "n" therefore represents a single nucleotide deletion at a position corresponding to nucleotide 3107 of SEQ ID NO:1 as provided herein.
gatcacaggtctatcaccctattaaccactcacgggagctctccatgcatttggtattttcgtctggggggtgtgcacgcgatagcattgcgagacgctggagccggagcaccctatgtcgcagtatctgtctttgattcctgccccatcccattatttatcgcacctacgttcaatattacaggcgaacatacctattaaagtgtgttaattaattaatgcttgtaggacataataataacaattgaatgtctgcacagccgctttccacacagacatcataacaaaaaatttccaccaaaccccccctcccccgccttctggccacagcacttaaacacatctctgccaaaccccaaaaacaaagaaccctaacaccagcctaaccagatttcaaattttatcttttggcggtatgcacttttaacagtcaccccccaactaacacattattttcccctcccactcccatactactaatctcatcaatacaacccccgcccatcctacccagcacacacacaccgctgctaaccccataccccgaaccaaccaaaccccaaagacaccccccacagtttatgtagcttacctcctcaaagcaatacactgaaaatgtttagacgggctcacatcaccccataaacaaataggtttggtcctagcctttctattagctcttagtaagattacacatgcaagcatccccgttccagtgagttcaccctctaaatcaccacgatcaaaagggacaagcatcaagcacgcaacaatgcagctcaaaacgcttagcctagccacacccccacgggaaacagcagtgattaacctttagcaataaacgaaagtttaactaagctatactaaccccagggttggtcaatttcgtgccagccaccgcggtcacacgattaacccaagtcaatagaaaccggcgtaaagagtgttttagatcaccccctccccaataaagctaaaactcacctgagttgtaaaaaactccagttgacacaaaataaactacgaaagtggctttaacatatctgaacacacaatagctaagacccaaactgggattagataccccactatgcttagccctaaacctcaacagttaaatcaacaaaactgctcgccagaacactacgagccacagcttaaaactcaaaggacctggcggtgcttcatatccctctagaggagcctgttctgtaatcgataaaccccgatcaacctcaccacctcttgctcagcctatataccgccatcttcagcaaaccctgatgaaggctacaaagtaagcgcaagtacccacgtaaagacgttaggtcaaggtgtagcccatgaggtggcaagaaatgggctacattttctaccccagaaaactacgatagcccttatgaaacttaagggtcgaaggtggatttagcagtaaactgagagtagagtgcttagttgaacagggccctgaagcgcgtacacaccgcccgtcaccctcctcaagtatacttcaaaggacatttaactaaaacccctacgcatttatatagaggagacaagtcgtaacatggtaagtgtactggaaagtgcacttggacgaaccagagtgtagcttaacacaaagcacccaacttacacttaggagatttcaacttaacttgaccgctctgagctaaacctagccccaaacccactccaccttactaccagacaaccttagccaaaccatttacccaaataaagtataggcgatagaaattgaaacctggcgcaatagatatagtaccgcaagggaaagatgaaaaattataaccaagcataatatagcaaggactaacccctataccttctgcataatgaattaactagaaataactttgcaaggagagccaaagctaagacccccgaaaccagacgagctacctaagaacagctaaaagagcacacccgtctatgtagcaaaatagtgggaagatttataggtagaggcgacaaacctaccgagcctggtgatagctggttgtccaagatagaatcttagttcaactttaaatttgcccacagaaccctctaaatccccttgtaaatttaactgttagtccaaagaggaacagctctttggacactaggaaaaaaccttgtagagagagtaaaaaatttaacacccatagtaggcctaaaagcagccaccaattaagaaagcgttcaagctcaacacccactacctaaaaaatcccaaacatataactgaactcctcacacccaattggaccaatctatcaccctatagaagaactaatgttagtataagtaacatgaaaacattctcctccgcataagcctgcgtcagattaaaacactgaactgacaattaacagcccaatatctacaatcaaccaacaagtcattattacccccactgtcaacccaacacaggcatgctcataaggaaaggttaaaaaaagtaaaaggaactcggcaaatcttaccccgcctgtttaccaaaaacatcacctctagcatcaccagtattagaggcaccgcctgcccagtgacacatgtttaacggccgcggtaccctaaccgtgcaaaggtagcataatcacttgttccttaaatagggacctgtatgaatggctccacgagggttcagctgtctcttacttttaaccagtgaaattgacctgcccgtgaagaggcgggcatgacacagcaagacgagaagaccctatggagctttaatttattaatgcaaacagtacctaacaaacccacaggtcctaaactactaaacctgcattaaaaatttcggttggggcgacctcggagcagaacccaacctccgagcagtacatgctaagacttcaccagtcaaagcgaactactatactcaattgatccaataacttgaccaacggaacaagttaccctagggataacagcgcaatcctattctagagtccatatcaacaatagggtttacgacctcgatgttggatcaggacatcccaatggtgcagccgctattaaaggttcgtttgttcaacgattaaagtcctacgtgatctgagttcagaccggagtaatccaggtcggtttctatctacnttcaaattcctccctgtacgaaaggacaagagaaataaggcctacttcacaaagcgccttcccccgtaaatgatatcatctcaacttagtattatacccacacccacccaagaacagggtttgttaagatggcagagcccggtaatcgcataaaacttaaaactttacagtcagaggttcaattcctcttcttaacaacacacccatggccaacctcctactcctcattgcacccattctaatcgcaatggcattcctaatgcttaccgaacgaaaaattctaggctatatacaactacgcaaaggccccaacgttgtaggcccctacgggctactacaacccttcgctgacgccataaaactcttcaccaaagagcccctaaaacccgccacatctaccatcaccctctacatcaccgccccgaccttagctctcaccatcgctcttctactatgaacccccctccccatacccaaccccctggttaacctcaacctaggcctcctatttattctagccacctctagcctagccgtttactcaatcctctgatcagggtgagcatcaaactcaaactacgccctgatcggcgcactgcgagcagtagcccaaacaatctcatatgaagtcaccctagccatcattctactatcaacattactaataagtggctcctttaacctctccacccttatcacaacacaagaacacctctgattactcctgccatcatgacccttggccataatatgatttatctccacactagcagagaccaaccgaacccccttcgaccttgccgaaggggagtccgaactagtctcaggattcaacatcgaatacgccgcaggccccttcgccctattcttcatagccgaatacacaaacattattataataaacaccctcaccactacaatcttcctaggaacaacatatgacgcactctcccctgaactctacacaacatattttgtcaccaagaccctacttctgacctccctgttcttatgaattcgaacagcatacccccgattccgctacgaccaactcatacacctcctatgaaaaaacttcctaccactcaccctagcattacttatatgatatgtctccatacccattacaatctccagcattccccctcaaacctaagaaatatgtctgataaaagagttactttgatagagtaaataataggagcttaaacccccttatttctaggactatgagaatcgaacccatccctgagaatccaaaattctccgtgccacctatcacaccccatcctaaagtaaggtcagctaaataagctatcgggcccataccccgaaaatgttggttatacccttcccgtactaattaatcccctggcccaacccgtcatctactctaccatctttgcaggcacactcatcacagcgctaagctcgcactgattttttacctgagtaggcctagaaataaacatgctagcttttattccagttctaaccaaaaaaataaaccctcgttccacagaagctgccatcaagtatttcctcacgcaagcaaccgcatccataatccttctaatagctatcctcttcaacaatatactctccggacaatgaaccataaccaatactaccaatcaatactcatcattaataatcataatggctatagcaataaaactaggaatagccccctttcacttctgagtcccagaggttacccaaggcacccctctgacatccggcctgcttcttctcacatgacaaaaactagcccccatctcaatcatataccaaatctctccctcactaaacgtaagccttctcctcactctctcaatcttatccatcatagcaggcagttgaggtggattaaaccaaacccagctacgcaaaatcttagcatactcctcaattacccacataggatgaataatagcagttctaccgtacaaccctaacataaccattcttaatttaactatttatattatcctaactactaccgcattcctactactcaacttaaactccagcaccacgaccctactactatctcgcacctgaaacaagctaacatgactaacacccttaattccatccaccctcctctccctaggaggcctgcccccgctaaccggctttttgcccaaatgggccattatcgaagaattcacaaaaaacaatagcctcatcatccccaccatcatagccaccatcaccctccttaacctctacttctacctacgcctaatctactccacctcaatcacactactccccatatctaacaacgtaaaaataaaatgacagtttgaacatacaaaacccaccccattcctccccacactcatcgcccttaccacgctactcctacctatctccccttttatactaataatcttatagaaatttaggttaaatacagaccaagagccttcaaagccctcagtaagttgcaatacttaatttctgtaacagctaaggactgcaaaaccccactctgcatcaactgaacgcaaatcagccactttaattaagctaagcccttactagaccaatgggacttaaacccacaaacacttagttaacagctaagcaccctaatcaactggcttcaatctacttctcccgccgccgggaaaaaaggcgggagaagccccggcaggtttgaagctgcttcttcgaatttgcaattcaatatgaaaatcacctcggagctggtaaaaagaggcctaacccctgtctttagatttacagtccaatgcttcactcagccattttacctcacccccactgatgttcgccgaccgttgactattctctacaaaccacaaagacattggaacactatacctattattcggcgcatgagctggagtcctaggcacagctctaagcctccttattcgagccgagctgggccagccaggcaaccttctaggtaacgaccacatctacaacgttatcgtcacagcccatgcatttgtaataatcttcttcatagtaatacccatcataatcggaggctttggcaactgactagttcccctaataatcggtgcccccgatatggcgtttccccgcataaacaacataagcttctgactcttacctccctctctcctactcctgctcgcatctgctatagtggaggccggagcaggaacaggttgaacagtctaccctcccttagcagggaactattcccaccctggagcctccgtagacctaaccatcttctccttacacctagcaggtgtctcctctatcttaggggccatcaatttcatcacaacaattatcaatataaaaccccctgccataacccaataccaaacgcccctcttcgtctgatccgtcctaatcacagcagtcctacttctcctatctctcccagtcctagctgctggcatcactatactactaacagaccgcaacctcaacaccaccttcttcgaccccgccggaggaggagaccccattctataccaacacctattctgatttttcggtcaccctgaagtttatattcttatcctaccaggcttcggaatagtctcccatattgtaacttactactccggaaaaaaagaaccatttggatacataggtatggtctgagctatgatatcaattggcttcctagggtttatcgtgtgagcacaccatatatttacagtaggaatagacgtagacacacgagcatatttcacctccgctaccataatcatcgctatccccaccggcgtcaaagtatttagctgactcgccacactccacggaagcaatatgaaatgatctgctgcagtgctctgagccctaggattcatctttcttttcaccgtaggtggcctgactggcattgtattagcaaactcatcactagacatcgtactacacgacacgtactacgttgtagctcacttccactatgtcctatcaataggagctgtatttgccatcataggaggcttcattcactgatttcccctattctcaggctacaccctagaccaaacctacgccaaaatccatttcactatcatattcatcggcgtaaatctaaccttcttcccacaacactttctcggcctatccggaatgccccgacgttactcggactaccccgatgcatacaccacatgaaatatcctatcatctgtaggttcattcatttctctaacagcagtaatattaataattttcatgatttgagaagccttcgcttcgaagcgaaaagtcctaatagtagaagaaccctccataaacctggagtgactatatggatgccccccaccctaccacacattcgaagaacccgtatacataaaatctagacaaaaaaggaaggaatcgaaccccccaaagctggtttcaagccaaccccatggcctccatgactttttcaaaaagatattagaaaaaccatttcataactttgtcaaagttaaattataggctaaatcctatatatcttaatggcacatgcagcgcaagtaggtctacaagacgctacttcccctatcatagaagagcttatcacctttcatgatcacgccctcataatcattttccttatctgcttcctagtcctatatgcccttttcctaacactcacaacaaaactaactaatactaacatctcagacgctcaggaaatagagaccgtctgaactatcctgcccgccatcatcctagtcctcatcgccctcccatccctacgcatcctttacataacagacgaggtcaacgatccctcccttaccatcaaatcaattggccaccaatggtactgaacctacgagtacaccgactacggcggactaatcttcaactcctacatacttcccccattattcctagaaccaggcgacctgcgactccttgacgttgacaatcgagtagtactcccgattgaagcccccattcgtataataattacatcacaagacgtcttgcactcatgagctgtccccacattaggcttaaaaacagatgcaattcccggacgcctaaaccaaaccactttcaccgctacacgaccgggggtatactacggtcaatgctctgaaatctgtggagcaaaccacagtttcatacccatcgtcctagaattaattcccctaaaaatctttgaaatagggcccgtatttaccctatagcaccccctctaccccctctagagcccactgtaaagctaacttagcattaaccttttaagttaaagattaagagaaccaacacctctttacagtgaaatgccccaactaaatactaccgtatggcccaccataattacccccatactccttacactattcctcatcacccaactaaaaatattaaacacaaactaccacctacctccctcaccaaagcccataaaaataaaaaattataacaaaccctgagaaccaaaatgaacgaaaatctgttcgcttcattcattgcccccacaatcctaggcctacccgccgcagtactgatcattctattcccccctctattgatccccacctccaaatatctcatcaacaaccgactaatcaccacccaacaatgactaatcaaactaacctcaaaacaaatgatagccatacacaacactaaaggacgaacctgatctcttatactagtatccttaatcatttttattgccacaactaacctcctcggactcctgcctcactcatttacaccaaccacccaactatctataaacctagccatggccatccccttatgagcgggcgcagtgattataggctttcgctctaagattaaaaatgccctagcccacttcttaccacaaggcacacctacaccccttatccccatactagttattatcgaaaccatcagcctactcattcaaccaatagccctggccgtacgcctaaccgctaacattactgcaggccacctactcatgcacctaattggaagcgccaccctagcaatatcaaccattaaccttccctctacacttatcatcttcacaattctaattctactgactatcctagaaatcgctgtcgccttaatccaagcctacgttttcacacttctagtaagcctctacctgcacgacaacacataatgacccaccaatcgcatgcctatcatatagtaaaacccagcccatgacccctaacaggggccctctcagccctcctaatgacctccggcctagccatgtgatttcacttccactccataacgctcctcatactaggcctactaaccaacacactaaccatataccaatgatggcgcgatgtaacacgagaaagcacataccaaggccaccacacaccacctgtccaaaaaggccttcgatacgggataatcctatttattacctcagaagtttttttcttcgcaggatttttctgagccttttaccactccagcctagcccctaccccccaactaggagggcactggcccccaacaggcatcaccccgctaaatcccctagaagtcccactcctaaacacatccgtattactcgcatcaggagtatcaatcacctgagctcaccatagtctaatagaaaacaaccgaaaccaaataattcaagcactgcttattacaattttactgggtctctattttaccctcctacaagcctcagagtacttcgagtctcccttcaccatttccgacggcatctacggctcaacattttttgtagccacaggcttccacggacttcacgtcattattggctcaactttcctcactatctgcttcatccgccaactaatatttcactttacatccaaacatcactttggcttcgaagccgccgcctgatactggcattttgtagatgtggtttgactatttctgtatgtctccatctattgatgagggtcttactcttttagtataaatagtaccgttaacttccaattaactagttttgacaacattcaaaaaagagtaataaacttcgccttaattttaataatcaacaccctcctagccttactactaataatcattacattttgactaccacaactcaacggctacatagaaaaatccaccccttacgagtgcggcttcgaccctatatcccccgcccgcgtccctttctccataaaattcttcttagtagctattaccttcttattatttgatctagaaattgccctccttttacccctaccatgagccctacaaacaactaacctgccactaatagttatgtcatccctcttattaatcatcatcctagccctaagtctggcctatgagtgactacaaaaaggattagactgagccgaattggtatatagtttaaacaaaacgaatgatttcgactcattaaattatgataatcatatttaccaaatgcccctcatttacataaatattatactagcatttaccatctcacttctaggaatactagtatatcgctcacacctcatatcctccctactatgcctagaaggaataatactatcgctgttcattatagctactctcataaccctcaacacccactccctcttagccaatattgtgcctattgccatactagtctttgccgcctgcgaagcagcggtgggcctagccctactagtctcaatctccaacacatatggcctagactacgtacataacctaaacctactccaatgctaaaactaatcgtcccaacaattatattactaccactgacatgactttccaaaaaacacataatttgaatcaacacaaccacccacagcctaattattagcatcatccccctactattttttaaccaaatcaacaacaacctatttagctgttccccaaccttttcctccgaccccctaacaacccccctcctaatactaactacctgactcctacccctcacaatcatggcaagccaacgccacttatccagtgaaccactatcacgaaaaaaactctacctctctatactaatctccctacaaatctccttaattataacattcacagccacagaactaatcatattttatatcttcttcgaaaccacacttatccccaccttggctatcatcacccgatgaggcaaccagccagaacgcctgaacgcaggcacatacttcctattctacaccctagtaggctcccttcccctactcatcgcactaatttacactcacaacaccctaggctcactaaacattctactactcactctcactgcccaagaactatcaaactcctgagccaacaacttaatatgactagcttacacaatagcttttatagtaaagatacctctttacggactccacttatgactccctaaagcccatgtcgaagcccccatcgctgggtcaatagtacttgccgcagtactcttaaaactaggcggctatggtataatacgcctcacactcattctcaaccccctgacaaaacacatagcctaccccttccttgtactatccctatgaggcataattataacaagctccatctgcctacgacaaacagacctaaaatcgctcattgcatactcttcaatcagccacatagccctcgtagtaacagccattctcatccaaaccccctgaagcttcaccggcgcagtcattctcataatcgcccacggacttacatcctcattactattctgcctagcaaactcaaactacgaacgcactcacagtcgcatcataatcctctctcaaggacttcaaactctactcccactaatagctttttgatgacttctagcaagcctcgctaacctcgccttaccccccactattaacctactgggagaactctctgtgctagtaaccacattctcctgatcaaatatcactctcctactcacaggactcaacatactagtcacagccctatactccctctacatatttaccacaacacaatggggctcactcacccaccacattaacaacataaaaccctcattcacacgagaaaacaccctcatgttcatacacctatcccccattctcctcctatccctcaaccccgacatcattaccgggttttcctcttgtaaatatagtttaaccaaaacatcagattgtgaatctgacaacagaggcttacgaccccttatttaccgagaaagctcacaagaactgctaactcatgcccccatgtctaacaacatggctttctcaacttttaaaggataacagctatccattggtcttaggccccaaaaattttggtgcaactccaaataaaagtaataaccatgcacactactataaccaccctaaccctgacttccctaattccccccatccttaccaccctcgttaaccctaacaaaaaaaactcatacccccattatgtaaaatccattgtcgcatccacctttattatcagtctcttccccacaacaatattcatgtgcctagaccaagaagttattatctcgaactgacactgagccacaacccaaacaacccagctctccctaagcttcaaactagactacttctccataatattcatccctgtagcattgttcgttacatggtccatcatagaattctcactgtgatatataaactcagacccaaacattaatcagttcttcaagtatctactcattttcctaattaccatactaatcttagttaccgctaacaacctattccaactgttcatcggctgagagggcgtaggaattatatccttcttgctcatcagttgatgatacgcccgagcagatgccaacacagcagccattcaagcaatcctatacaaccgtatcggcgatatcggtttcatcctcgccttagcatgatttatcctacactccaactcatgagacccacaacaaatagcccttctaaacgctaatccaagcctcaccccactactaggcctcctcctagcagcagcaggcaaatcagcccaattaggtctccacccctgactcccctcagccatagaaggccccaccccagtctcagccctactccactcaagcactatagttgtagcaggaatcttcttactcatccgcttccaccccctagcagaaaatagcccactaatccaaactctaacactatgcttaggcgctatcaccactctgttcgcagcagtctgcgcccttacacaaaatgacatcaaaaaaatcgtagccttctccacttcaagtcaactaggactcataatagttacaatcggcatcaaccaaccacacctagcattcctgcacatctgtacccacgccttcttcaaagccatactatttatgtgctccgggtccatcatccacaaccttaacaatgaacaagatattcgaaaaataggaggactactcaaaaccatacctctcacttcaacctccctcaccattggcagcctagcattagcaggaatacctttcctcacaggtttctactccaaagaccacatcatcgaaaccgcaaacatatcatacacaaacgcctgagccctatctattactctcatcgctacctccctaacaagcgcctatagcactcgaataattcttctcaccctaacaggtcaacctcgcttccctacccttactaacattaacgaaaataaccccaccctactaaaccccattaaacgcctggcagccggaagcctattcgcaggatttctcattactaacaacatttcccccgcatcccccttccaaacaacaatccccctctacctaaaactcacggccctcgctgtcactttcctaggacttctaacagccctagacctcaactacctaaccaacaaacttaaaataaaatccccactatgcacattttatttctccaacatactcggattctaccctagcatcacacaccgcacaatcccctatctaggccttcttacgagccaaaacctgcccctactcctcctagacctaacctgactagaaaagctattacctaaaacaatttcacagcaccaaatctccacctccatcatcacctcaacccaaaaaggcataattaaactttacttcctctctttcttcttcccactcatcctaaccctactcctaatcacataacctattcccccgagcaatctcaatcacaatatatacaccaacaaacaatgttcaaccagtaactactactaatcaacgcccataatcatacaaagcccccgcaccaataggatcctcccgaatcaaccctgacccctctccttcataaattattcagcttcctacactattaaagtttaccacaaccaccaccccatcatactctttcacccacagcaccaatcctacctccatcgctaaccccactaaaacactcaccaagacctcaacccctgacccccatgcctcaggatactcctcaatagccatcgctgtagtatatccaaagacaaccatcattccccctaaataaattaaaaaaactattaaacccatataacctcccccaaaattcagaataataacacacccgaccacaccgctaacaatcaatactaaacccccataaataggagaaggcttagaagaaaaccccacaaaccccattactaaacccacactcaacagaaacaaagcatacatcattattctcgcacggactacaaccacgaccaatgatatgaaaaaccatcgttgtatttcaactacaagaacaccaatgaccccaatacgcaaaattaaccccctaataaaattaattaaccactcattcatcgacctccccaccccatccaacatctccgcatgatgaaacttcggctcactccttggcgcctgcctgatcctccaaatcaccacaggactattcctagccatgcactactcaccagacgcctcaaccgccttttcatcaatcgcccacatcactcgagacgtaaattatggctgaatcatccgctaccttcacgccaatggcgcctcaatattctttatctgcctcttcctacacatcgggcgaggcctatattacggatcatttctctactcagaaacctgaaacatcggcattatcctcctgcttgcaactatagcaacagccttcataggctatgtcctcccgtgaggccaaatatcattctgaggggccacagtaattacaaacttactatccgccatcccatacattgggacagacctagttcaatgaatctgaggaggctactcagtagacagtcccaccctcacacgattctttacctttcacttcatcttacccttcattattgcagccctagcagcactccacctcctattcttgcacgaaacgggatcaaacaaccccctaggaatcacctcccattccgataaaatcaccttccacccttactacacaatcaaagacgccctcggcttacttctctttcttctctccttaatgacattaacactattctcaccagacctcctaggcgacccagacaattataccctagccaaccccttaaacacccctccccacatcaagcccgaatgatatttcctattcgcctacacaattctccgatccgtccctaacaaactaggaggcgtccttgccctattactatccatcctcatcctagcaataatccccatcctccatatatccaaacaacaaagcataatatttcgcccactaagccaatcactttattgactcctagccgcagacctcctcattctaacctgaatcggaggacaaccagtaagctacccctttaccatcattggacaagtagcatccgtactatacttcacaacaatcctaatcctaataccaactatctccctaattgaaaacaaaatactcaaatgggcctgtccttgtagtataaactaatacaccagtcttgtaaaccggagatgaaaacctttttccaaggacaaatcagagaaaaagtctttaactccaccattagcacccaaagctaagattctaatttaaactattctctgttctttcatggggaagcagatttgggtaccacccaagtattgactcacccatcaacaaccgccatgtatttcgtacattactgccagccaccatgaatattgtacggtaccataaatacttgaccacctgtagtacataaaaacccaatccacatcaaaaccccctccccatgcttacaagcaagtacagcaatcaaccttcaactatcacacatcaactgcaactccaaagccacccctcacccactaggatatcaacaaacctacccatccttaacagtacatggtacataaagccatttaccgtacatagcacattacagtcaaatcccttctcgtccccatggatgacccccctcagataggagtcccttgaccaccatcctccgtgaaatcaatatcccgcacaagagtgctactctcctcgctccgggcccataacacttgggggtagctaaagtgaactgtatccgacatctggttcctacttcagggtcataaagcctaaatagcccacacgttccccttaaataagacatcacgatg

SEQ ID NO: 167 - DNA, 16571 bp, Homo sapiens mitochondrial
  3109: "n" refers to a nucleotide at position 3107 of the Cambridge Reference Sequence (CRS, Anderson et al. 1981 Nature 290:457-465), later determined to be absent from the human mtDNA sequence according to the revised CRS (rCRS, Andrews et al. 1999 Nature Genetics 23:147); "n" therefore represents a single nucleotide deletion at a position corresponding to nucleotide 3107 of SEQ ID NO:1 as provided herein.
gatcacaggtctatcaccctattaaccactcacgggagctctccatgcatttggtattttcgtctggggggtgtgcacgcgatagcattgcgagacgctggagccggagcaccctatgtcgcagtatctgtctttgattcctgcctcattccattatttatcgcacctacgttcaatattacaggcgaacatacctactaaagtgtgttaattaattaatgcttgtaggacataataataacaattgaatgtctgcacagccgctttccacacagacatcataacaaaaaatttccaccaaaccccccctcccccccgcttctggccacagcacttaaacacatctctgccaaaccccaaaaacaaagaaccctaacaccagcctaaccagatttcaaattttatcttttggcggtatgcacttttaacagtcaccccccaactaacacattattttcccctcccactcccatactactaatctcatcaatacaacccccgcccatcctacccagcacacacacaccgctgctaaccccataccccgaaccaaccaaaccccaaagacaccccccacagtttatgtagcttacctcctcaaagcaatacactgaaaatgtttagacgggctcacatcaccccataaacaaataggtttggtcctagcctttctattagctcttagtaagattacacatgcaagcatccccgttccagtgagttcaccctctaaatcaccacgatcaaaagggacaagcatcaagcacgcagcaatgcagctcaaaacgcttagcctagccacacccccacgggaaacagcagtgattaacctttagcaataaacgaaagtttaactaagctatactaaccccagggttggtcaatttcgtgccagccaccgcggtcacacgattaacccaagtcaatagaagccggcgtaaagagtgttttagatcaccccctccccaataaagctaaaactcacctgagttgtaaaaaactccagttgacacaaaatagactacgaaagtggctttaacatatctgaacacacaatagctaagacccaaactgggattagataccccactatgcttagccctaaacctcaacagttaaatcaacaaaactgctcgccagaacactacgagccacagcttaaaactcaaaggacctggcggtgcttcatatccctctagaggagcctgttctgtaatcgataaaccccgatcaacctcaccacctcttgctcagcctatataccgccatcttcagcaaaccctgatgaaggctacaaagtaagcgcaagtacccacgtaaagacgttaggtcaaggtgtagcccatgaggtggcaagaaatgggctacattttctaccccagaaaactacgatagcccttatgaaacttaagggtcgaaggtggatttagcagtaaactgagagtagagtgcttagttgaacagggccctgaagcgcgtacacaccgcccgtcaccctcctcaagtatacttcaaaggacatttaactaaaacccctacgcatttatatagaggagacaagtcgtaacatggtaagtgtactggaaagtgcacttggacgaaccagagtgtagcttaacacaaagcacccaacttacacttaggagatttcaacttaacttgaccgctctgagctaaacctagccccaaacccactccaccttactaccagacaaccttagccaaaccatttacccaaataaagtataggcgatagaaattgaaacctggcgcaatagatatagtaccgcaagggaaagatgaaaaattataaccaagcataatatagcaaggactaacccctataccttctgcataatgaattaactagaaataactttgcaaggagagccaaagctaagacccccgaaaccagacgagctacctaagaacagctaaaagagcacacccgtctatgtagcaaaatagtgggaagatttataggtagaggcgacaaacctaccgagcctggtgatagctggttgtccaagatagaatcttagttcaactttaaatttgcccacagaaccctctaaatccccttgtaaatttaactgttagtccaaagaggaacagctctttggacactaggaaaaaaccttgtagagagagtaaaaaatttaacacccatagtaggcctaaaagcagccaccaattaagaaagcgttcaagctcaacacccactacctaaaaaatcccaaacatataactgaactcctcacacccaattggaccaatctatcaccctatagaagaactaatgttagtataagtaacatgaaaacattctcctccgcataagcctgcgtcagatcaaaacactgaactgacaattaacagcccaatatctacaatcaaccaacaagtcattattaccctcactgtcaacccaacacaggcatgctcataaggaaaggttaaaaaaagtaaaaggaactcggcaaatcttaccccgcctgtttaccaaaaacatcacctctagcatcaccagtattagaggcaccgcctgcccagtgacacatgtttaacggccgcggtaccctaaccgtgcaaaggtagcataatcacttgttccttaaatagggacctgtatgaatggctccacgagggttcagctgtctcttacttttaaccagtgaaattgacctgcccgtgaagaggcgggcatgacacagcaagacgagaagaccctatggagctttaatttattaatgcaaacagtacctaacaaacccacaggtcctaaactaccaaacctgcattaaaaatttcggttggggcgacctcggagcagaacccaacctccgagcagtacatgctaagacttcaccagtcaaagcgaactactatactcaattgatccaataacttgaccaacggaacaagttaccctagggataacagcgcaatcctattctagagtccatatcaacaatagggtttacgacctcgatgttggatcaggacatcccgatggtgcagccgctattaaaggttcgtttgttcaacgattaaagtcctacgtgatctgagttcagaccggagtaatccaggtcggtttctatctacnttcaaattcctccctgtacgaaaggacaagagaaataaggcctacttcacaaagcgccttcccccgtaaatgatatcatctcaacttagtattatacccacacccacccaagaacagggtttgttaagatggcagagcccggtaatcgcataaaacttaaaactttacagtcagaggttcaattcctcttcttaacaacatacccatggccaacctcctactcctcattgtacccattctaatcgcaatggcattcctaatgcttaccgaacgaaaaattctaggctatatacaactacgcaaaggccccaacgttgtaggcccctacgggctactacaacccttcgctgacgccataaaactcttcaccaaagagcccctaaaacccgccacatctaccatcaccctctacatcaccgccccgaccttagctctcaccatcgctcttctactatgaacccccctccccatacccaaccccctggtcaacctcaacctaggcctcctatttattctagccacctctagcctagccgtttactcaatcctctgatcagggtgagcatcaaactcaaactacgccctgatcggcgcactgcgagcagtagcccaaacaatctcatatgaagtcaccctagccatcattctactatcaacattactaataagtggctcctttaacctctccacccttatcacaacacaagaacacctctgattactcctgccatcatgacccttggccataatatgatttatctccacactagcagagaccaaccgaacccccttcgaccttgccgaaggggagtccgaactagtctcaggcttcaacatcgaatacgccgcaggccccttcgccctattcttcatagccgaatacacaaacattattataataaacaccctcaccactacaatcttcctaggaacaacatatgacgcactctcccctgaactctacacaacatattttgtcaccaagaccctacttctaacctccctgttcttatgaattcgaacagcatacccccgattccgctacgaccaactcatacacctcctatgaaaaaacttcctaccactcaccctagcattacttatatgatatgtctccatacccattacaatctccagcattccccctcaaacctaagaaatatgtctgataaaagagttactttgatagagtaaataataggagcttaaacccccttatttctaggactatgagaatcgaacccatccctgagaatccaaaattctccgtgccacctatcacaccccatcctaaagtaaggtcagctaaataagctatcgggcccataccccgaaaatgttggttatacccttcccgtactaattaatcccctggcccaacccgtcatctactctaccatctttgcaggcacactcatcacagcgctaagctcgcactgattttttacctgagtaggcctagaaataaacatgctagcttttattccagttctaaccaaaaaaataaaccctcgttccacagaagctgccatcaagtatttcctcacgcaagcaaccgcatccataatccttctaatagctatcctcttcaacaatatactctccggacaatgaaccataaccaatactaccaatcaatactcatcattaataatcataatggctatagcaataaaactaggaatagccccctttcacttctgagtcccagaggttacccaaggcacccctctgacatccggcctgcttcttctcacatgacaaaaactagcccccatctcaatcatataccaaatctctccctcactaaacgtaagccttctcctcactctctcaatcttatccatcatagcaggcagttgaggtggattaaaccaaacccagctacgcaaaatcttagcatactcctcaattacccacataggatgaataatagcagttctaccgtacaaccctaacataaccattcttaatttaactatttatattatcctaactactaccgcattcctactactcaacttaaactccagcaccacgaccctactactatctcgcacctgaaacaagctaacatgactaacacccttaattccatccaccctcctctccctaggaggcctgcccccgctaaccggctttttgcccaaatgggccattatcgaagaattcacaaaaaacaatagcctcatcatccccaccatcatagccaccatcaccctccttaacctctacttctacctacgcctaatctactccacctcaatcacactactccccatatctaacaacgtaaaaataaaatgacagtttgaacatacaaaacccaccccattcctccccacactcatcgcccttaccacgctactcctacctatctccccttttatactaataatcttatagaaatttaggttaaatacagaccaagagccttcaaagccctcagtaagttgcaatacttaatttctgtaacagctaaggactgcaaaaccccactctgcatcaactgaacgcaaatcagccactttaattaagctaagcccttactagaccaatgggacttaaacccacaaacacttagttaacagctaagcaccctaatcaactggcttcaatctacttctcccgccgccgggaaaaaaggcgggagaagccccggcaggtttgaagctgcttcttcgaatttgcaattcaatatgaaaatcacctcggagctggtaaaaagaggcctaacccctgtctttagatttacagtccaatgcttcactcagccattttacctcacccccactgatgttcgccgaccgttgactattctctacaaaccacaaagacattggaacactatacctattattcggcgcatgagctggagtcctaggcacagctctaagcctccttattcgagccgagctgggccagccaggcaaccttctaggtaacgaccacatctacaacgttatcgtcacagcccatgcatttgtaataatcttcttcatagtaatacccatcataatcggaggctttggcaactgactagttcccctaataatcggtgcccccgatatggcgtttccccgcataaacaacataagcttctgactcttacctccctctctcctactcctgctcgcatctgctatagtggaggccggagcaggaacaggttgaacagtctaccctcccttagcagggaactactcccaccctggagcctccgtagacctaaccatcttctccttacacctagcaggtgtctcctctatcttaggggccatcaatttcatcacaacaattatcaatataaaaccccctgccataacccaataccaaacgcccctcttcgtctgatccgtcctaatcacagcagtcctacttctcctatctctcccagtcctagctgctggcatcactatactactaacagaccgcaacctcaacaccaccttcttcgaccccgccggaggaggagaccccattctataccaacacctattctgatttttcggtcaccctgaagtttatattcttatcctaccaggcttcggaataatctcccatattgtaacttactactccggaaaaaaagaaccatttggatacataggtatggtctgagctatgatatcaattggcttcctagggtttatcgtgtgagcacaccatatatttacagtaggaatagacgtagacacacgagcatatttcacctccgctaccataatcatcgctatccccaccggcgtcaaagtatttagctgactcgccacactccacggaagcaatatgaaatgatctgctgcagtgctctgagccctagggttcatctttcttttcaccgtaggtggcctgactggcattgtattagcaaactcatcactagacatcgtactacacgacacgtactacgttgtagctcacttccactatgtcctatcaataggagctgtatttgccatcataggaggcttcattcactgatttcccctattctcaggctacaccctagaccaaacctacgccaaaatccatttcactatcatattcatcggcgtaaatctaactttcttcccacaacactttctcggcctatccggaatgccccgacgttactcggactaccccgatgcatacaccacatgaaacatcctatcatctgtaggctcattcatttctctaacagcagtaatattaataattttcatgatttgagaagccttcgcttcgaagcgaaaagtcctaatagtagaagaaccctccataaacctggagtgactatatggatgccccccaccctaccacacattcgaagaacccgtatacataaaatctagacaaaaaaggaaggaatcgaaccccccaaagctggtttcaagccaaccccatggcctccatgactttttcaaaaaggtattagaaaaaccatttcataactttgtcaaagttaaattataggctaaatcctatatatcttaatggcacatgcagcgcaagtaggtctacaagacgctacttcccctatcatagaagagcttatcacctttcatgatcacgccctcataatcattttccttatctgcttcctagtcctgtatgcccttttcctaacactcacaacaaaactaactaatactaacatctcagacgctcaggaaatagaaaccgtctgaactatcctgcccgccatcatcctagtcctcatcgccctcccatccctacgcatcctttacataacagacgaggtcaacgatccctcccttaccatcaaatcaattggccaccaatggtactgaacctacgagtacaccgactacggcggactaatcttcaactcctacatacttcccccattattcctagaaccaggggacctgggactccttgacgttgacaatcgagtagtactcccgattgaagcccccattcgtataataattacatcacaagacgtcttgcactcatgagctgtccccacattaggcttaaaaacagatgcaattcccggacgtctaaaccaaaccactttcaccgctacacgaccgggggtatactacggtcaatgctctgaaatctgtggagcaaaccacagtttcatgcccatcgtcctagaattaattcccctaaaaatctttgaaatagggcccgtatttaccctatagcaccccctctaccccctctagagcccactgtaaagctaacttagcattaaccttttaagttaaagattaagagaaccaacacctctttacagtgaaatgccccaactaaatactaccgtatggcccaccataattacccccatactccttacactattcctcatcacccaactaaaaatattaaacacaaactaccacctacctccctcaccaaagcccataaaaataaaaaattataacaaaccctgagaaccaaaatgaacgaaaatctgttcgcttcattcattgcccccacaatcctaggcctacccgccgcagtactgatcattctatttccccctctattgatccccacctccaaatatctcatcaacaaccgactaatcaccacccaacaatgactaatcaaactaacctcaaaacaaatgatagccatacacaacactaaaggacgaacctgatctcttatactagtatccttaatcatttttattgccacaactaacctcctcggactcctgcctcactcatttacaccaaccacccaactatctataaacctagccatggccatccccttatgagcgggcgcagtgattataggctttcgctctaagattaaaaatgccctagcccacttcttaccacaaggcacacctacaccccttatccccatactagttattatcgaaaccatcagcctactcattcaaccaatagccctggccgtacgcctaaccgctaacattactgcaggccacctactcatgcacctaattggaagcgccaccctagcaatatcaaccattaaccttccctctacacttatcatcttcacaattctaattctactgactatcctagaaatcgctgtcgccttaatccaagcctacgttttcacacttctagtaagcctctacctgcacgacaacacataatgacccaccaatcacatgcctatcatatagtaaaacccagcccatgacccctaacaggggccctctcagccctcctaatgacctccggcctagccatgtgatttcacttccactccataacgctcctcatactaggcctactaaccaacacactaaccatataccaatgatggcgcgatgtaacacgagaaagcacataccaaggccaccacacaccacctgtccaaaaaggccttcgatacgggataatcctatttattacctcagaagtttttttcttcgcaggatttttctgagccttttaccactccagcctagcccctaccccccaactaggagggcactggcccccaacaggcatcaccccgctaaatcccctagaagtcccactcctaaacacatccgtattactcgcatcaggagtatcaatcacctgagctcaccatagtctaatagaaaacaaccgaaaccaaataattcaagcactgcttattacaattttactgggtctctattttaccctcctacaagcctcagagtacttcgagtctcccttcaccatttccgacggcatctacggctcaacattttttgtagccacaggcttccacggacttcacgtcattattggctcaactttcctcactatctgcttcatccgccaactaatatttcactttacatccaaacatcactttggcttcgaagccgccgcctgatactggcattttgtagatgtggtttgactatttctgtatgtctccatctattgatgagggtcttactcttttagtataaatagtaccgttaacttccaattaactagttttgacaacattcaaaaaagagtaataaacttcgccttaattttaataatcaacaccctcctagccttactactaataattattacattttgactaccacaactcaacggctacatagaaaaatccaccccttacgagtgcggcttcgaccctatatcccccgcccgcgtccctttctccataaaattcttcttagtagctattaccttcttattatttgatctagaaattgccctccttttacccctaccatgagccctacaaacaactaacctgccactaatagttatgtcatccctcttattaatcatcatcctagccctaagtctggcctatgagtgactacaaaaaggattagactgagccgaattggtatatagtttaaacaaaacgaatgatttcgactcattaaattatgataatcatatttaccaaatgcccctcatttacataaatattatactagcatttaccatctcacttctaggaatactagtatatcgctcacacctcatatcctccctactatgcctagaaggaataatactatcgctgttcattatagctactctcataaccctcaacacccactccctcttagccaatattgtgcctattgccatactagtctttgccgcctgcgaagcagcggtgggcctagccctactagtctcaatctccaacacatatggcctagactacgtacataacctaaacctactccaatgctaaaactaatcgtcccaacaattatattactaccactgacatgactttccaaaaagcacataatttgaatcaacacaaccacccacagcctaattattagcatcatccccctactattttttaaccaaatcaacaacaacctatttagctgttccccaaccttttcctccgaccccctaacaacccccctcctaatactaactacctgactcctacccctcacaatcatggcaagccaacgccacttatccagtgaaccactatcacgaaaaaaactctacctctctatactaatctccctacaaatctccttaattataacattcacagccacagaactaatcatattttatatcttcttcgaaaccacacttatccccaccttggctatcatcacccgatgaggcaaccagccagaacgcctgaacgcaggcacatacttcctattctacaccctagtaggctcccttcccctactcatcgcactaatttacactcacaacaccctaggctcactaaacattctactactcactctcactgcccaagaactatcaaactcctgagccaacaacttaatatgactagcttacacaatagcttttatagtaaagatacctctttacggactccacttatgactccctaaagcccatgtcgaagcccccatcgctgggtcaatagtacttgccgcagtactcttaaaactaggcggctatggtataatacgcctcacactcattctcaaccccctgacaaaacacatagcctaccccttccttgtactatccctatgaggcataattataacaagctccatctgcctacgacaaacagacctaaaatcgctcattgcatactcttcaatcagccacatagccctcgtagtaacagccattctcatccaaaccccctgaagcttcaccggcgcagtcattctcataatcgcccacggacttacatcctcattactattctgcctagcaaactcaaactacgaacgcactcacagtcgcatcataatcctctctcaaggacttcaaactctactcccactaatagctttttgatgacttctagcaagcctcgctaacctcgccttaccccccactattaacctactgggagaactctctgtgctagtaaccacgttctcctgatcaaatatcactctcctacttacaggactcaacatactagtcacagccctatactccctctacatatttaccacaacacaatggggctcactcacccaccacattaacaacataaaaccctcattcacacgagaaaacaccctcatgttcatacacctatcccccattctcctcctatccctcaaccccgacatcattaccgggttttcctcttgtaaatatagtttaaccaaaacatcagattgtgaatctgacaacagaggcttacgaccccttatttaccgagaaagctcacaagaactgctaactcatgcccccatgtctaacaacatggctttctcaacttttaaaggataacagctatccattggtcttaggccccaaaaattttggtgcaactccaaataaaagtaataaccatgcacactactataaccaccctaaccctgacttccctaattccccccatccttaccaccctcgttaaccctaacaaaaaaaactcatacccccattatgtaaaatccattgtcgcatccacctttattatcagtctcttccccacaacaatattcatgtgcctagaccaagaagttattatctcgaactgacactgagccacaacccaaacaacccagctctccctaagcttcaaactagactacttctccataatattcatccctgtagcattgttcgttacatggtccatcatagaattctcactgtgatatataaactcagacccaaacattaatcagttcttcaaatatctactcattttcctaattaccatactaatcttagttaccgctaacaacctattccaactgttcatcggctgagagggcgtaggaattatatccttcttgctcatcagttgatgatacgcccgagcagatgccaacacagcagccattcaagcaatcctatacaaccgtatcggcgatatcggtttcatcctcgccttagcatgatttatcctacactccaactcatgagacccacaacaaatagcccttctaaacgctaatccaagcctcaccccactactaggcctcctcctagcagcagcaggcaaatcagcccaattaggtctccacccctgactcccctcagccatagaaggccccaccccagtctcagccctactccactcaagcactatagttgtagcaggaatcttcttactcatccgcttccaccccctagcagaaaatagcccactaatccaaactctaacactatgcttaggcgctatcaccactctgttcgcagcagtctgcgcccttacacaaaatgacatcaaaaaaatcgtagccttctccacttcaagtcaactagggctcataatagttacaatcggcatcaaccaaccacacctagcattcctgcacatctgtacccacgccttcttcaaagccatactatttatgtgctccgggtccatcatccacaaccttaacaatgaacaagatattcgaaaaataggaggactactcaaaaccatacctctcacttcaacctccctcaccattggcagcctagcattagcaggaatacctttcctcacaggtttctactccaaagaccacatcatcgaaaccgcaaacatatcatacacaaacgcctgagccctatctattactctcatcgctacctccctgacaagcgcctatagcactcgaataattcttctcaccctaacaggtcaacctcgcttccccacccttactaacattaacgaaaataaccccaccctactaaaccccattaaacgcctggcagccggaagcctattcgcaggatttctcattactaacaacatttcccccgcatcccccttccaaacaacaatccccctctacctaaaactcacagccctcgctgtcactttcctaggacttctaacagccctagacctcaactacctaaccaacaaacttaaaataaaatccccactatgcacattttatttctccaacatactcggattctaccctagcatcacacaccgcacaatcccctatctaggccttcttacgagccaaaacctgcccctactcctcctagacctaacctgactagaaaagctattacctaaaacaatttcacagcaccaaatctccacctccatcatcacctcaacccaaaaaggcataattaaactttacttcctctctttcttcttcccactcatcctaaccctactcctaatcacataacctattcccccgagcaatctcaattacaatatatacaccaacaaacaatgttcaaccagtaaccactactaatcaacgcccataatcatacaaagcccccgcaccaataggatcctcccgaatcaaccctgacccctctccttcataaattattcagcttcctacactattaaagtttaccacaaccaccaccccatcatactctttcacccacagcaccaatcctacctccatcgctaaccccactaaaacactcaccaagacctcaacccctgacccccatgcctcaggatactcctcaatagccatcgctgtagtatatccaaagacaaccatcattccccctaaataaattaaaaaaactattaaacccatataacctcccccaaaattcagaataataacacacccgaccacaccgctaacaatcaatactaaacccccataaataggagaaggcttagaagaaaaccccacaaaccccattactaaacccacactcaacagaaacaaagcatacatcattattctcgcacggactacaaccacgaccaatgatatgaaaaaccatcgttgtatttcaactacaagaacaccaatgaccccaatacgcaaaattaaccccctaataaaattaattaaccactcattcatcgacctccccaccccatccaacatctccgcatgatgaaacttcggctcactccttggcgcctgcctgatcctccaaatcaccacaggactattcctagccatacactactcaccagacgcctcaaccgccttttcatcaatcgcccacatcactcgagacgtaaattatggctgaatcatccgctaccttcacgccaatggcgcctcaatattctttatctgcctcttcctacacatcgggcgaggcctatattacggatcatttctctactcagaaacctgaaacatcggcattatcctcctgcttgcaactatagcaacagccttcataggctatgtcctcccgtgaggccaaatatcattctgaggggccacagtaattacaaacttactatccgccatcccatacattgggacagacctagttcaatgaatctgaggaggctactcagtagacagtcccaccctcacacgattctttacctttcacttcatcttacccttcattattgcagccctagcagcactccacctcctattcttgcacgaaacgggatcaaacaaccccctaggaatcacctcccattccgataaaatcaccttccacccttactacacaatcaaagacgccctcggcttacttctcttccttctctccttaatgacattaacactattctcaccagacctcctaggcgacccagacaattataccctagccaaccccttaaacacccctccccacatcaagcccgaatgatatttcctattcgcctacacaattctccgatccgtccctaacaaactaggaggcgtccttgccctattactatccatcctcatcctagcaataatccccatcctccatatatccaaacaacaaagcataatatttcgcccactaagccaatcactttattgactcctagccgcagacctcctcattctaacctgaatcggaggacaaccagtaagctacccttttaccatcattggacaagtagcatccgtactatacttcacaacaatcctaatcctaataccaactatctccctaattgaaaacaaaatactcaaatgggcctgtccttgtagtataaactaatacaccagtcttgtaaaccggagatgaaaacctttttccaaggacaaatcagagaaaaagtctttaactccaccattagcacccaaagctaagattctaatttaaactattctctgttctttcatggggaagcagatttgggtaccacccaagtattgactcacccatcaacaaccgctatgtatttcgtacattactgccagccaccatgaatattgtacggtaccataaatacttgaccacctgtagtacataaaaacccaacccacatcaaccccccccccccatgcttacaagcaagtacagcaatcaaccttcaactatcacacatcaactgcaactccaaagccacccctcacccactaggataccaacaaacctacccacccttaacagtacatagtacataaagtcatttaccgtacatagcacattacagtcaaatcccttctcgtccccatggatgacccccctcagataggggtcccttgaccaccatcctccgtgaaatcaatatcccgcacaagagtgctactctcctcgctccgggcccataacacttgggggtagctaaagtgaactgtatccgacatctggttcctacttcagggccataaagcctaaatagcccacacgttccccttaaataagacatcacgatg

SEQ ID NO: 168 - DNA, 16563 bp, Homo sapiens mitochondrial
  3110: "n" refers to a nucleotide at position 3107 of the Cambridge Reference Sequence (CRS, Anderson et al. 1981 Nature 290:457-465), later determined to be absent from the human mtDNA sequence according to the revised CRS (rCRS, Andrews et al. 1999 Nature Genetics 23:147); "n" therefore represents a single nucleotide deletion at a position corresponding to nucleotide 3107 of SEQ ID NO:1 as provided herein.
gatcacaggtctatcaccctattaaccactcacgggagctctccatgcatttggtattttcgtctggggggtgtgcacgcgatagcattgcgagacgctggagccggagcaccctatgtcgcagtatctgtctttgattcctgcctcatcctattatttatcgcacctacgttcaatattacaggcgaacatacttactaaagtgtgttaattaattaatgcttgtaggacataataataacaattgaatgtctgcacagccgctttccacacagacatcataacaaaaaatttccaccaaaccccccctccccccccgcttctggccacagcacttaaacacatctctgccaaaccccaaaaacaaagaaccctaacaccagcctaaccagatttcaaattttatcttttggcggtatgcacttttaacagtcaccccccaactaacacattattttcccctcccactcccatactactaatctcatcaatacaacccccacccatcctacccagcacacacacaccgctgctaaccccataccccgaaccaaccaaaccccaaagacaccccccacagtttatgtagcttacctcctcaaagcaatacactgaaaatgtttagacgggctcacatcaccccataaacaaataggtttggtcctagcctttctattagctcttagtaagattacacatgcaagcatccccgttccagtgagttcaccctctaaatcaccacgatcaaaagggacaagcatcaagcacgcagcaatgcagctcaaaacgcttagcctagccacacccccacgggaaacagcagtgattagcctttagcaataaacgaaagtttaactaagctatactaaccccagggttggtcaatttcgtgccagccaccgcggtcacacgattaacccaagtcaatagaagccggcgtaaagagtgttttagatcaccccctccccaataaagctaaaactcacctgagttgtaaaaaactccagttgacacaaaatagactacgaaagtggctttaacatatctgaacacacaatagctaagacccaaactgggattagataccccactatgcttagccctaaacctcaacagttaaatcaacaaaactgctcgccagaacactacgagccacagcttaaaactcaaaggacctggcggtgcttcatatccctctagaggagcctgttctgtaatcgataaaccccgatcaacctcaccacctcttgctcagcctatataccgccatcttcagcaaaccctgatgaaggctacaaagtaagcgcaagtacccacgtaaagacgttaggtcaaggtgtagcccatgaggtggcaagaaatgggctacattttctaccccagaaaactacgatagcccttatgaaacttaagggtcgaaggtggatttagcagtaaactgagagtagagtgcttagttgaacagggccctgaagcgcgtacacaccgcccgtcaccctcctcaagtatacttcaaaggacatttaactaaaacccctacgcatttatatagaggagacaagtcgtaacatggtaagtgtactggaaagtgcacttggacgaaccagagtgtagcttaacacaaagcacccaacttacacttaggagatttcaacttaacttgaccgctctgagctaaacctagccccaaacccactccaccttactaccagacaaccttagccaaaccatttacccaaataaagtataggcgatagaaattgaaacctggcgcaatagatatagtaccgcaagggaaagatgaaaaattataaccaagcataatatagcaaggactaacccctataccttctgcataatgaattaactagaaataactttgcaaggagagccaaagctaagacccccgaaaccagacgagctacctaagaacagctaaaagagcacacccgtctatgtagcaaaatagtgggaagatttataggtagaggcgacaaacctaccgagcctggtgatagctggttgtccaagatagaatcttagttcaactttaaatttgcccacagaaccctctaaatccccttgtaaatttaactgttagtccaaagaggaacagctctttggacactaggaaaaaaccttgtagagagagtaaaaaatttaacacccatagtaggcctaaaagcagccaccaattaagaaagcgttcaagctcaacacccactacctaaaaaatcccaaacatataactgaactcctcacacccaattggaccaatctatcaccctatagaagaactaatgttagtataagtaacatgaaaacattctcctccgcataagcctgcgtcagattaaaacactgaactgacaattaacagcccaatatctacaatcaaccaacaagtcattattaccctcactgtcaacccaacacaggcatgctcataaggaaaggttaaaaaaagtaaaaggaactcggcaaatcttaccccgcctgtttaccaaaaacatcacctctagcatcaccagtattagaggcaccgcctgcccagtgacacatgtttaacggccgcggtaccctaaccgtgcaaaggtagcataatcacttgttccttaaatagggacctgtatgaatggctccacgagggttcagctgtctcttacttttaaccagtgaaattgacctgcccgtgaagaggcgggcatgacacagcaagacgagaagaccctatggagctttaatttattaatgcaaacagtacctaacaaacccacaggtcctaaactaccaaacctgcattaaaaatttcggttggggcgacctcggagcagaacccaacctccgagcagtacatgctaagacttcaccagtcaaagcgaactactatactcaattgatccaataacttgaccaacggaacaagttaccctagggataacagcgcaatcctattctagagtccatatcaacaatagggtttacgacctcgatgttggatcaggacatcccgatggtgcagccgctattaaaggttcgtttgttcaacgattaaagtcctacgtgatctgagttcagaccggagtaatccaggtcggtttctatctacnttcaaattcctccctgtacgaaaggacaagagaaataaggcctacttcacaaagcgccttcccccgtaaatgatatcatctcaacttagtattatacccacacccacccaagaacagggtttgttaagatggcagagcccggtaatcgcataaaacttaaaactttacagtcagaggttcaattcctcttcttaacaacatacccatggccaacctcctactcctcattgtacccattctaatcgcaatggcattcctaatgcttaccgaacgaaaaattctaggctatatacaactacgcaaaggccccaacgttgtaggcccctacgggctactacaacccttcgctgacgccataaaactcttcaccaaagagcccctaaaacccgccacatctaccatcaccctctacatcaccgccccgaccttagctctcaccgtcgctcttctactatgaacccccctccccatacccaaccccctggtcaacctcaacctaggcctcctatttattctagccacctctagcctagccgtttactcaatcctctgatcagggtgagcatcaaactcaaactacgccctgatcggcgcactgcgagcagtagcccaaacaatctcatatgaagtcaccctagccatcattctactatcaacattactaataagtggctcctttaacctctccacccttatcacaacacaagaacacctctgattactcctgccatcatgacccttggccataatatgatttatctccacactagcagagaccaaccgaacccccttcgaccttgccgaaggggagtccgaactagtctcaggcttcaacatcgaatacgccgcaggccccttcgccctattcttcatagccgaatacacaaacattattataataaacaccctcaccactacaatcttcctaggaacaacatatgacgcactctcccctgaactctacacaacatattttgtcaccaagaccctacttctaacctccctgttcttatgaattcgaacagcatacccccgattccgctacgaccaactcatacacctcctatgaaaaaacttcctaccactcaccctagcattacttatatgatatgtctccatacccattacaatctccagcattccccctcaaacctaagaaatatgtctgataaaagagttactttgatagagtaaataataggagcttaaacccccttatttctaggactatgagaatcgaacccatccctgagaatccaaaattctccgtgccacctatcacaccccatcctaaagtaaggtcagctaaataagctatcgggcccataccccgaaaatgttggttatacccttcccgtactaattaatcccctggcccaacccgtcatctactctaccatctttgcaggcacactcatcacagcgctaagctcgcactgattttttacctgagtaggcctagaaataaacatgctagcttttattccagttctaaccaaaaaaataaaccctcgttccacagaagctgccatcaagtatttcctcacgcaagcaaccgcatccataatccttctaatagctatcctcttcaacaatatactctccggacaatgaaccataaccaatactaccaatcaatactcatcattaataatcataatggctatagcaataaaactaggaatagccccctttcacttctgagtcccagaagttacccaaggcacccctctgacatccggcctgcttcttctcacatgacaaaaactagcccccatctcaatcatataccaaatctctccctcactaaacgtaagccttctcctcactctctcaatcttatccatcatagcaggcagttgaggtggactaaaccaaacccagctacgcaaaatcttagcatactcctcaattacccacataggatgaataatagcagttctaccgtacaaccctaacataaccattcttaatttaactatttatattatcctaactactaccgcattcctactactcaacttaaactccagcaccacgaccctactactatctcgcacctgaaacaagctaacatgactaacacccttaattccatccaccctcctctccctaggaggcctgcccccgctaaccggctttttgcccaaatgggccattatcgaagaattcacaaaaaacaatagcctcatcatccccaccatcatagccaccatcaccctccttaacctctacttctacctacgcctaatctactccacctcaatcacactactccccatatctaacaacgtaaaaataaaatgacagtttgaacatacaaaacccaccccattcctccccacactcatcgcccttaccacgctactcctacctatctccccttttatactaataatcttatagaaatttaggttaaatacagaccaagagccttcaaagccctcagtaagttgcaatacttaatttctgtaacagctaaggactgcaaaaccccactctgcatcaactgaacgcaaatcagccactttaattaagctaagcccttactagaccaatgggacttaaacccacaaacacttagttaacagctaagcaccctaatcaactggcttcaatctacttctcccgccgccgggaaaaaaggcgggagaagccccggcaggtttgaagctgcttcttcgaatttgcaattcaatatgaaaatcacctcggagctggtaaaaagaggcctaacccctgtctttagatttacagtccaatgcttcactcagccattttacctcacccccactgatgttcgccgaccgttgactattctctacaaaccacaaagacattggaacactatacctattattcggcgcatgagctggagtcctaggcacagctctaagcctccttattcgagccgagctgggccagccaggcaaccttctaggtaacgaccacatctacaacgttatcgtcacagcccatgcatttgtaataatcttcttcatagtaatacccatcataatcggaggctttggcaactgactagttcccctaataatcggtgcccccgatatggcgtttccccgcataaacaacataagcttctgactcttacctccctctctcctactcctgctcgcatctgctatagtggaggccggagcaggaacaggttgaacagtctaccctcccttagcagggaactactcccaccctggagcctccgtagacctaaccatcttctccttacacctagcaggtgtctcctctatcttaggggccatcaatttcatcacaacaattatcaatataaaaccccctgccataacccaataccaaacgcccctcttcgtctgatccgtcctaattacagcagtcctacttctcctatctctcccagtcctagctgctggcatcactatactactaacagaccgcaacctcaacaccaccttcttcgaccccgccggaggaggagaccccattctataccaacacctattctgatttttcggtcaccctgaagtttatattcttatcctaccaggcttcggaataatctcccatattgtaacttactactccggaaaaaaagaaccatttggatacataggtatggtctgagctatgatatcaattggcttcctagggtttatcgtgtgagcacaccatatatttacagtaggaatagacgtagacacacgagcatatttcacctccgctaccataatcatcgctatccccaccggcgtcaaagtatttagctgactcgccacactccacggaagcaatatgaaatgatctgctgcagtgctctgagccctaggattcatctttcttttcaccgtaggtggcctgactggcattgtattagcaaactcatcactagacatcgtactacacgacacgtactacgttgtagctcacttccactatgtcctatcaataggagctgtatttgccatcataggaggcttcattcactgatttcccctattctcaggctacaccctagaccaaacctacgccaaaatccatttcactatcatattcatcggcgtaaatctaactttcttcccacaacactttctcggcctatccggaatgccccgacgttactcggactaccccgatgcatacaccacatgaaacatcctatcatctgtaggctcattcatttctctaacagcagtaatattaataattttcatgatttgagaagccttcgcttcgaagcgaaaagtcctaatagtagaagaaccctccataaacctggagtgactatatggatgccccccaccctaccacacattcgaagaacccgtatacataaaatctagacaaaaaaggaaggaatcgaaccccccaaagctggtttcaagccaaccccatggcctccatgactttttcaaaaaggtattagaaaaaccatttcataactttgtcaaagttaaattataggctaaatcctatatatcttaatggcacatgcagcgcaagtaggtctacaagacgctacttcccctatcatagaagagcttatcacctttcatgatcacgccctcataatcattttccttatctgcttcctagtcctgtatgcccttttcctaacactcacaacaaaactaactaatactaacatctcagacgctcaggaaatagaaaccgtctgaactatcctgcccgccatcatcctagtcctcatcgccctcccatccctacgcatcctttacataacagacgaggtcaacgatccctcccttaccatcaaatcaattggccaccaatggtactgaacctacgagtacaccgactacggcggactaatcttcaactcctacatacttcccccattattcctagaaccaggcgacctgcgactccttgacgttgacaatcgagtagtactcccgattgaagcccccattcgtataataattacatcacaagacgtcttgcactcatgagctgtccccacattaggcttaaaaacagatgcaattcccggacgtctaaaccaaaccactttcaccgctacacgaccgggggtatactacggtcaatgctctgaaatctgtggagcaaaccacagtttcatgcccatcgtcctagaattaattcccctaaaaatctttgaaatagggcccgtatttaccctatagcaccccctctagagcccactgtaaagctaacttagcattaaccttttaagttaaagattaagagaaccaacacctctttacagtgaaatgccccaactaaatactaccgtatggcccaccataattacccccatactccttacactattcctcatcacccaactaaaaatattaaacacaaactaccacctacctccctcaccaaagcccataaaaataaaaaattataacaaaccctgagaaccaaaatgaacgaaaatctgttcgcttcattcattgcccccacaatcctaggcctacccgccgcagtactgatcattctatttccccctctattgatccccacctccaaatatctcatcaacaaccgactaatcaccacccaacaatgactaatcaaactaacctcaaaacaaatgataaccatacacaacactaaaggacgaacctgatctcttatactagtatccttaatcatttttattgccacaactaacctcctcggactcctgcctcactcatttacaccaaccacccaactatctataaacctagccatggccatccccttatgagcgggcgcagtgattataggctttcgctctaagattaaaaatgccctagcccacttcttaccacaaggcacacctacaccccttatccccatactagttattatcgaaaccatcagcctactcattcaaccaatagccctggccgtacgcctaaccgctaacattactgcaggccacctactcatgcacctaattggaagcgccaccctagcaatatcaaccattaaccttccctctacacttgtcatcttcacaattctaattctactgactatcctagaaatcgctgtcgccttaatccaagcctacgttttcacacttctagtaagcctctacctgcacgacaacacataatgacccaccaatcacatgcctatcatatagtaaaacccagcccatgacccctaacaggggccctctcagccctcctaatgacctccggcctagccatgtgatttcacttccactccataacgctcctcatactaggcctactaaccaacacactaaccatataccaatgatggcgcgatgtaacacgagaaagcacataccaaggccaccacacaccacctgtccaaaaaggccttcgatacgggataatcctatttattacctcagaagtttttttcttcgcaggatttttctgagccttttaccactccagcctagcccctaccccccaattaggagggcactggcccccaacaggcatcaccccgctaaatcccctagaagtcccactcctaaacacatccgtattactcgcatcaggagtatcaatcacctgagctcaccatagtctaatagaaaacaaccgaaaccaaataattcaagcactgcttattacaattttactgggtctctattttaccctcctacaagcctcagagtacttcgagtctcccttcaccatttccgacggcatctacggctcaacattttttgtagccacaggcttccacggacttcacgtcattattggctcaactttcctcactatctgcttcatccgccaactaatatttcactttacatccaaacatcactttggcttcgaagccgccgcctgatactggcattttgtagatgtggtctgactatttctgtatgtctccatctattgatgagggtcttactcttttagtataaatagtaccgttaacttccaattaactagttttgacaacattcaaaaaagagtaataaacttcgccttaattttaataatcaacaccctcctagccttactactaataattattacattttgactaccacaactcaacggctacatagaaaaatccaccccttacgagtgcggcttcgaccctatatcccccgcccgcgtccctttctccataaaattcttcttagtagctattaccttcttattatttgatctagaaattgccctccttttacccctaccatgagccctacaaacaactaacctgccactaatagttatgtcatccctcttattaatcatcatcctagccctaagtctggcctatgagtgactacaaaaaggattagactgaaccgaattggtatatagtttaaacaaaacgaatgatttcgactcattaaattatgataatcatatttaccaaatgcccctcatttacataaatattatactagcatttaccatctcacttctaggaatactagtatatcgctcacacctcatatcctccctactatgcctagaaggaataatactatcgctgttcattatagctactctcataaccctcaacacccactccctcttagccaatattgtgcctattgccatactagtctttgccgcctgcgaagcagcggtgggcctagccctactagtctcaatctccaacacatatggcctagactacgtacataacctaaacctactccaatgctaaaactaatcgtcccaacaattatattactaccactgacatgactttccaaaaaacacataatttgaatcaacacaaccacccacagcctaattattagcatcatccctctactattttttaaccaaatcaacaacaacctatttagctgttccccaaccttttcctccgaccccctaacaacccccctcctaatactaactacctgactcctacccctcacaatcatggcaagccaacgccacttatccagtgaaccactatcacgaaaaaaactctacctctctatactaatctccctacaaatctccttaattataacattcacagccacagaactaatcatattttatatcttcttcgaaaccacacttatccccaccttggctatcatcacccgatgaggcaaccagtcagaacgcctgaacgcaggcacatacttcctattctacaccctagtaggctcccttcccctactcatcgcactaatttacactcacaacaccctaggctcactaaacattctactactcactctcactgcccaagaactatcaaactcctgagccaacaacttaatatgactagcttacacaatagcttttatagtaaagatacctctttacggactccacttatgactccctaaagcccatgtcgaagcccccatcgctgggtcaatagtacttgccgcagtactcttaaaactaggcggctatggtataatacgcctcacactcattctcaaccccctgacaaaacacatagcctaccccttccttgtactatccctatgaggcataattataacaagctccatctgcctacgacaaacagacctaaaatcgctcattgcatactcttcaatcagccacatagccctcgtagtaacagccattctcatccaaaccccctgaagcttcaccggcgcagtcattctcataatcgcccacggacttacatcctcattactattctgcctagcaaactcaaactacgaacgcactcacagtcgcatcataatcctctctcaaggacttcaaactctactcccactaatagctttttgatgacttctagcaagcctcgctaacctcgccttaccccccactattaacctgctgggagaactctctgtgctagtaaccacgttctcctgatcaaatatcactctcctacttacaggactcaacatactagtcacagccctatactccctctacatatttaccacaacacaatggggctcactcacccaccacattaacaacataaaaccctcattcacacgagaaaacaccctcatgttcatacacctatcccccattctcctcctatccctcaaccccgacatcattaccgggttttcctcttgtaaatatagtttaaccaaaacatcagattgtgaatctgacaacagaggcttacgaccccttatttaccgagaaagctcacaagaactgctaactcatgcccccatgtctaacaacatggctttctcaacttttaaaggataacagctatccattggtcttaggccccaaaaattttggtgcaactccaaataaaagtaataaccatgcacactactataaccaccctaaccctgacttccctaattccccccatccttaccaccctcgttaaccctaacaaaaaaaactcatacccccattatgtaaaatccattgtcgcatccacctttattatcagtctcttccccacaacaatattcatgtgcctagaccaagaagttattatctcgaactgacactgagccacaacccaaacaacccagctctccctaagcttcaaactagactacttctccataatattcatccctgtagcattgttcgttacatggtccatcatagaattctcactgtgatatataaactcagacccaaacattaatcagttcttcaaatatctactcatcttcctaattaccatactaatcttagttaccgctaacaacctattccaactgttcatcggctgagagggcgtaggaattatatccttcttgctcatcagttgatgatacgcccgagcagatgccaacacagcagccattcaagcaatcctatacaaccgtatcggcgatatcggtttcatcctcgccttagcatgatttatcctacactccaactcatgagacccacaacaaatagcccttctaaacgctaatccaagcctcaccccactactaggcctcctcctagcagcagcaggcaaatcagcccaattaggtctccacccctgactcccctcagccatagaaggccccaccccagtctcagccctactccactcaagcactatagttgtagcaggaatcttcttactcatccgcttccaccccctagcagaaaatagcccactaatccaaactctaacactatgcttaggcgctatcaccactctgttcgcagcagtctgcgcccttacacaaaatgacatcaaaaaaatcgtagccttctccacttcaagtcaactaggactcataatagttacaatcggcatcaaccaaccacacctagcattcctgcacatctgtacccacgccttcttcaaagccatactatttatgtgctccgggtccatcatccacaaccttaacaatgaacaagatattcgaaaaataggaggactactcaaaaccatacctctcacttcaacctccctcaccattggcagcctagcattagcaggaatacctttcctcacaggtttctactccaaagaccacatcatcgaaaccgcaaacatatcatacacaaacgcctgagccctatctattactctcatcgctacctccctaacaagcgcctatagcactcgaataattcttctcaccctaacaggtcaacctcgcttccccacccttactaacattaacgaaaataaccccaccctactaaaccccattaaacgcctggcagccggaagcctattcgcaggatttctcattactaacaacatttcccccgcatcccccttccaaacaacaatccccctctacctaaaactcacagccctcgctgtcactttcctaggacttctaacagccctagacctcaactacctaaccaacaaacttaaaataaaatccccactatgcacattttatttctccaacatactcggattctaccctagcatcacacaccgcacaatcccctatctaggccttcttacgagccaaaacctgcccctactcctcctagacctaacctgactagaaaagctattacctaaaacaatttcacagcaccaaatctccacctccatcatcacctcaacccaaaaaggcataattaaactttacttcctctctttcttcttcccactcatcctaaccctactcctaatcacataacctattcccccgagcaatctcaattacaatatatacaccaacaaacaatgttcaaccagtaactactactaatcaacgcccataatcatacaaagcccccgcaccaataggatcctcccgaatcaaccctgacccctctccttcataaattattcagcttcctacactattaaagtttaccacaaccaccaccccatcatactctttcacccacagcaccaatcctacctccatcgctaaccccactaaaacactcaccaagacctcaacccctgacccccatgcctcaggatactcctcaatagccatcgctgtagtatatccaaagacaaccatcattccccctaaataaattaaaaaaactattaaacccatataacctcccccaaaattcagaataataacacacccgaccacaccgctaacaatcaatactaaacccccataaataggagaaggcttagaagaaaaccccacaaaccccattactaaacccacactcaacagaaacaaagcatacatcattattctcgcacggactacaaccacgaccaatgatatgaaaaaccatcgttgtatttcaactacaagaacaccaatgaccccaatacgcaaaattaaccccctaataaaattaattaaccactcattcatcgacctccccaccccatccaacatctccgcatgatgaaacttcggctcactccttggcgcctgcctgatcctccaaatcaccacaggactattcctagccatgcactactcaccagacgcctcaaccgccttttcatcaatcgcccacatcactcgagacgtaaattatggctgaatcatccgctaccttcacgccaatggcgcctcaatattctttatctgcctcttcctacacatcgggcgaggcctatattacggatcatttctctactcagaaacctgaaacatcggcattatcctcctgcttgcaactatagcaacagccttcataggctatgtcctcccgtgaggccaaatatcattctgaggggccacagtaattacaaacttactatccgccatcccatacattgggacagacctagttcaatgaatctgaggaggctactcagtagacagtcccaccctcacacgattctttacctttcacttcatcttgcccttcattattgcagccctagcagcactccacctcctattcttgcacgaaacgggatcaaacaaccccctaggaatcacctcccattccgataaaatcaccttccacccttactacacaatcaaagacgccctcggcttacttctcttccttctctccttaatgacattaacactattctcaccagacctcctaggcgacccagacaattataccctagccaaccccttaaatacccctccccacatcaagcccgaatgatatttcctattcgcctacacaattctccgatccgtccctaacaaactaggaggcgtccttgccctattactatccatcctcatcctagcaataatccccatcctccatatatccaaacaacaaagcataatatttcgcccactaagccaatcactttattgactcctagccgcagacctcctcattctaacctgaatcggaggacaaccagtaagctacccttttaccatcattggacaagtagcatccgtactatacttcacaacaatcctaatcctaataccaactatctccctaattgaaaacaaaatactcaaatgggcctgtccttgtagtataaactaatacaccagtcttgtaaaccggagatgaaaacctttttccaaggacaaatcagagaaaaagtctttaactccaccattagcacccaaagctaagattctaatttaaactattctctgttctttcatggggaagcagatttgggtaccacccaagtattgactcacccatcaacaaccgctatgtatttcgtacattactgccagtcaccatgaatattgtacggtaccataaatacttgaccacctgtagtacataaaaacccaatccacatcaaacccccccccccatgcttacaagcaagtacagcaatcaaccctcaactatcacacatcaactgcaactccaaagccacccctcacccactaggataccaacaaacctacccacccttaacagtacatagtacataaagccatttaccgtacatagcacattacagtcaaatccctcctcgtccccatggatgacccccctcagataggggtcccttgaccaccatcctccgtgaaatcaatatcccgcacaagagtgctactctcctcgctccgggcccataacacttgggggtagctaaaatgaactgtatccgacatctggttcctacttcagggccataaagcctaaatagcccacacgttccccttaaataagacatcacgatg

SEQ ID NO: 169 - DNA, 16571 bp, Homo sapiens mitochondrial
  3109: "n" refers to a nucleotide at position 3107 of the Cambridge Reference Sequence (CRS, Anderson et al. 1981 Nature 290:457-465), later determined to be absent from the human mtDNA sequence according to the revised CRS (rCRS, Andrews et al. 1999 Nature Genetics 23:147); "n" therefore represents a single nucleotide deletion at a position corresponding to nucleotide 3107 of SEQ ID NO:1 as provided herein.
gatcacaggtctatcaccctattaaccactcacgggagctctccatgcatttggtattttcgtctggggggtatgcacgcgatagcattgcgagacgctggagccggagcaccctatgtcgcagtatctgtctttgattcctgcctcatcctattatttatcgcacctacgttcaatattacaggcgaacatacttaccaaagtgtgttaattaattaatgcttgtaggacataataataacaattgaatgtctgcacagccgctttccacacagacatcataacaaaaaatttccaccaaaccccccctcccccgccttctggccacagcacttaaacacatctctgccaaaccccaaaaacaaagaaccctaacaccagcctaaccagatttcaaattttatcttttggcggtatgcacttttaacagtcaccccccaactaacacattattttcccctcccactcccatactactaatctcatcaatacaacccccgcccatcctacccagcacacacacaccgctgctaaccccataccccgaaccaaccaaaccccaaagacaccccccaccagtttatgtagcttacctcctcaaagcaatacactgaaaatgtttagacgggctcacatcaccccataaacaaataggtttggtcctagcctttctattagctcttagtaagattacacatgcaagcatccccgttccagtgagttcaccctctaaatcgccacgatcaaaagggacaagcatcaagcacgcagcaatgcagctcaaaacgcttagcctagccacacccccacgggaaacagcagtgattaacctttagcaataaacgaaagtttaactaagctatactaaccccagggttggtcaatttcgtgccagccaccgcggtcacacgattaacccaagtcaatagaagccggcgtaaagagtgttttagatcaccccctccccaataaagctaaaactcacctgagttgtaaaaaactccagttgacacaaaatagactacgaaagtggctttaacatatctgaacacacaatagctaagacccaaactgggattagataccccactatgcttagccctaaacctcaacagttaaatcaacaaaactgctcgccagaacactacgagccacagcttaaaactcaaaggacctggcggtgcttcatatccctctagaggagcctgttctgtaatcgataaaccccgatcaacctcaccacctcttgctcagcctatataccgccatcttcagcaaaccctgatgaaggctacaaagtaagcgcaagtacccacgtaaagacgttaggtcaaggtgtagcccatgaggtggcaagaaatgggctacattttctaccccagaaaactacgatagcccttatgaaacttaagggtcgaaggtggatttagcagtaaactgagagtagagtgcttagttgaacagggccctgaagcgcgtacacaccgcccgtcaccctcctcaagtatacttcaaaggacatttaactaaaacccctacgcatttatatagaggagacaagtcgtaacatggtaagtgtactggaaagtgcacttggacgaaccagagtgtagcttaacacaaagcacccaacttacacttaggagatttcaacttaacttgaccgctctgagctaaacctagccccaaacccactccaccttactaccagacaaccttagccaaaccatttacccaaataaagtataggcgatagaaattgaaacctggcgcaatagatatagtaccgcaagggaaagatgaaaaattataaccaagcataatatagcaaggactaacccctataccttctgcataatgaattaactagaaataactttgcaaggagagccaaagctaagacccccgaaaccagacgagctacctaagaacagctaaaagagcacacccgtctatgtagcaaaatagtgggaagatttataggtagaggcgacaaacctaccgagcctggtgatagctggttgtccaagatagaatcttagttcaactttaaatttgcccacagaaccctctaaatccccttgtaaatttaactgttagtccaaagaggaacagctctttggacactaggaaaaaaccttgtagagagagtaaaaaatttaacacccatagtaggcctaaaagcagccaccaattaagaaagcgttcaagctcaacacccactacctaaaaaatcccaaacatataactgaactcctcacacccaattggaccaatctatcaccctatagaagaactaatgttagtataagtaacatgaaaacattctcctccgcataagcctgcgtcagattaaaacactgaactgacaattaacagcccaatatctacaatcaaccaacaagtcattattaccctcactgtcaacccaacacaggcatgctcataaggaaaggttaaaaaaagtaaaaggaactcggcaaatcttaccccgcctgtttaccaaaaacatcacctctagcatcaccagtattagaggcaccgcctgcccagtgacacatgtttaacggccgcggtaccctaaccgtgcaaaggtagcataatcacttgttccttaaatagggacctgtatgaatggctccacgagggttcagctgtctcttacttttaaccagtgaaattgacctgcccgtgaagaggcgggcataacacagcaagacgagaagaccctatggagctttaatttattaatgcaaacagtacctaacaaacccacaggtcctaaactaccaaacctgcattaaaaatttcggttggggcgacctcggagcagaacccaacctccgagcagtacatgctaagacttcaccagtcaaagcgaactactatactcaattgatccaataacttgaccaacggaacaagttaccctagggataacagcgcaatcctattctagagtccatatcaacaatagggtttacgacctcgatgttggatcaggacatcccaatggtgcagccgctattaaaggttcgtttgttcaacgattaaagtcctacgtgatctgagttcagaccggagtaatccaggtcggtttctatctacnttcaaattcctccctgtacgaaaggacaagagaaataaggcctacttcacaaagcgccttcccccgtaaatgatatcatctcaacttagtattatacccacacccacccaagaacagggtttgttaagatggcagagcccggtaatcgcataaaacttaaaactttacagtcagaggttcaattcctcttcttaacaacatacccatggccaacctcctactcctcattgtacccattctaatcgcaatggcattcctaatgcttaccgaacgaaaaattctaggctatatacaactacgcaaaggccccaacgttgtaggcccctacgggctactacaacccttcgctgacgccataaaactcttcaccaaagagcccctaaaacccgccacatctaccatcaccctctacatcaccgccccgaccttagctctcaccatcgctcttctactatgaacccccctccccatacccaaccccctggtcaacctcaacctaggcctcctatttattctagccacctctagcctagccgtttactcaatcctctgatcagggtgagcatcaaactcaaactacgccctgatcggcgcactgcgagcagtagcccaaacaatctcatatgaagtcaccctagccatcattctactatcaacattactaataagtggctcctttaacctctccacccttatcacaacacaagaacacctctgattactcctgccatcatgacccttggccataatatgatttatctccacactagcagagaccaaccgaacccccttcgaccttgccgaaggggagtccgaactagtctcaggcttcaacatcgaatacgccgcaggccccttcgccctattcttcatagccgaatacacaaacattattataataaacaccctcaccactacaatcttcctaggaacaacatatgacgcactctcccctgaactctacacaacatattttgtcaccaagaccctacttctaacctccctgttcttatgaattcgaacagcatacccccgattccgctacgaccaactcatacacctcctatgaaaaaacttcctaccactcaccctagcattacttatatgatatgtctccatacccattacaatctccagcattccccctcaaacctaagaaatatgtctgataaaagagttactttgatagagtaaataataggagcttaaacccccttatttctaggactatgagaatcgaacccatccctgagaatccaaaattctccgtgccacctatcacaccccatcctaaagtaaggtcagctaaataagctatcgggcccataccccgaaaatgttggttatacccttcccgtactaattaatcccctggcccaacccgtcatctactctaccatctttgcaggcacactcatcacagcgctaagctcgcactgattttttacctgagtaggcctagaaataaacatgctagcttttattccagttctaaccaaaaaaataaaccctcgttccacagaagctgccatcaagtatttcctcacgcaagcaaccgcatccataatccttctaatagctatcctcttcaacaatatactctccggacaatgaaccataaccaatactaccaatcaatactcatcattaataatcataatggctatagcaataaaactaggaatagccccctttcacttctgagtcccagaggttacccaaggcacccctctgacatccggcctgcttcttctcacatgacaaaaactagcccccatctcaatcatataccaaatctctccctcactaaacgtaagccttctcctcactctctcaatcttatccatcatagcaggcagttgaggtggattaaaccaaacccagctacgcaaaatcttagcatactcctcaattacccacataggatgaataatagcagttctaccgtacaaccctaacataaccattcttaatttaactatttatattatcctaactactaccgcattcctactactcaacttaaactccagcaccacgaccctactactatctcgcacctgaaacaagctaacatgactaacacccttaattccatccaccctcctctccctaggaggcctgcccccgctaaccggctttttgcccaaatgggccattatcgaagaattcacaaaaaacaatagcctcatcatccccaccatcatagccaccatcaccctccttaacctctacttctacctacgcctaatctactccacctcaatcacactactccccatatctaacaacgtaaaaataaaatgacagtttgaacatacaaaacccaccccattcctccccacactcatcgcccttaccacgctactcctacctatctccccttttatactaataatcttatagaaatttaggttaaatacagaccaagagccttcaaagccctcagtaagttgcaatacttaatttctgtaacagctaaggactgcaaaaccccactctgcatcaactgaacgcaaatcagccactttaattaagctaagcccttactagaccaatgggacttaaacccacaaacacttagttaacagctaagcaccctaatcaactggcttcaatctacttctcccgccgccgggaaaaaaggcgggagaagccccggcaggtttgaagctgcttcttcgaatttgcaattcaatatgaaaatcacctcggagctggtaaaaagaggcctaacccctgtctttagatttacagtccaatgcttcactcagccattttacctcacccccactgatgttcgccgaccgttgactattctctacaaaccacaaagacattggaacactatacctattattcggcgcatgagctggagtcctaggcacagctctaagcctccttattcgagccgagctgggccagccaggcaaccttctaggtaacgaccacatctacaacgttatcgtcacagcccatgcatttgtaataatcttcttcatagtaatacccatcataatcggaggctttggcaactgactagttcccctaataatcggtgcccccgatatggcgtttccccgcataaacaacataagcttctgactcttacctccctctctcctactcctgctcgcatctgctatagtggaggccggagcaggaacaggttgaacagtctaccctcccttagcagggaactactcccaccctggagcctccgtagacctaaccatcttctccttacacctagcaggtgtctcctctatcttaggggccatcaatttcatcacaacaattatcaatataaaaccccctgccataacccaataccaaacgcccctcttcgtctgatccgtcctaatcacagcagtcctacttctcctatctctcccagtcctagctgctggcatcactatactactaacagaccgcaacctcaacaccaccttcttcgaccccgccggaggaggagaccccattctataccaacacctattctgatttttcggtcaccctgaagtttatattcttatcctaccaggcttcggaataatctcccatattgtaacttactactccggaaaaaaagaaccatttggatacataggtatggtctgagctatgatatcaattggcttcctagggtttatcgtgtgagcacaccatatatttacagtaggaatagacgtagacacacgagcatatttcacctccgctaccataatcatcgctatccccaccggcgtcaaagtatttagctgactcgccacactccacggaagcaatatgaaatgatctgctgcagtgctctgagccctaggattcatctttcttttcaccgtaggtggcctgactggcattgtattagcaaactcatcactagacatcgtactacacgacacgtactacgttgtagcccacttccactatgtcctatcaataggagctgtatttgccatcataggaggcttcattcactgatttcccctattctcaggctacaccctagaccaaacctacgccaaaatccatttcactatcatattcatcggcgtaaatctaactttcttcccacaacactttctcggcctatccggaatgccccgacgttactcggactaccccgatgcatacaccacatgaaacatcctatcatctgtaggctcattcatttctctaacagcagtaatattaataattttcatgatttgagaagccttcgcttcgaagcgaaaagtcctaatagtagaagaaccctccataaacctggagtgactatatggatgccccccaccctaccacacattcgaagaacccgtatacataaaatctagacaaaaaaggaaggaatcgaaccccccaaagctggtttcaagccaaccccatggcctccatgactttttcaaaaaggtattagaaaaaccatttcataactttgtcaaagttaaattataggctaaatcctatatatcttaatggcacatgcagcgcaagtaggtctacaagacgctacttcccctatcatagaagagcttatcacctttcatgatcacgccctcataatcattttccttatctgcttcctagtcctgtatgcccttttcctaacactcacaacaaaactaactaatactaacatctcagacgctcaggaaatagaaaccgtctgaactatcctgcccgccatcatcctagtcctcatcgccctcccatccctacgcatcctttacataacagacgaggtcaacgatccctcccttaccatcaaatcaattggccaccaatggtactgaacctacgagtacaccgactacggcggactaatcttcaactcctacatacttcccccattattcctagaaccaggcgacctgcgactccttgacgttgacaatcgagtagtactcccgattgaagcccccattcgtataataattacatcacaagacgtcttgcactcatgagctgtccccacattaggcttaaaaacagatgcaattcccggacgtctaaaccaaaccactttcaccgctacacgaccgggggtatactacggtcaatgctctgaaatctgtggagcaaaccacagtttcatgcccatcgtcctagaattaattcccctaaaaatctttgaaatagggcccgtatttaccctatagcaccccctctaccccctctagagcccactgtaaagctaacttagcattaaccttttaagttaaagattaagagaaccaacacctctttacagtgaaatgccccaactaaatactaccgtatggcccaccataattacccccatactccttacactattcctcatcacccaactaaaaatattaaacacaaactaccacctacctccctcaccaaagcccataaaaataaaaaattataacaaaccctgagaaccaaaatgaacgaaaatctgttcgcttcattcattgcccccacaatcctaggcctacccgccgcagtactgatcattctatttccccctctattgatccccacctccaaatatctcatcaacaaccgactaatcaccacccaacaatgactaatcaaactaacctcaaaacaaatgataaccatacacaacactaaaggacgaacctgatctcttatactagtatccttaatcatttttattgccacaactaacctcctcggactcctgcctcactcatttacaccaaccacccaactatctataaacctagccatggccatccccttatgagcgggcgcagtgattataggctttcgctctaagattaaaaatgccctagcccacttcttaccacaaggcacacctacaccccttatccccatactagttattatcgaaaccatcagcctactcattcaaccaatagccctggccgtacgcctaaccgctaacattactgcaggccacctactcatgcacctaattggaagcgccaccctagcaatatcaaccattaaccttccctctacacttatcatcttcacaattctaattctactgactatcctagaaatcgctgtcgccttaatccaagcctacgttttcacacttctagtaagcctctacctgcacgacaacacataatgacccaccaatcacatgcctatcatatagtaaaacccagcccatgacccctaacaggggccctctcagccctcctaatgacctccggcctagccatgtgatttcacttccactccataacgctcctcatactaggcctactaaccaacacactaaccatataccaatgatggcgcgatgtaacacgagaaagcacataccaaggccaccacacaccacctgtccaaaaaggccttcgatacgggataatcctatttattacctcagaagtttttttcttcgcaggatttttctgagccttttaccactccagcctagcccctaccccccaattaggagggcactggcccccaacaggcatcaccccgctaaatcccctagaagtcccactcctaaacacatccgtattactcgcatcaggagtatcaatcacctgagctcaccatagtctaatagaaaacaaccgaaaccaaataattcaagcactgcttattacaattttactgggtctctattttaccctcctacaagcctcagagtacttcgagtctcccttcaccatttccgacggcatctacggctcaacattttttgtagccacaggcttccacggacttcacgtcattattggctcaactttcctcactatctgcttcatccgccaactaatatttcactttacatccaaacatcactttggcttcgaagccgccgcctgatactggcattttgtagatgtggtttgactatttctgtatgtctccatctattgatgagggtcttactcttttagtataaatagtaccgttaacttccaattaactagttttgacaacattcaaaaaagagtaataaacttcgccttaattttaataatcaacaccctcctagccttactactaataattattacattttgactaccacaactcaacggctacatagaaaaatccaccccttacgagtgcggcttcgaccctatatcccccgcccgcgtccctttctccataaaattcttcttagtagctattaccttcttattatttgatctagaaattgccctccttttacccctaccatgagccctacaaacaactaacctgccactaatagttatgtcatccctcttattaatcatcatcctagccctaagtctggcctatgagtgactacaaaaaggattagactgaaccgaattggtatatagtttaaacaaaacgaatgatttcgactcattaaattatgataatcatatttaccaaatgcccctcatttacataaatattatactagcatttaccatctcacttctaggaatactagtatatcgctcacacctcatatcctccctactatgcctagaaggaataatactatcgctgttcattatagctactctcataaccctcaacacccactccctcttagccaatattgtgcctattgccatactagtctttgccgcctgcgaagcagcggtgggcctagccctactagtctcaatctccaacacatatggcctagactacgtacataacctaaacctactccaatgctaaaactaatcgtcccaacaattatattactaccactgacatgactttccaaaaaacacataatttgaatcaacacaaccacccacagcctaattattagcatcatccctctactattttttaaccaaatcaacaacaacctatttagctgttccccaaccttttcctccgaccccctaacaacccccctcctaatactaactacctgactcctacccctcacaatcatggcaagccaacgccacttatccagtgaaccactatcacgaaaaaaactctacctctctatactaatctccctacaaatctccttaattataacattcacagccacagaactaatcatattttatatcttcttcgaaaccacacttatccccaccttggctatcatcacccgatgaggcaaccagccagaacgcctgaacgcaggcacatacttcctattctacaccctagtaggctcccttcccctactcatcgcactaatttacactcacaacaccctaggctcactaaacattctactactcactctcactgcccaagaactatcaaactcctgagccaacaacttaatatgactagcttacacaatagcttttatagtaaagatacctctttacggactccacttatgactccctaaagcccatgtcgaagcccccatcgctgggtcaatagtacttgccgcagtactcttaaaactaggcggctatggtataatacgcctcacactcattctcaaccccctgacaaaacacatagcctaccccttccttgtactatccctatgaggcataattataacaagctccatctgcctacgacaaacagacctaaaatcgctcattgcatactcttcaatcagccacatagccctcgtagtaacagccattctcatccaaaccccctgaagcttcaccggcgcagtcattctcataatcgcccacgggcttacatcctcattactattctgcctagcaaactcaaactacgaacgcactcacagtcgcatcataatcctctctcaaggacttcaaactctactcccactaatagctttttgatgacttctagcaagcctcgctaacctcgccttaccccccactattaacctactgggagaactctctgtgctagtaaccacgttctcctgatcaaatatcactctcctacttacaggactcaacatactagtcacagccctatactccctctacatatttaccacaacacaatggggctcactcacccaccacattaacaacataaaaccctcattcacacgagaaaacaccctcatgttcatacacctatcccccattctcctcctatccctcaaccccgacatcattaccgggttttcctcttgtaaatatagtttaaccaaaacatcagattgtgaatctgacaacagaggcttacgaccccttatttaccgagaaagctcacaagaactgctaactcatgcccccatgtctaacaacatggctttctcaacttttaaaggataacagctatccattggtcttaggccccaaaaattttggtgcaactccaaataaaagtaataaccatgcacactactataaccaccctaaccctgacttccctaattccccccatccttaccaccctcgttaaccctaacaaaaaaaactcatacccccattatgtaaaatccattgtcgcatccacctttattatcagtctcttccccacaacaatattcatgtgcctagaccaagaagttattatctcgaactgacactgagccacaacccaaacaacccagctctccctaagcttcaaactagactacttctccataatattcatccctgtagcattgttcgttacatggtccatcatagaattctcactgtgatatataaactcagacccaaacattaatcagttcttcaaatatctactcatcttcctaattaccatactaatcttagttaccgctaacaacctattccaactgttcatcggctgagagggcgtaggaattatatccttcttgctcatcagttgatgatacgcccgagcagatgccaacacagcagccattcaagcaatcctatacaaccgtatcggcgatatcggtttcatcctcgccttagcatgatttatcctacactccaactcatgagacccacaacaaatagcccttctaaacgctaatccaagcctcaccccactactaggcctcctcctagcagcagcaggcaaatcagcccaattaggtctccacccctgactcccctcagccatagaaggccccaccccagtctcagccctactccactcaagcactatagttgtagcaggaatcttcttactcatccgcttccaccccctagcagaaaatagcccactaatccaaactctaacactatgcttaggcgctatcaccactctgttcgcagcagtctgcgcccttacacaaaatgacatcaaaaaaatcgtagccttctccacttcaagtcaactaggactcataatagttacaatcggcatcaaccaaccacacctagcattcctgcacatctgtacccacgccttcttcaaagccatactatttatgtgctccgggtccatcatccacaaccttaacaatgaacaagatattcgaaaaataggaggactactcaaaaccatacctctcacttcaacctccctcaccattggcagcctagcattagcaggaatacctttcctcacaggtttctactccaaagaccacatcatcgaaaccgcaaacatatcatacacaaacgcctgagccctatctattactctcatcgctacctccctgacaagcgcctatagcactcgaataattcttctcaccctaacaggtcaacctcgcttccccacccttactaacattaacgaaaataaccccaccctactaaaccccattaaacgcctggcagccggaagcctattcgcaggatttctcattactaacaacatttcccccgcatcccccttccaaacaacaacccccctctacctaaaactcacagccctcgctgtcactttcctaggacttctaacagccctagacctcaactacctaaccaacaaacttaaaataaaatccccactatgcacattttatttctccaacatactcggattctaccctagcatcacacaccgcacaatcccctatctaggccttcttacgagccaaaacctgcccctactcctcctagacctaacctgactagaaaagctattacctaaaacaatttcacagcaccaaatctccacctccatcatcacctcaacccaaaaaggcataattaaactttacttcctctctttcttcttcccactcatcctaaccctactcctaatcacataacctattcccccgagcaatctcaattacaatatatacaccaacaaacaatgttcaaccagtaactactactaatcaacgcccataatcatacaaagcccccgcaccaataggatcctcccgaatcaaccctgacccctctccttcataaattattcagcttcctacactattaaagtttaccacaaccaccaccccatcatactctttcacccacagcaccaatcctacctccatcgctaaccccactaaaacactcaccaagacctcaacccctgacccccatgcctcaggatactcctcaatagccatcgctgtagtatatccaaagacaaccatcattccccctaaataaattaaaaaaactattaaacccatataacctcccccaaaattcagaataataacacacccgaccacaccgctaacaatcaatactaaacccccataaataggagaaggcttagaagaaaaccccacaaaccccattactaaacccacactcaacagaaacaaagcatacatcattattctcgcacggactacaaccacgaccaatgatatgaaaaaccatcgttgtatttcaactacaagaacaccaatgaccccaatacgcaaaactaaccccctaataaaattaattaaccactcattcatcgacctccccaccccatccaacatctccgcatgatgaaacttcggctcactccttggcgcctgcctgatcctccaaatcaccacaggactattcctagccatgcactactcaccagacgcctcaaccgccttttcatcaatcgcccacatcactcgagacgtaaattatggctgaatcatccgctaccttcacgccaatggcgcctcaatattctttatctgcctcttcctacacatcgggcgaggcctatattacggatcatttctctactcagaaacctgaaacatcggcattatcctcctgcttgcaactatagcaacagccttcataggctatgtcctcccgtgaggccaaatatcattctgaggggccacagtaattacaaacttactatccgccatcccatacattgggacagacctagttcaatgaatctgaggaggctactcagtagacagtcccaccctcacacgattctttacctttcacttcatcttgcccttcattattgcagccctagcagcactccacctcctattcttgcacgaaacgggatcaaacaaccccctaggaatcacctcccattccgataaaatcaccttccacccttactacacaatcaaagacgccctcggcttacttctcttccttctctccttaatgacattaacactattctcaccagacctcctaggcgacccagacaattataccctagccaaccccttaaacacccctccccacatcaagcccgaatgatatttcctattcgcctacacaattctccgatccgtccctaacaaactaggaggcgtccttgccctattactatccatcctcatcctagcaataatccccatcctccatatatccaaacaacaaagcataatatttcgcccactaagccaatcactttattgactcctagccgcagacctcctcattctaacctgaatcggaggacaaccagtaagctacccttttaccatcattggacaagtagcatccgtactatacttcacaacaatcctaatcctaataccaactatctccctaattgaaaacaaaatactcaaatgggcctgtccttgtagtataaactaatacaccagtcttgtaaaccggagatgaaaacctttttccaaggacaaatcagagaaaaagtctttaactccaccattagcacccaaagctaagattctaatttaaactattctctgttctttcatggggaagcagatttgggtaccacccaagtattgactcacccatcaacaaccgctatgtatttcgtacattactgccagccaccatgaatattgtacagtaccataaatacttgaccacctgtagtacataaaaacccaatccacatcaaaaccccccccccatgcttacaagcaagtacagcaatcaaccctcaactatcacacatcaactgcaactccaaagccacccctcacccactaggataccaacaaacctacccacccttaacagtacatagtacataaagccatttaccgtacatagcacattacagtcaaatcccctctcgtccccatggatgacccccctcagataggggtcccttgaccaccatcctccgtgaaatcaatatcccgcacaagagtgctactctcctcgctccgggcccataacacttgggggtagctaaagtgaactgtatccgacatctggttcctacttcagggccataaagcctaaatagcccacacgttccccttaaataagacatcacgatg

SEQ ID NO: 170 - DNA, 16568 bp, Homo sapiens mitochondrial
  3106: "n" refers to a nucleotide at position 3107 of the Cambridge Reference Sequence (CRS, Anderson et al. 1981 Nature 290:457-465), later determined to be absent from the human mtDNA sequence according to the revised CRS (rCRS, Andrews et al. 1999 Nature Genetics 23:147); "n" therefore represents a single nucleotide deletion at a position corresponding to nucleotide 3107 of SEQ ID NO:1 as provided herein.
gatcacaggtctatcaccctattaaccactcacgggagctctccatgcatttggtattttcgtctggggggtgtgcacgcgatagcattgcgagacgctggagccggagcaccctatgtcgcagtatctgtctttgattcctgcctcattctgttatttatcgcacctacgttcaatattacagacgagcatacttactaaagtgtgttaattaattaatgcttgtaggacataataataacaattgaatgtctgcacagccgctttccacacagacatcataacaaaaaatttccaccaaaccccccctcccccgccttctggccacagcacttaaacacatctctgccaaaccccaaaaacaaagaaccctaacaccagcctaaccagatttcaaattttatcttttggcggtatgcacttttaacagtcaccccccaactaacacattattttcccctcccactcccatactactaatctcatcaacacaacccccgcccatcctacccagcacacacaccgctgctaaccccataccccgaaccaaccaaaccccaaagacaccccccacagtttatgtagcttacctcctcaaagcaatacactgaaaatgtttagacgggctcacatcaccccataaacaaataggtttggtcctagcctttctattagctcttagtaagattacacatgcaagcatccccgttccagtgagttcaccctctaaatcaccacgatcaaaagggacaagcatcaagcacgcagcaatgcagctcaaaacgcttagcctagccacacccccacgggaaacagcagtgattaacctttagcaataaacgaaagtttaactaagctatactaaccccagggttggtcaatttcgtgccagccaccgcggtcacacgattaacccaagtcaatagaagccggcgtaaagagtgttttagatcaccccctccccaataaagctaaaactcacctgagttgtaaaaaactccagttgacacaaaatagactacgaaagtggctttaacatgtctgaacacacaatagctaagacccaaactgggattagataccccactatgcttagccctaaacctcaacagttaaatcaacaaaactgctcgccagaacactacgagccacagcttaaaactcaaaggacctggcggtgcttcatatccctctagaggagcctgttctgtaatcgataaaccccgatcaacctcaccacctcttgctcagcctatataccgccatcttcagcaaaccctgatgaaggctacaaagtaagcgcaagtacccacgtaaagacgttaggtcaaggtgtagcccatgaggtggcaagaaatgggctacattttctaccccagaaaactacgatagcccttatgaaacttaagggtcgaaggtggatttagcagtaaactgagagtagagtgcttagttgaacagggccctgaagcgcgtacacaccgcccgtcaccctcctcaagtatacttcaaaggacatttaactaaaacccctacgcatttatatagaggagacaagtcgtaacatggtaagtgtactggaaagtgcacttggacgaaccagagtgtagcttaacacaaagcacccaacttacacttaggagatttcaacttaacttgaccgctctgagctaaacctagccccaaacccactccaccttactaccagacaaccttagccaaaccatttacccaaataaagtataggcgatagaaattgaaacctggcgcaatagatatagtaccgcaagggaaagatgaaaaattataaccaagcataatatagcaaggactaacccctataccttctgcataatgaattaactagaaataactttgcaaggagagccaaagctaagacccccgaaaccagacgagctacctaagaacagctaaaagagcacacccgtctatgtagcaaaatagtgggaagatttataggtagaggcgacaaacctaccgagcctggtgatagctggttgtccaagatagaatcttagttcaactttaaatttgcccacagaaccctctaaatccccttgtaaatttaactgttagtccaaagaggaacagctctttggacactaggaaaaaaccttgtagagagagtaaaaaatttaacacccatagtaggcctaaaagcagccaccaattaagaaagcgttcaagctcaacacccactacctaaaaaatcccaaacatataactgaactcctcacacccaattggaccaatctatcaccctatagaagaactaatgttagtataagtaacatgaaaacattctcctccgcataagcctgcgtcagattaaaacactgaactgacaattaacagcccaatatctacaatcaaccaacaagtcattattaccctcactgtcaacccaacacaggcatgctcataaggaaaggttaaaaaaagtaaaaggaactcggcaaatcttaccccgcctgtttaccaaaaacatcacctctagcatcaccagtattagaggcaccgcctgcccagtgacacatgtttaacggccgcggtaccctaaccgtgcaaaggtagcataatcacttgttccttaaatagggacctgtatgaatggctccacgagggttcagctgtctcttacttttaaccagtgaaattgacctgcccgtgaagaggcgggcatgacacagcaagacgagaagaccctatggagctttaatttattaatgcaaacagtacctaacaaacccacaggtcctaaactaccaaacctgcattaaaaatttcggttggggcgacctcggagcagaacccaacctccgagcagtacatgctaagacttcaccagtcaaagcgaactactatactcaattgatccaataacttgaccaacggaacaagttaccctagggataacagcgcaatcctattctagagtccatatcaacaatagggtttacgacctcgatgttggatcaggacatcccgatggtgcagccgctattaaaggttcgtttgttcaacgattaaagtcctacgtgatctgagttcagaccggagtaatccaggtcggtttctatctacnttcaaattcctccctgtacgaaaggacaagagaaataaggcctacttcacaaagcgccttcccccgtaaatgatatcatctcaacttagtattatacccacacccacccaagaacagggtttgttaagatggcagagcccggtaatcgcataaaacttaaaactttacagtcagaggttcaattcctcttcttaacaacatacccatggccaacctcctactcctcattgtacccattctaatcgcaatggcattcctaatgcttaccgaacgaaaaattctaggccatatacaactacgcaaaggccccaacgttgtaggcccctacgggctactacaacccttcgctgacgccataaaactcttcaccaaagagcccctaaaacccgccacatctaccatcaccctctacatcaccgccccgaccttagctctcaccatcgctcttctactatgaacccccctccccatacccaaccccctggtcaacctcaacctaggcctcctatttattctagccacctctagcctagccgtttactcaatcctctgatcagggtgagcatcaaactcaaactacgccctgatcggcgcactgcgagcagtagcccaaacaatctcatatgaagtcaccctagccatcattctactatcaacattactaataagtggctcctttaacctctccacccttatcacaacacaagaacacctctgattactcctgccatcatgacccttggccataatatgatttatctccacactagcagagaccaaccgaacccccttcgaccttgccgaaggggagtccgaactagtctcaggcttcaacatcgaatacgccgcaggccccttcgccctattcttcatagccgaatacacaaacattattataataaacaccctcaccactacaatcttcctaggaacaacatatgacgcactctcccctgaactctacacaacatattttgtcaccaagaccctacttctaacctccctgttcttatgaattcgaacagcatacccccgattccgctacgaccaactcatacacctcctatgaaaaaacttcctaccactcaccctagcattacttatatgatatgtctccatacccattacaatctccagcattccccctcaaacctaagaaatatgtctgataaaagagttactttgatagagtaaataataggagcttaaacccccttatttctaggactatgagaatcgaacccatccctgagaatccaaaattctccgtgccacctatcacaccccatcctaaagtaaggtcagctaaataagctatcgggcccataccccgaaaatgttggttatacccttcccgtactaattaatcccctggcccaacccatcatctactctaccatctttgcaggcacactcatcacagcgctaagctcgcactgattttttacctgagtaggcctagaaataaacatgctagcttttattccagttctaaccaaaaaaataaaccctcgttccacagaagctgccatcaagtatttcctcacgcaagcaaccgcatccataatccttctaatagctatcctcttcaacaatatactctccggacaatgaaccataaccaatactaccaatcaatactcatcattaataatcataatggctatagcaataaaactaggaatagccccctttcacttctgagtcccagaggttacccaaggcacccctctgacatccggcctgcttcttctcacatgacaaaaactagcccccatctcaatcatataccaaatctctccctcactaaacgtaagccttctcctcactctctcaatcttatccatcatagcaggcagttgaggtggattaaaccaaacccagctacgcaaaatcttagcatactcctcaattacccacataggatgaataatagcagttctaccgtacaaccctaacataaccattcttaatttaactatttatattatcctaactactaccgcattcctactactcaacttaaactccagcaccacgaccctactactatctcgcacctgaaacaagctaacatgactaacacccttaattccatccaccctcctctccctaggaggcctgcccccgctaaccggctttttgcccaaatgggccattatcgaagaattcacaaaaaacaatagcctcatcatccccaccatcatagccaccatcaccctccttaacctctacttctacctacgcctaatctactccacctcaatcacactactccccatatctaacaacgtaaaaataaaatgacagtttgaacatacaaaacccaccccattcctccccacactcatcgcccttaccacgctactcctacctatctccccttttatactaataatcttatagaaatttaggttaaatacagaccaagagccttcaaagccctcagtaagttgcaatacttaatttctgtaacagctaaggactgcaaaaccccactctgcatcaactgaacgcaaatcagccactttaattaagctaagcccttactagaccaatgggacttaaacccacaaacacttagttaacagctaagcaccctaatcaactggcttcaatctacttctcccgccgccgggaaaaaaggcgggagaagccccggcaggtttgaagctgcttcttcgaatttgcaattcaatatgaaaatcacctcggagctggtaaaaagaggcctaacccctgtctttagatttacagtccaatgcttcactcagccattttacctcacccccactgatgttcgccgaccgttgactattctctacaaaccacaaagacattggaacactatacctattattcggcgcatgagctggagtcctaggcacagctctaagcctccttattcgagccgagctgggccagccaggcaaccttctaggtaacgaccacatctacaacgttatcgtcacagcccatgcatttgtaataatcttcttcatagtaatacccatcataatcggaggctttggcaactgactagttcccctaataatcggtgcccccgatatggcgtttccccgcataaacaacataagcttctgactcttacctccctctctcctactcctgctcgcatctgctatagtggaggccggagcaggaacaggttgaacagtctaccctcccttagcagggaactactcccaccctggagcctccgtagacctaaccatcttctccttacacctagcaggtgtctcctctatcttaggggccatcaatttcatcacaacaattatcaatataaaaccccctgccataacccaataccaaacgcccctcttcgtctgatccgtcctaatcacagcagtcctacttctcctatctctcccagtcctagctgctggcatcactatactactaacagaccgcaacctcaacaccaccttcttcgaccccgccggaggaggagaccccattctataccaacacctattctgatttttcggtcaccctgaagtttatattcttatcctaccaggcttcggaataatctcccatattgtaacttactactccggaaaaaaagaaccatttggatacataggtatggtctgagctatgatatcaattggcttcctagggtttatcgtgtgagcacaccatatatttacagtaggaatagacgtagacacacgagcatatttcacctccgctaccataatcatcgctatccccaccggcgtcaaagtatttagctgactcgccacactccacggaagcaatatgaaatgatctgctgcagtgctctgagccctaggattcatctttcttttcaccgtaggtggcctgactggcattgtattagcaaactcatcactagacatcgtactacacgacacgtactacgttgtagctcacttccactatgtcctatcaataggagctgtatttgccatcataggaggcttcattcactgatttcccctattctcaggctacaccctagaccaaacctacgccaaaatccatttcactatcatattcatcggcgtaaatctaactttcttcccacaacactttctcggcctatccggaatgccccgacgttactcggactaccccgatgcatacaccacatgaaacatcctatcatctgtaggctcattcatttctctaacagcagtaatattaataattttcatgatttgagaagccttcgcttcgaagcgaaaagtcctaatagtagaagaaccctccataaacctggagtgactatatggatgccccccaccctaccacacattcgaagaacccgtatacataaaatctagacaaaaaaggaaggaatcgaaccccccaaagctggtttcaagccaaccccatggcctccatgactttttcaaaaaggtattagaaaaaccatttcataactttgtcaaagttaaattataggctaaatcctatatatcttaatggcacatgcagcgcaagtaggtctacaagacgctacttcccctatcatagaagagcttatcacctttcatgatcacgccctcataatcattttccttatctgcttcctagtcctgtatgcccttttcctaacactcacaacaaaactaactaatactaacatctcagacgctcaggaaatagaaaccgtctgaactatcctgcccgccatcatcctagtcctcatcgccctcccatccctacgcatcctttacataacagacgaggtcaacgatccctcccttaccatcaaatcaattggccaccaatggtactgaacctacgagtacaccgactacggcggactaatcttcaactcctacatacttcccccattattcctagaaccaggcgacctgcgactccttgacgttgacaatcgagtagtactcccgattgaagcccccattcgtataataattacatcacaagacgtcttgcactcatgagctgtccccacattaggcttaaaaacagatgcaattcccggacgtctaaaccaaaccactttcaccgctacacgaccgggggtatactacggtcaatgctctgaaatctgtggagcaaaccacagtttcatgcccatcgtcctagaattaattcccctaaaaatctttgaaatagggcccgtatttaccctatagcaccccctctaccccctctagagcccactgtaaagctaacttagcattaaccttttaagttaaagattaagagaaccaacacctctttacagtgaaatgccccaactaaatactaccgtatggcccaccataattacccccatactccttacactattcctcatcacccaactaaaaatattaaacacaaactaccacctacctccctcaccaaagcccataaaaataaaaaattataacaaaccctgagaaccaaaatgaacgaaaatctgttcgcttcattcattgcccccacaatcctaggcctacccgccgcagtactgatcattctatttccccctctattgatccccacctccaaatatctcatcaacaaccgactaatcaccacccaacaatgactaatcaaactaacctcaaaacaaatgatagccatacacaacactaaaggacgaacctgatctcttatactagtatccttaatcatttttattgccacaactaacctcctcggactcctgcctcactcatttacaccaaccacccaactatctataaacctagccatggccatccccttatgagcgggcgcagtgattataggctttcgctctaagattaaaaatgccctagcccacttcttaccacaaggcacacctacaccccttatccccatactagttattatcgaaaccatcagcctactcattcaaccaatagccctggccgtacgcctaaccgctaacattactgcaggccacctactcatgcacctaattggaagcgccaccctagcaatatcaaccattaaccttccctctacacttatcatcttcacaattctaattctactgactatcctagaaatcgctgtcgccttaatccaagcctacgttttcacacttctagtaagcctctacctgcacgacaacacataatgacccaccaatcacatgcctatcatatagtaaagcccagcccatgacccctaacaggggccctctcagccctcctaatgacctccggcctagccatgtgatttcacttccactccataacgctcctcatactaggcctactaaccaacacactaaccatataccaatgatggcgcgatgtaacacgagaaagcacataccaaggccaccacacaccacctgtccaaaaaggccttcgatacgggataatcctatttattacctcagaagtttttttcttcgcaggatttttctgagccttttaccactccagcctagcccctaccccccaactaggagggcactggcccccaacaggcatcaccccgctaaatcccctagaagtcccactcctaaacacatccgtattactcgcatcaggagtatcaatcacctgagctcaccatagtctaatagaaaacaaccgaaaccaaataattcaagcactgcttattacaattttactgggtctctattttaccctcctacaagcctcagagtacttcgagtctcccttcaccatttccgacggcatctacggctcaacattttttgtagccacaggcttccacggacttcacgtcattattggctcaactttcctcactatctgcttcatccgccaactaatatttcactttacatccaaacatcactttggcttcgaagccgccgcctgatactggcattttgtagatgtggtttgactatttctgtatgtctccatctattgatgagggtcttactcttttagtataaatagtaccgttaacttccaattaactagttttgacaacattcaaaaaagagtaataaacttcgccttaattttaataatcaacaccctcctagccttactactaataattattacattttgactaccacaactcaacggctacatagaaaaatccaccccttacgagtgcggcttcgaccctatatcccccgcccgcgtccctttctccataaaattcttcttagtagctattaccttcttattatttgatctagaaattgccctccttttacccctaccatgagccctacaaacaactaacctgccactaatagttatgtcatccctcttattaatcatcatcctagccctaagtctggcctatgagtgactacaaaaaggattagactgagctgaattggtatatagtttaaacaaaacgaatgatttcgactcattaaattatgataatcatatttaccaaatgcccctcatttacataaatattatactagcatttaccatctcacttctaggaatactagtatatcgctcacacctcatatcctccctactatgcctagaaggaataatactatcgctgttcattatagctactctcataaccctcaacacccactccctcttagccaatattgtgcctattgccatactagtctttgccgcctgcgaagcagcggtgggcctagccctactagtctcaatctccaacacatatggcctagactacgtacataacctaaacctactccaatgctaaaactaatcgtcccaacaattatattactaccactgacatgactttccaaaaaacacataatttgaatcaacacaaccacccacagcctaattattagcatcatccccctactattttttaaccaaatcaacaacaacctatttagctgttccccaaccttttcctccgaccccctaacaacccccctcctaatactaactacctgactcctacccctcacaatcatggcaagccaacgccacttatccagtgaaccactatcacgaaaaaaactctacctctctatactaatctccctacaaatctccttaattataacattcacagccacagaactaatcatattttatatcttcttcgaaaccacacttatccccaccttggctatcatcacccgatgaggcaaccagccagaacgcctgaacgcaggcacatacttcctattctacaccctagtaggctcccttcccctactcatcgcactaatttacactcacaacaccctaggctcactaaacattctactactcactctcactgcccaagaactatcaaactcctgagccaacaacttaatatgactagcttacacaatagcttttatagtaaagatacctctttacggactccacttatgactccctaaagcccatgtcgaagcccccatcgctgggtcaatagtacttgccgcagtactcttaaaactaggcggctatggtataatacgcctcacactcattctcaaccccctgacaaaacacatagcctaccccttccttgtactatccctatgaggcataattataacaagctccatctgcctacgacaaacagacctaaaatcgctcattgcatactcttcaatcagccacatagccctcgtagtaacagccattctcatccaaaccccctgaagcttcaccggcgcagtcattctcataatcgcccacggacttacatcctcattactattctgcctagcaaactcaaactacgaacgcactcacagtcgcatcataatcctctctcaaggacttcaaactctactcccactaatagctttttgatgacttctagcaagcctcgctaacctcgccttaccccccactattaacctactgggagaactctctgtgctagtaaccacgttctcctgatcaaatatcactctcctacttacaggactcaacatactagtcacagccctatactccctctacatatttaccacaacacaatggggctcactcacccaccacattaacaacataaaaccctcattcacacgagaaaacaccctcatgttcatacacctgtcccccattctcctcctatccctcaaccccgacatcattaccgggttttcctcttgtaaatatagtttaaccaaaacatcagattgtgaatctgacaacagaggcttacgaccccttatttaccgagaaagctcacaagaactgctaactcatgcccccatgtctaacaacatggctttctcaacttttaaaggataacagctatccattggtcttaggccccaaaaattttggtgcaactccaaataaaagtaataaccatgcacactactataaccaccctaaccctgacttccctaattccccccatccttaccaccctcgttaaccctaacaaaaaaaactcatacccccattatgtaaaatccattgtcgcatccacctttattatcagtctcttccccacaacaatattcatgtgcctagaccaagaagttattatctcgaactgacactgagccacaacccaaacaacccagctctccctaagcttcaaactagactacttctccataatattcatccctgtagcattgttcgttacatggtccatcatagaattctcactgtgatatataaactcagacccaaacattaatcagttcttcaaatatctactcattttcctaattaccatactaatcttagttaccgctaacaacctattccaactgttcatcggctgagagggcgtaggaattatatccttcttgctcatcagttgatgatacgcccgagcagatgccaacacagcagccattcaagcaatcctatacaaccgtatcggcgatatcggtttcatcctcgccttagcatgatttatcctacactccaactcatgagacccacaacaaatagcccttctaaacgctaatccaagcctcaccccactactaggcctcctcctagcagcagcaggcaaatcagcccaattaggtctccacccctgactcccctcagccatagaaggccccaccccagtctcagccctactccactcaagcactatagttgtagcaggaatcttcttactcatccgcttccaccccctagcagaaaatagcccactaatccaaactctaacactatgcttaggcgctatcaccactctgttcgcagcagtctgcgcccttacacaaaatgacatcaaaaaaatcgtagccttctccacttcaagtcaactaggactcataatagttacaatcggcatcaaccaaccacacctagcattcctgcacatctgtacccacgccttcttcaaagccatactatttatgtgctccgggtccatcatccacaaccttaacaatgaacaagatattcgaaaaataggaggactactcaaaaccatacctctcacttcaacctccctcaccattggcagcctagcattagcaggaatacctttcctcacaggtttctactccaaagaccacatcatcgaaaccgcaaacatatcatacacaaacgcctgagccctatctattactctcatcgctacctccctgacaagcgcctatagcactcgaataattcttctcaccctaacaggtcaacctcgcttccccacccttactaacattaacgaaaataaccccaccctactaaaccccattaaacgcctggcagccggaagcctattcgcaggatttctcattactaacaacatttcccccgcatcccccttccaaacaacaatccccctctacctaaaactcacagccctcgctgtcactttcctaggacttctaacagccctagacctcaactacctaaccaacaaacttaaaataaaatccccactatgcacattttatttctccaacatactcggattctaccctagcatcacacaccgcacaatcccctatctaggccttcttacgagccaaaacctacccctactcctcctagacctaacctgactagaaaagctattacctaaaacaatttcacagcaccaaatctccacctccatcatcacctcaacccaaaaaggcataattaaactttacttcctctctttcttcttcccactcatcctaaccctactcctaatcacataacctattcccccgagcaatctcaattacaatatatacaccaacaaacaatgttcaaccagtaactactactaatcaacgcccataatcatacaaagcccccgcaccaataggatcctcccgaatcaaccctgacccctctccttcataaattattcagctccctacactattaaagtttaccacaaccaccaccccatcatactctttcacccacagcaccaatcctacctccatcgctaaccccactaaaacactcaccaagacctcaacccctgacccccatgcctcaggatactcctcaatagccatcgctgtagtatatccaaagacaaccatcattccccctaaataaattaaaaaaactattaaacccatataacctcccccaaaattcagaataataacacacccgaccacaccgctaacaatcaatactaaacccccataaataggagaaggcttagaagaaaaccccacaaaccccattactaaacccacactcaacagaaacaaagcatacatcattattctcgcacggactacaaccacgaccaatgatatgaaaaaccatcgttgtatttcaactacaagaacaccaatgaccccaatacgcaaaattaaccccctaataaaactaattaaccactcattcatcgacctccccaccccatccaacatctccgcatgatgaaacttcggctcactccttggcgcctgcctgatcctccaaatcaccacaggactattcctagccatgcactactcaccagacgcctcaaccgccttttcatcaatcgcccacatcactcgagacgtaaattatggctgaatcatccgctaccttcacgccaatggcgcctcaatattctttatctgcctcttcctacacatcggacgaggcctatattacggatcatttctctactcagaaacctgaaacatcggcattatcctcctgcttgcaactatagcaacagccttcataggctatgtcctcccgtgaggccaaatatcattctgaggggccacagtaattacaaacttactatccgccatcccatacattgggacagacctagttcaatgaatctgaggaggctactcagtagacagtcccaccctcacacgattctttacctttcacttcatcttacccttcattattgcagccctagcagcactccacctcctattcttgcacgaaacgggatcaaacaaccccctaggaatcacctcccattccgataaaatcaccttccacccttactacacaatcaaagacgccctcggcttacttctcttccttctctccttaatgacattaacactattctcaccagacctcctaggcgacccagacaattataccctagccaaccccttaaacacccctccccacatcaagcccgaatgatatttcctattcgcctacacaattctccgatccgtccctaacaaactaggaggcgtccttgccctattactatccatcctcatcctagcaataatccccatcctccatatatccaaacaacaaagcataatatttcgcccactaagccaatcactttattgactcctagccgcagacctcctcattctaacctgaatcggaggacaaccagtaagctacccttttaccatcattggacaagtagcatccgtactatacttcacaacaatcctaatcctaataccaactatctccctaattgaaaacaaaatactcaaatgggcctgtccttgtagtataaactaatacaccagtcttgtaaaccggagatgaaaacctttttccaaggacaaatcagagaaaaagtctttaactccaccattagcacccaaagctaagattctaatttaaactattctctgttctttcatggggaagcagatttgggtaccacccaagtattgactcacccatcaacaaccgctatgtatttcgtacattactgccagccaccatgaatattgtacggtaccataaatacttgaccacctgtagtacataaaaacccaatccacatcaaaaccccctccccatgcttacaagcaagtacagcaatcaaccttcaactatcatacatcaactgcaactccaaagccacccctcacccactaggataccaacaaacctacccacccttaacagtacatagtacatgaagccatttaccgtacatagcacattacagtcaaatcccttctcgcccccatggatgacccccctcagataggggtcccttgaccaccatcctccgtgaaatcaatatcccgcacaagagtgctactctcctcgctccgggcccataacacttgggggtagctaaagtgaactgtatccgacatctggttcctacttcagggtcataaagcctaaatagcccacacgttccccttaaataagacatcacgatg

SEQ ID NO: 171 - DNA, 16570 bp, Homo sapiens mitochondrial
  3107: "n" refers to a nucleotide at position 3107 of the Cambridge Reference Sequence (CRS, Anderson et al. 1981 Nature 290:457-465), later determined to be absent from the human mtDNA sequence according to the revised CRS (rCRS, Andrews et al. 1999 Nature Genetics 23:147); "n" therefore represents a single nucleotide deletion at a position corresponding to nucleotide 3107 of SEQ ID NO:1 as provided herein.
gatcacaggtctatcaccctattaaccactcacgggagctctccatgcatttggtattttcgtttggggggtgtgcacgcgatagcattgcgaaacgctggagccggagcaccctatgtcgcagtatctgtctttgattcctgccccatcctgttatttatcgcacctacgttcaatattacaggcgaacatacttactaaagtgtgttaattaattaatgcttgtaggacatagtaataacaattgaatgtctgcacagccgctttccacacagacatcataacaaaaaatttccaccaaaccccccctcccccgccttctggccacagcacttaaacacatctctgccaaaccccaaaaacaaagaaccctaacaccagcctaaccagatttcaaattttatcttttggcggtatgcacttttaacagtcaccccccaactaacacattattttcccctcccactcccatactactaatctcatcaatacaacccccgcccatcctacccagcacacacaccgctgctaaccccataccccgaaccaaccaaaccccaaagacaccccccacagtttatgtagcttacctcctcaaagcaatacactgaaaatgtttagacgggctcacatcaccccataaacaaataggtttggtcctggcctttctattagctcttagtaagattacacatgcaagcatccccgttccagtgagttcaccctctaaatcaccacgatcaaaagggacaagcatcaagcacgcagcaatgcagctcaaaacgcttagcctagccacacccccacgggaaacagcagtgattaacctttagcaataaacgaaagtttaactaagctatactaaccccagggttggtcaatttcgtgccagccaccgcggtcacacgattaacccaagtcaatagaagccggcgtaaagagtgttttagatcacccccctccccaataaagctaaaactcacctgagttgtaaaaaactccagttgacacaaaatagactacgaaagtggctttaacatatctgaacacacaatagctaagacccaaactgggattagataccccactatgcttagccctaaacctcaacagttaaatcaacaaaactgctcgccagaacactacgagccacagcttaaaactcaaaggacctggcggtgcttcatatccctctagaggagcctgttctgtaatcgataaaccccgatcaacctcaccacctcttgctcagcctatataccgccatcttcagcaaaccctgatgaaggctacaaagtaagcgcaagtacccacgtaaagacgttaggtcaaggtgtagcccatgaggtggcaagaaatgggctacattttctaccccagaaaactacgatagcccttatgaaacttaagggtcgaaggtggatttagcagtaaactgagagtagagtgcttagttgaacagggccctgaagcgcgtacacaccgcccgtcaccctcctcaagtatacttcaaaggacatttaactaaaacccctacgcatttatatagaggagacaagtcgtaacatggtaagtgtactggaaagtgcacttggacgaaccagagtgtagcttaacacaaagcacccaacttacacttaggagatttcaacttaacttgaccgctctgagctaaacctagccccaaacccactccaccttactaccagacaaccttagccaaaccatttacccagataaagtataggcgatagaaattgaaacctggcgcaatagatatagtaccgcaagggaaagatgaaaaattataaccaagcataatatagcaaggactaacccctataccttctgcataatgaattaactagaaataactttgcaaggagagccaaagctaagacccccgaaaccagacgagctacctaagaacagctaaaagagcacacccgtctatgtagcaaaatagtgggaagatttataggtagaggcgacaaacctaccgagcctggtgatagctggttgtccaagatagaatcttagttcaactttaaatttgcccacagaaccctctaaatccccttgtaaatttaactgttagtccaaagaggaacagctctttggacactaggaaaaaaccttgtagagagagtaaaaaatttaacacccatagtaggcctaaaagcagccaccaattaagaaagcgttcaagctcaacacccactacctaaaaaatcccaaacatataactgaactcctcacacccaattggaccaatctatcaccctatagaagaactaatgttagtataagtaacatgaaaacattctcctccgcataagcctgcgtcagattaaaacactgaactgacaattaacagcccaatatctacaatcaaccaacaagtcattattaccctcactgtcaacccaacacaggcatgctcataaggaaaggttaaaaaaagtaaaaggaactcggcaaatcttaccccgcctgtttaccaaaaacatcacctctagcatcaccagtattagaggcaccgcctgcccagtgacacatgtttaacggccgcggtaccctaaccgtgcaaaggtagcataatcacttgttccttaaatagggacctgtatgaatggctccacgagggttcagctgtctcttacttttaaccagtgaaattgacctgcccgtgaagaggcgggcatgacacagcaagacgagaagaccctatggagctttaatttattaatgcaaacagtacctaacaaacccacaggtcctaaactaccaaacctgcattaaaaatttcggttggggcgacctcggagcagaacccaacctccgagcagtacatgctaagacttcaccagtcaaagcgaactactatactcaattgatccaataacttgaccaacggaacaagttaccctagggataacagcgcaatcctattctagagtccatatcaacaatagggtttacgacctcgatgttggatcaggacatcccgatggtgcagccgctattaaaggttcgtttgttcaacgattaaagtcctacgtgatctgagttcagaccggagtaatccaggtcggtttctatctacnttcaaattcctccctgtacgaaaggacaagagaaataaggcctacttcacaaagcgccttcccccgtaaatgatatcatctcaacttagtattatacccacacccacccaagaacagggtttgttaagatggcagagcccggtaatcgcataaaacttaaaactttacagtcagaggttcaattcctcttcttaacaacaaaccccatggccaacctcctactcctcattgtacccattctaatcgcaatggcattcctaatgcttaccgaacgaaaaattctaggctatatacaactacgcaaaggccccaacgttgtaggcccctacgggctactacaacccttcgctgacgccataaaactcttcaccaaagagcccctaaaacccgccacatctaccatcaccctctacatcaccgccccgaccttagctctcaccatcgctcttctactatgaacccccctccccatacccaaccccctggtcaacctcaacctaggcctcctatttattctagccacctctagcctagccgtttactcaatcctctgatcagggtgagcatcaaactcaaactacgccctgatcggcgcactgcgagcagtagcccaaacaatctcatatgaagtcaccctagccatcattctactatcaacattactaataagtggctcctttaacctctccacccttatcacaacacaagaacacctctgattactcctgccatcatgacccttggccataatatgatttatctccacactagcagagaccaaccgaacccccttcgaccttgccgaaggggagtccgaactagtctcaggcttcaacatcgaatacgccgcaggccccttcgccctattcttcatagccgaatacacaaacattattataataaacaccctcaccactacaatcttcctaggaacaacatatgacgcactctcccctgaactctacacaacatattttgtcaccaagaccctacttctaacctccctgttcttatgaattcgaacagcatacccccgattccgctacgaccaactcatacacctcctatgaaaaaacttcctaccactcaccctagcattacttatatgatatgtctccatacccattacaatctccagcatcccccctcaaacctaagaaatatgtctgataaaagagttactttgatagagtaaataataggagcttaaacccccttatttctaggactatgagaatcgaacccatccctgagaatccaaaattctccgtgccacctatcacaccccatcctaaagtaaggtcagctaaataagctatcgggcccataccccgaaaatgttggttatacccttcccgtactaattaatcccctggcccaacccgtcatctactctaccatctttgcaggcacactcatcacagcgctaagctcgcactgattttttacctgagtaggcctagaaataaacatgctagcttttattccagttctaaccaaaaaaataaaccctcgttccacagaagctgccatcaagtatttcctcacgcaagcaaccgcatccataatccttctaatagctatcctcttcaacaatatactctccggacaatgaaccataaccaatactaccaatcaatactcatcattaataatcataatggctatagcaataaaactaggaatagccccctttcacttctgagtcccagaggttgcccaaggcacccctctgacatccggcctgcttcttctcacatgacaaaaactagcccccatctcaatcatataccaaatctctccctcactaaacgtaagccttctcctcactctctcaatcttatccatcatagcaggcagttgaggtggattaaaccaaacccagctacgcaaaatcttagcatactcctcaattacccacataggatgaataatagcagttctaccgtacaaccctaacataaccattcttaatttaactatttatattatcctaactactaccgcattcctactactcaacttaaactccagcaccacgaccctactactatctcgtacctgaaacaagctaacatgactaacacccttaattccatccaccctcctctccctaggaggcctgcccccgctaaccggctttttgcccaaatgggccattatcgaagaattcacaaaaaacaatagcctcatcatccccaccatcatagccaccatcaccctccttaacctctacttctacctacgcctaatctactccacctcaatcacactactccccatatctaacaacgtaaaaataaaatgacagtttgaacatacaaaacccaccccattcctccccacactcatcgcccttaccacgctactcctacctatctccccttttatactaataatcttatagaaatttaggttaaatacagaccaagagccttcaaagccctcagtaagttgcaatacttaatttctgtaacagctaaggactgcaaaaccccactctgcatcaactgaacgcaaatcagccactttaattaagctaagcccttactagaccaatgggacttaaacccacaaacacttagttaacagctaagcaccctaatcaactggcttcaatctacttctcccgccgccgggaaaaaaggcgggagaagccccggcaggtttgaagctgcttcttcgaatttgcaattcaatatgaaaatcacctcggagctggtaaaaagaggcctaacccctgtctttagatttacagtccaatgcttcactcagccattttacctcacccccactgatgttcgccgaccgttgactattctctacaaaccacaaagacattggaacactatacctattattcggcgcatgagctggagtcctaggcacagctctaagcctccttattcgagccgagctgggccagccaggcaaccttctaggtaacgaccacatctacaacgttatcgtcacagcccatgcatttgtaataatcttcttcatagtaatacccatcataatcggaggctttggcaactgactagttcccctaataatcggtgcccccgatatggcgtttccccgcataaacaacataagcttctgactcttacctccctctctcctactcctgctcgcatctgctatagtggaggccggagcaggaacaggttgaacagtctaccctcccttagcagggaactactcccaccctggagcctccgtagacctaaccatcttctccttacacctagcaggtgtctcctctatcttaggggccatcaatttcatcacaacaattatcaatataaaaccccctgccataacccaataccaaacgcccctcttcgtctgatccgtcctaatcacagcagtcctacttctcctatctctcccagtcctagctgctggcatcactatactactaacagaccgcaacctcaacaccaccttcttcgaccccgccggaggaggagaccccattctataccaacacctattctgatttttcggccaccctgaagtttatattcttatcctaccaggcttcggaataatctcccatattgtaacttactactccggaaaaaaagaaccatttggatacataggtatggtctgagctatgatatcaattggcttcctagggtttatcgtgtgagcacaccatatatttacagtaggaatagacgtagacacacgagcatatttcacctccgctaccataatcatcgctatccccaccggcgtcaaagtatttagctgactcgccacactccacggaagcaatatgaaatgatctgctgcagtgctctgagccctaggattcatctttcttttcaccgtaggtggcctgactggcattgtattagcaaactcatcactagacatcgtactacacgacacgtactacgttgtagctcacttccactatgtcctatcaataggagctgtatttgccatcataggaggcttcattcactgatttcccctattctcaggctacaccctagaccaaacctacgccaaaatccatttcactatcatattcatcggcgtaaatctaactttcttcccacaacactttctcggcctatccggaatgccccgacgttactcggactaccccgatgcatacaccacatgaaacatcctatcatctgtaggctcattcatttctctaacagcagtaatattaataattttcatgatttgagaagccttcgcttcgaagcgaaaagtcctaatagtagaagaaccctccataaacctggagtgactatatggatgccccccaccctaccacacattcgaagaacccgtatacataaaatctagacaaaaaaggaaggaatcgaaccccccaaagctggtttcaagccaaccccatggcctccatgactttttcaaaaaggtattagaaaaaccatttcataactttgtcaaagttaaattataggctaaatcctatatatcttaatggcacatgcagcgcaagtaggtctacaagacgctacttcccctatcatagaagagcttatcacctttcatgatcacgccctcataatcattttccttatctgcttcctagtcctgtatgcccttttcctaacactcacaacaaaactaactaatactaacatctcagacgctcaggaaatagaaaccgtctgaactatcctgcccgccatcatcctagtcctcatcgccctcccatccctacgcatcctttacataacagacgaggtcaacgatccctcccttaccatcaaatcaattggccaccaatggtactgaacctacgagtacaccgactacggcggactaatcttcaactcctacatacttcccccattattcctagaaccaggcgacctgcgactccttgacgttgacaatcgagtagtactcccgattgaaacccccattcgtataataattacatcacaagacgtcttgcactcatgagctgtccccacattaggcttaaaaacagatgcaattcccggacgtctaaaccaaaccactttcaccgctacacgaccgggggtatactacggtcaatgctctgaaatctgtggagcaaaccacagtttcatgcccatcgtcctagaattaattcccctaaaaatctttgaaatagggcccgtatttaccctatagcaccccctctaccccctctagagcccactgtaaagctaacttagcattaaccttttaagttaaagattaagagaaccaacacctctttacagtgaaatgccccaactaaatactaccgtatggcccaccataattacccccatactccttacactattcctcatcacccaactaaaaatattaaacacaaactaccacctacctccctcaccaaagcccataaaaataaaaaattataacaaaccctgagaaccaaaatgaacgaaaatctgttcgcttcattcattgcccccacaatcctaggcctacccgccgcagtactgatcattctatttccccctctattgatccccacctccaaatatctcatcaacaaccgactaatcaccacccaacaatgactaatcaaactaacctcaaaacaaatgataaccatacacaacactaaaggacgaacctgatctcttatactagtatccttaatcatttttattgccacaactaacctcctcggactcctgccttactcatttacaccaaccacccaactatctataaacctagccatggccatccccttatgagcgggcgcagtgattataggctttcgctctaagattaaaaatgccctagcccacttcttaccacaaggcacacctacaccccttatccccatactagttattatcgaaaccatcagcctactcattcaaccaatagccctggccgtacgcctaaccgctaacattactgcaggccacctactcatgcacctaattggaagcgccaccctagcaatatcaaccattaaccttccctctacacttatcatcttcacaattctaattctactgactatcctagaaatcgctgtcgccttaatccaagcctacgttttcacacttctagtaagcctctacctgcacgacaacacataatgacccaccaatcacatgcctatcatatagtaaaacccagcccatgacccctaacaggggccctctcagccctcctaatgacctccggcctagccatgtgatttcacttccactccataacgctcctcatactaggcctactaaccaacacactaaccatataccaatgatggcgcgatgtaacacgagaaagcacataccaaggccaccacacaccacctgtccaaaaaggccttcgatacgggataatcctatttattacctcagaagtttttttcttcgcaggatttttctgagccttttaccactccagcctagcccctaccccccaattaggagggcactggcccccaacaggcatcaccccgctaaatcccctagaagtcccactcctaaacacatccgtattactcgcatcaggagtatcaatcacctgagctcaccatagtctaatagaaaacaaccgaaaccaaataattcaagcactgcttattacaattttactgggtctctattttaccctcctacaagcctcagagtacttcgagtctcccttcaccatttccgacggcatctacggctcaacattttttgtagccacaggcttccacggacttcacgtcattattggctcaactttcctcactatctgcttcatccgccaactaatatttcactttacatccaaacatcactttggcttcgaagccgccgcctgatactggcattttgtagatgtggtttgactatttctgtatgtctccatctattgatgagggtcttactcttttagtataaatagtaccgttaacttccaattaactagttttgacaacattcaaaaaagagtaataaacttcgccttaattttaataatcaacaccctcctagccttactactaataattattacattttgactaccacaactcaacggctacatagaaaaatccaccccttacgagtgcggcttcgaccctatatcccccgcccgcgtccctttctccataaaattcttcttagtagctattaccttcttattatttgatctagaaattgccctccttttacccctaccatgagccctacaaacaactaacctgccactaatagttatgtcatccctcttattaatcatcatcctagccctaagtctggcctatgagtgactacaaaaaggattagactgaaccgaattggtatatagtttaaacaaaacgaatgatttcgactcattaaattatgataatcatatttaccaaatgcccctcatttacataaatattatactagcatttaccatctcacttctaggaatactagtatatcgctcacacctcatatcctccctactatgcctagaaggaataatactatcgctgttcattatagctactctcataaccctcaacacccactccctcttagccaatattgtgcctattgccatactagtctttgccgcctgcgaagcagcggtgggcctagccctactagtctcaatctccaacacatatggcctagactacgtacataacctaaacctactccaatgctaaaactaatcgtcccaacaattatattactaccactgacatgactttccaaaaaacacataatttgaatcaacacaaccacccacagcctaattattagcatcatccctctactattttttaaccaaatcaacaacaacctatttagctgttccccaaccttttcctccgaccccctaacaacccccctcctaatactaactacctgactcctacccctcacaatcatggcaagccaacgccacttatccagtgaaccactatcacgaaaaaaactctacctctctatactaatctccctacaaatctccttaattataacattcacagccacagaactaatcatattttatatcttcttcgaaaccacacttatccccaccttggctatcatcacccgatgaggcaaccagccagaacgcctgaacgcaggcacatacttcctattctacaccctagtaggctcccttcccctactcatcgcactaatttacactcacaacaccctaggctcactaaacattctactactcactctcactgcccaagaactatcaaactcctgagccaacaacttaatatgactagcttacacaatagcttttatagtaaagatacctctttacggactccacttatgactccctaaagcccatgtcgaagcccccatcgctgggtcaatagtacttgccgcagtactcttaaaactaggcggctatggtataatacgcctcacactcattctcaaccccctgacaaaacacatagcctaccccttccttgtactatccctatgaggcataattataacaagctccatctgcctacgacaaacagacctaaaatcgctcattgcatactcttcaatcagccacatagccctcgtagtaacagccattctcatccaaaccccctgaagcttcaccggcgcagtcattctcataatcgcccacggacttacatcctcattactattctgcctagcaaactcaaactacgaacgcactcacagtcgcatcataatcctctctcaaggacttcaaactctactcccactaatagctttttgatgacttctagcaagcctcgctaacctcgccttaccccccactattaacctactgggagaactctctgtgctagtaaccacgttctcctgatcaaatatcactctcctacttacaggactcaacatactagtcacagccctatactccctctacatatttaccacaacacaatgaggctcactcacccaccacattaacaacataaaaccctcattcacacgagaaaacaccctcatgttcatacacctatcccccattctcctcctatccctcaaccccgacatcattaccgggttttcctcttgtaaatatagtttaaccaaaacatcagattgtgaatctgacaacagaggcttacgaccccttatttaccgagaaagctcacaagaactgctaactcatgcccccatgtctaacaacatggctttctcaacttttaaaggataacagctatccattggtcttaggccccaaaaattttggtgcaactccaaataaaagtaataaccatgcacactactataaccaccctaaccctgacttccctaattccccccatccttaccaccctcgttaaccctaacaaaaaaaactcatacccccattatgtaaaatccattgtcgcatccacctttattatcagtctcttccccacaacaatattcatgtgcctagaccaagaagttattatctcgaactgacactgagccacaacccaaacaacccagctctccctaagcttcaaactagactacttctccataatattcatccctgtagcattgttcgttacatggtccatcatagaattctcactgtgatatataaactcagacccaaacattaatcagttcttcaaatatctactcattttcctaattaccatactaatcttagttaccgctaacaacctattccaactgttcatcggctgagagggcgtaggaattatatccttcttgctcatcagttgatgatacgcccgagcagatgccaacacagcagccattcaagcaatcctatacaaccgtatcggcgatatcggtttcatcctcgccttagcatgatttatcctacactccaactcatgagacccacaacaaatagcccttctaaacgctaatccaagcctcaccccactactaggcctcctcctagcagcagcaggcaaatcagcccaattaggtctccacccctgactcccctcagccatagaaggccccaccccagtctcagccctactccactcaagcactatagttgtagcaggaatcttcttactcatccgcttccaccccctagcagaaaatagcccactaatccaaactctaacactatgcttaggcgctatcaccactctgttcgcagcagtctgcgcccttacacaaaatgacatcaaaaaaatcgtagccttctccacttcaagtcaactaggactcataatagttacaatcggcatcaaccaaccacacctagcattcctgcacatctgtacccacgccttcttcaaagccatactatttatgtgctccgggtccatcatccacaaccttaacaatgaacaagatattcgaaaaataggaggactactcaaaaccatacctctcacttcaacctccctcaccattggcagcctagcattagcaggaatacctttcctcacaggtttctactccaaagaccacatcatcgaaaccgcaaacatatcatacacaaacgcctgagccctatctattactctcatcgctacctccctgacaagcgcctatagcactcgaataattcttctcaccctaacaggtcaacctcgcttccccacccttactaacattaacgaaaataaccccaccctactaaaccccattaaacgcctggcagccggaagcctattcgcaggatttctcattactaacaacatttcccccgcatcccccttccaaacaacaatccccctctacctaaaactcacagccctcgctgtcactttcctaggacttctaacagccctagacctcaactacctaaccaacaaacttaaaataaaatccccactatgcacattttatttctccaacatactcggattctaccctagcatcacacaccgcacaatcccctatctaggccttcttacgagccaaaacctgcccctactcctcctagacctaacctgactagaaaagctattacctaaaacaatttcacagcaccaaatctccacctccatcatcacctcaacccaaaaaggcataattaaactttacttcctctctttcttcttcccactcatcctaaccctactcctaatcacataacctattcccccgagcaatctcaattacaatatatacaccaacaaacaatgttcaaccagtaactactactaatcaacgcccataatcatacaaagcccccgcaccaataggatcctcccgaatcaaccctggcccctctccttcataaattattcagcttcctacactattaaagtttaccacaaccaccaccccatcatactctttcacccacagcaccaatcctacctccatcgctaaccccactaaaacactcaccaagacctcaacccctgacccccatgcctcaggatactcctcaatagccatcgctgtagtatacccaaagacaaccatcattccccctaaataaattaaaaaaactattaaacccatataacctcccccaaaattcagaataataacacacccgaccacaccgctaacaatcaatactaaacccccataaataggagaaggcttagaagaaaaccccacaaaccccattactaaacccacactcaacagaaacaaagcatacatcattattctcgcacggactacaaccacgaccaatgatatgaaaaaccatcgttgtatttcaactacaagaacaccaatgaccccaatacgcaaaattaaccccctaataaaattaattaaccactcattcatcgacctccccaccccatccaacatctccgcatgatgaaacttcggctcactccttggcgcctgcctgatcctccaaatcaccacaggactattcctagccatgcactactcaccagacgcctcaaccgccttttcatcaatcgcccacatcactcgagacgtaaattatggctgaatcatccgctaccttcacgccaatggcgcctcaatattctttatctgcctcttcctacacatcgggcgaggcctatattacggatcatttctctactcagaaacctgaaacatcggcattatcctcctgcttgcaactatagcaacagccttcataggctatgtcctcccgtgaggccaaatatcattctgaggggccacagtaattacaaacttactatccgccatcccatacattgggacagacctagttcaatgaatctgaggaggctactcagtagacagtcccaccctcacacgattctttacctttcacttcatcttgcccttcattattgcagccctagcagcactccacctcctattcttgcacgaaacgggatcaaacaaccccctaggaatcacctcctattccgataaaatcaccttccacccttactacacaatcaaagacgccctcggcttacttctcttccttctctccttaatgacattaacactattctcaccagacctcctaggcgacccagacaattataccctagccaaccccttaaacacccctccccacatcaagcccgaatgatatttcctattcgcctacacaattctccgatccgtccctaacaaactaggaggcgtccttgccctattactatccatcctcatcctagcaataatccccatcctccatatatccaaacaacaaagcataatatttcgcccactaagccaatcactttattgactcctagccgcagacctcctcattctaacctgaatcggaggacaaccagtaagctacccttttaccatcattggacaagtagcatccgtactatacttcacaacaatcctaatcctaataccaactatctccctaattgaaaacaaaatactcaaatgggcctgtccttgtagtataaactaatacaccagtcttgtaaaccggagatgaaaacctttttccaaggacaaatcagagaaaaagtctttaactccaccattagcacccaaagctaagattctaatttaaactattctctgttctttcatggggaagcagatttgggtaccacccaagtattgactcacccatcaacaaccgctatgtatttcgtacattactgccagtcaccatgaatattgtacggtaccataaatacttgaccacctgtagtacataaaaacccaatccacatcaaaaccccctccccatgcttacaagcaagtacagcaatcaaccttcaactatcacacatcaactgcaactccaaagccacccctcacccactaggataccaacaaacctatccacccttaacagtacatagtacataaaaccattcaccgtacatagcacattacagtcaaatcccttctcgcccccatggatgacccccctcagataggggtcccttgaccaccatcctccgtgaaatcaatatcccgcacaagagtgctactctcctcgctccgggcccataacacttgggggtagctaaagtgaactgtatccgacatctggttcctacttcagggccataaagcctaaatagcccacacgttccccttaaataagacatcacgatg

SEQ ID NO: 172 - DNA, 16570 bp, Homo sapiens mitochondrial
  3108: "n" refers to a nucleotide at position 3107 of the Cambridge Reference Sequence (CRS, Anderson et al. 1981 Nature 290:457-465), later determined to be absent from the human mtDNA sequence according to the revised CRS (rCRS, Andrews et al. 1999 Nature Genetics 23:147); "n" therefore represents a single nucleotide deletion at a position corresponding to nucleotide 3107 of SEQ ID NO:1 as provided herein.
gatcacaggtctatcaccctattaaccactcacgggagctctccatgcatttggtattttcgtttggggggtgtgcacgcgatagcattgcgagacgctggagccggagcaccctatgtcgcagtatctgtctttgattcctgccccatcctgttatttatcgcacctacgttcaatattacaggcgaacatacttactaaagtgtgttaattgattaatgcttgtaggacatagtaataacaattgaatgtctgcacagccgctttccacacagacatcataacaaaaaatttccaccaaaccccccctccccccccgcttctggccacagcacttaaacacatctctgccaaaccccaaaaacaaagaaccctaacaccagcctaaccagatttcaaattttatcttttggcggtatgcacttttaacagtcaccccccaactaacacattattttcccctcccactcccatactactaatctcatcaatacaacccccgcccatcctacccagcacacacaccgctgctaaccccgtaccccgaaccaaccaaaccccaaagacaccccccacagtttatgtagcttacctcctcaaagcaatacactgaaaatgtttagacgggctcacatcaccccataaacaaataggtttggtcctggcctttctattagctcttagtaagattacacatgcaagcatccccgttccagtgagttcaccctctaaatcaccacgatcaaaagggacaagcatcaagcacgcagcaatgcagctcaaaacgcttagcctagccacacccccacgggaaacagcagtgattaacctttagcaataaacgaaagtttaactaagctatactaaccccagggttggtcaatttcgtgccagccaccgcggtcacacgattaacccaagtcaatagaagccggcgtaaagagtgttttagatcaccccctccccaataaagctaaaactcacctgagttgtaaaaaactccagttgacacaaaatagactacgaaagtggctttaacatatctgaacacacaatagctaagacccaaactgggattagataccccactatgcttagccctaaacctcaacagttaaatcaacaaaactgctcgccagaacactacgagccacagcttaaaactcaaaggacctggcggtgcttcatatccctctagaggagcctgttctgtaatcgataaaccccgatcaacctcaccacctcttgctcagcctatataccgccatcttcagcaaaccctgatgaaggctacaaagtaagcgcaagtacccacgtaaagacgttaggtcaaggtgtagcccatgaggtggcaagaaatgggctacattttctaccccagaaaactacgatagcccttatgaaacttaagggtcgaaggtggatttagcagtaaactgagagtagagtgcttagttgaacagggccctgaagcgcgtacacaccgcccgtcaccctcctcaagtatacttcaaaggacatttaactaaaacccctacgcatttatatagaggagacaagtcgtaacatggtaagtgtactggaaagtgcacttggacaaaccagagtgtagcttaacacaaagcacccaacttacacttaggagatttcaacttaacttgaccgctctgagctaaacctagccccaaacccactccaccttactaccagacaaccttagccaaaccatttacccagataaagtataggcgatagaaattgaaacctggcgcaatagatatagtaccgcaagggaaagatgaaaaattataaccaagcataatatagcaaggactaacccctataccttctgcataatgaattaactagaaataactttgcaaggagaaccaaagctaagacccccgaaaccagacgagctacctaagaacagctaaaagagcacacccgtctatgtagcaaaatagtgggaagatttataggtagaggcgacaaacctaccgagcctggtgatagctggttgtccaagatagaatcttagttcaactttaaatttgcccacagaaccctctaaatccccttgtaaatttaactgttagtccaaagaggaacagctctttggacactaggaaaaaaccttgtagagagagtaaaaaatttaacacccatagtaggcctaaaagcagccaccaattaagaaagcgttcaagctcaacacccactacctaaaaaatcccaaacatataactgaactcctcacacccaattggaccaatctatcaccctatagaagaactaatgttagtataagtaacatgaaaacattctcctccgcataagcctgcgtcagattaaaacactgaactgacaattaacagcccaatatctacaatcaaccaacaagtcattattaccctcactgtcaacccaacacaggcatgctcataaggaaaggttaaaaaaagtaaaaggaactcggcaaatcttaccccgcctgtttaccaaaaacatcacctctagcatcaccagtattagaggcaccgcctgcccagtgacacatgtttaacggccgcggtaccctaaccgtgcaaaggtagcataatcacttgttccttaaatagggacctgtatgaatggctccacgagggttcagctgtctcttacttttaaccagtgaaattgacctgcccgtgaagaggcgggcatgacacagcaagacgagaagaccctatggagctttaatttattaatgcaaacagtacctaacaaacccacaggtcctaaactaccaaacctgcattaaaaatttcggttggggcgacctcggagcagaacccaacctccgagcagtacatgctaagacttcaccagtcaaagcgaactactatactcaattgatccaataacttgaccaacggaacaagttaccctagggataacagcgcaatcctattctagagtccatatcaacaatagggtttacgacctcgatgttggatcaggacatcccgatggtgcagccgctattaaaggttcgtttgttcaacgattaaagtcctacgtgatctgagttcagaccggagtaatccaggtcggtttctatctacnttcaaattcctccctgtacgaaaggacaagagaaataaggcctacttcacaaagcgccttcccccgtaaatgatatcatctcaacttagtattatacccacacccacccaagaacagggtttgttaagatggcagagcccggtaatcgcataaaacttaaaactttacagtcagaggttcaattcctcttcttaacaacatacccatggccaacctcctactcctcattgtacccattctaatcgcaatggcattcctaatgcttaccgaacgaaaaattctaggctatatacaactacgcaaaggccccaacgttgtaggcccctacgggctactacaacccttcgctgacgccataaaactcttcaccaaagagcccctaaaacccgccacatctaccatcaccctctacatcaccgccccgaccttagctctcaccatcgctcttctactatgaacccccctccccatacccaaccccctggtcaacctcaacctaggcctcctatttattctagccacctctagcctagccgtttactcaatcctctgatcagggtgagcatcaaactcaaactacgccctgatcggcgcactgcgagcagtagcccaaacaatctcatatgaagtcaccctagccatcattctactatcaacattactaataagtggctcctttaacctctccacccttatcacaacacaagaacacctctgattactcctgccatcatgacccttggccataatatgatttatctccacactagcagagaccaaccgaacccccttcgaccttgccgaaggggagtccgaactagtctcaggcttcaacatcgaatacgccgcaggccccttcgccctattcttcatagccgaatacacaaacattattataataaacaccctcaccactacaatcttcctaggaacaacatatgacgcactctcccctgaactctacacaacatattttgtcaccaagaccctacttctaacctccctgttcttatgaattcgaacagcatacccccgattccgctacgaccaactcatacacctcctatgaaaaaacttcctaccactcaccctagcattacttatatgatatgtctccatacccattacaatctccagcatcccccctcaaacctaagaaatatgtctgataaaagagttactttgatagagtaaataataggagcttaaacccccttatttctaggactatgagaatcgaacccatccctgagaatccaaaattctccgtgccacctatcacaccccatcctaaagtaaggtcagctaaataagctatcgggcccataccccgaaaatgttggttatacccttcccgtactaattaatcccctggcccaacccgtcatctactctaccatctttgcaggcacactcatcacagcgctaagctcgcactgattttttacctgagtaggcctagaaataaacatgctagcttttattccagttctaaccaaaaaaataaaccctcgttccacagaagctgccatcaagtatttcctcacgcaagcaaccgcatccataatccttctaatagctatcctcttcaacaatatactctccggacaatgaaccataaccaatactaccaatcaatactcatcattaataatcataatggctatagcaataaaactaggaatagccccctttcacttctgagtcccagaggttgcccaaggcacccctctgacatccggcctgcttcttctcacatgacaaaaactagcccccatctcaatcatataccaaatctctccctcactaaacgtaagccttctcctcactctctcaatcttatccatcatagcaggcagttgaggtggattaaaccaaacccagctacgcaaaatcttagcatactcctcaattacccacataggatgaataatagcagttctaccgtacaaccctaacataaccattcttaatttaactatttatattatcctaactactaccgcattcctactactcaacttaaactccagcaccacgaccctactactatctcgcacctgaaacaagctaacatgactaacacccttaattccatccaccctcctctccctaggaggcctgcccccgctaaccggctttttgcccaaatgggccattatcgaagaattcacaaaaaacaatagcctcatcatccccaccatcatagccaccatcaccctccttaacctctacttctacctacgcctaatctactccacctcaatcacactactccccatatctaacaacgtaaaaataaaatgacagtttgaacatacaaaacccaccccattcctccccacactcatcgcccttaccacgctactcctacctatctccccttttatactaataatcttatagaaatttaggttaaatacagaccaagagccttcaaagccctcagtaagttgcaatacttaatttctgtaacagctaaggactgcaaaaccccactctgcatcaactgaacgcaaatcagccactttaattaagctaagcccttactagaccaatgggacttaaacccacaaacacttagttaacagctaagcaccctaatcaactggcttcaatctacttctcccgccgccgggaaaaaaggcgggagaagccccggcaggtttgaagctgcttcttcgaatttgcaattcaatatgaaaatcacctcggagctggtaaaaagaggcctaacccctgtctttagatttacagtccaatgcttcactcagccattttacctcacccccactgatgttcgccgaccgttgactattctctacaaaccacaaagacattggaacactatacctattattcggcgcatgagctggagtcctaggcacagctctaagcctccttattcgagccgagctgggccagccaggcaaccttctaggtaacgaccacatctacaacgttatcgtcacagcccatgcatttgtaataatcttcttcatagtaatacccatcataatcggaggctttggcaactgactagttcccctaataatcggtgcccccgatatggcgtttccccgcataaacaacataagcttctgactcttacctccctctctcctactcctgctcgcatctgctatagtggaggccggagcaggaacaggttgaacagtctaccctcccttagcagggaactactcccaccctggagcctccgtagacctaaccatcttctccttacacctagcaggtgtctcctctatcttaggggccatcaatttcatcacaacaattatcaatataaaaccccctgccataacccaataccaaacgcccctcttcgtctgatccgtcctaatcacagcagtcctacttctcctatctctcccagtcctagctgctggcatcactatactactaacagaccgcaacctcaacaccaccttcttcgaccccgccggaggaggagaccccattctataccaacacctattctgatttttcggtcaccctgaagtttatattcttatcctaccaggcttcggaataatctcccatattgtaacttactactccggaaaaaaagaaccatttggatacataggtatggtctgagctatgatatcaattggcttcctagggtttatcgtgtgagcacaccatatatttacagtaggaatagacgtagacacacgagcatatttcacctccgctaccataatcatcgctatccccaccggcgtcaaagtatttagctgactcgccacactccacggaagcaatatgaaatgatctgctgcagtgctctgagccctaggattcatctttcttttcaccgtaggtggcctgactggcattgtattagcaaactcatcactagacatcgtactacacgacacgtactacgttgtagctcacttccactatgtcctatcaataggagctgtatttgccatcataggaggcttcattcactgatttcccctattctcaggctacaccctagaccaaacctacgccaaaatccatttcactatcatattcatcggcgtaaatctaactttcttcccacaacactttctcggcctatccggaatgccccgacgttactcggactaccccgatgcatacaccacatgaaacatcctatcatctgtaggctcattcatttctctaacagcagtaatattaataattttcatgatttgagaagccttcgcttcgaagcgaaaagtcctaatagtagaagaaccctccataaacctggagtgactatatggatgccccccaccctaccacacattcgaagaacccgtatacataaaatctagacaaaaaaggaaggaatcgaaccccccaaagctggtttcaagccaaccccatggcctccatgactttttcaaaaaggtattagaaaaaccatttcataactttgtcaaagttaaattataggctaaatcctatatatcttaatggcacatgcagcgcaagtaggtctacaagacgctacttcccctatcatagaagagcttatcacctttcatgatcacgccctcataatcattttccttatctgcttcctagtcctgtatgcccttttcctaacactcacaacaaaactaactaatactaacatctcagacgctcaggaaatagaaaccgtctgaactatcctgcccgccatcatcctagtcctcatcgccctcccatccctacgcatcctttacataacagacgaggtcaacgatccctcccttaccatcaaatcaattggccaccaatggtactgaacctacgagtacaccgactacgggggactaatcttcaactcctacatacttcccccattattcctagaaccaggcgacctgggactccttgacgttgacaatcgagtagtactcccgattgaaacccccattcgtataataattacatcacaagacgtcttgcactcatgagctgtccccacattaggcttaaaaacagatgcaattcccggacgtctaaaccaaaccactttcaccgctacacgaccgggggtatactacggtcaatgctctgaaatctgtggagcaaaccacagtttcatgcccatcgtcctagaattaattcccctaaaaatctttgaaatagggcccgtatttaccctatagcaccccctctaccccctctagagcccactgtaaagctaacttagcattaaccttttaagttaaagattaagagaaccaacacctctttacagtgaaatgccccaactaaatactaccgtatggcccaccataattacccccatactccttacactattcctcatcacccaactaaaaatattaaacacaaactaccacctacctccctcaccaaagcccataaaaataaaaaattataacaaaccctgagaaccaaaatgaacgaaaatctgttcgcttcattcattgcccccacaatcctaggcctacccgccgcagtactgatcattctatttccccctctattgatccccacctccaaatatctcatcaacaaccgactaatcaccacccaacaatgactaatcaaactaacctcaaaacaaatgataaccatacacaacactaaaggacgaacctgatctcttatactagtatccttaatcatttttattgccacaactaacctcctcggactcctgccttactcatttacaccaaccacccaactatctataaacctagccatggccatccccttatgagcgggcgcagtgattataggctttcgctctaagattaaaaatgccctagcccacttcttaccacaaggcacacctacaccccttatccccatactagttattatcgaaaccatcagcctactcattcaaccaatagccctggccgtacgcctaaccgctaacattactgcaggccacctactcatgcacctaattggaagcgccaccctagcaatatcaaccattaaccttccctctacacttatcatcttcacaattctaattctactgactatcctagaaatcgctgtcgccttaatccaagcctacgttttcacacttctagtaagcctctacctgcacgacaacacataatgacccaccaatcacatgcctatcatatagtaaaacccagcccatgacccctaacaggggccctctcagccctcctaatgacctccggcctagccatgtgatttcacttccactccataacgctcctcatactaggcctactaaccaacacactaaccatataccaatgatggcgcgatgtaacacgagaaagcacataccaaggccaccacacaccacctgtccaaaaaggccttcgatacgggataatcctatttattacctcagaagtttttttcttcgcaggatttttctgagccttttaccactccagcctagcccctaccccccaattaggggggcactggcccccaacaggcatcaccccgctaaatcccctagaagtcccactcctaaacacatccgtattactcgcatcaggagtatcaatcacctgagctcaccatagtctaatagaaaacaaccgaaaccaaataattcaagcactgcttattacaattttactgggtctctattttaccctcctacaagcctcagagtacttcgagtctcccttcaccatttccgacggcatctacggctcaacattttttgtagccacaggcttccacggacttcacgtcattattggctcaactttcctcactatctgcttcatccgccaactaatatttcactttacatccaaacatcactttggcttcgaagccgccgcctgatactggcattttgtagatgtggtttgactatttctgtatgtctccatctattgatgagggtcttactcttttagtataaatagtaccgttaacttccaattaactagttttgacaacattcaaaaaagagtaataaacttcgccttaattttaataatcaacaccctcctagccttactactaataattattacattttgactaccacaactcaacggctacatagaaaaatccaccccttacgagtgcggcttcgaccctatatcccccgcccgcgtccctttctccataaaattcttcttagtagctattaccttcttattatttgatctagaaattgccctccttttacccctaccatgagccctacaaacaactaacctgccactaatagttatgtcatccctcttattaatcatcatcctagccctaagtctggcctatgagtgactacaaaaaggattagactgaaccgaattggtatatagtttaaacaaaacgaatgatttcgactcattaaattatgataatcatatttaccaaatgcccctcatttacataaatattatactagcatttaccatctcacttctaggaatactagtatatcgctcacacctcatatcctccctactatgcctagaaggaataatactatcgctgttcattatagctactctcataaccctcaacacccactccctcttagccaatattgtgcctattgccatactagtctttgccgcctgcgaagcagcggtgggcctagccctactagtctcaatctccaacacatatggcctagactacgtacataacctaaacctactccaatgctaaaactaatcgtcccaacaattatattactaccactgacatgactttccaaaaaacacataatttgaatcaacacaaccacccacagcctaattattagcatcatccctctactattttttaaccaaatcaacaacaacctatttagctgttccccaaccttttcctccgaccccctaacaacccccctcctaatactaactacctgactcctacccctcacaatcatggcaagccaacgccacttatccagtgaaccactatcacgaaaaaaactctacctctctatactaatctccctacaaatctccttaattataacattcacagccacagaactaatcatattttatatcttcttcgaaaccacacttatccccaccttggctatcatcacccgatgaggcaaccagccagaacgcctgaacgcaggcacatacttcctattctacaccctagtaggctcccttcccctactcatcgcactaatttacactcacaacaccctaggctcactaaacattctactactcactctcactgcccaagaactatcaaactcctgagccaacaacttaatatgactagcttacacaatagcttttatagtaaagatacctctttacggactccacttatgactccctaaagcccatgtcgaagcccccatcgctgggtcaatagtacttgccgcagtactcttaaaactaggcggctatggtataatacgcctcacactcattctcaaccccctgacaaaacacatagcctaccccttccttgtactatccctatgaggcataattataacaagctccatctgcctacgacaaacagacctaaaatcgctcattgcatactcttcaatcagccacatagccctcgtagtaacagccattctcatccaaaccccctgaagcttcaccggcgcagtcattctcataatcgcccacggacttacatcctcattactattctgcctagcaaactcaaactacgaacgcactcacagtcgcatcataatcctctctcaaggacttcaaactctactcccactaatagctttttgatgacttctagcaagcctcgctaacctcgccttaccccccactattaacctactgggagaactctctgtgctagtaaccacgttctcctgatcaaatatcactctcctacttacaggactcaacatactagtcacagccctatactccctctacatatttaccacaacacaatgaggctcactcacccaccacattaacaacataaaaccctcattcacacgagaaaacaccctcatgttcatacacctatcccccattctcctcctatccctcaaccccgacatcattaccgggttttcctcttgtaaatatagtttaaccaaaacatcagattgtgaatctgacaacagaggcttacgaccccttatttaccgagaaagctcacaagaactgctaactcatgcccccatgtctaacaacatggctttctcaacttttaaaggataacagctatccattggtcttaggccccaaaaattttggtgcaactccaaataaaagtaataaccatgcacactactataaccaccctaaccctgacttccctaattccccccatccttaccaccctcgttaaccctaacaaaaaaaactcatacccccattatgtaaaatccattgtcgcatccacctttattatcagtctcttccccacaacaatattcatgtgcctagaccaagaagttattatctcgaactgacactgagccacaacccaaacaacccagctctccctaagcttcaaactagactacttctccataatattcatccctgtagcattgttcgttacatggtccatcatagaattctcactgtgatatataaactcagacccaaacattaatcagttcttcaaatatctactcattttcctaattaccatactaatcttagttaccgctaacaacctattccaactgttcatcggctgagagggcgtaggaattatatccttcttgctcatcagttgatgacacgcccgagcagatgccaacacagcagccattcaagcaatcctatacaaccgtatcggcgatatcggtttcatcctcgccttagcatgatttatcctacactccaactcatgagacccacaacaaatagcccttctaaacgctaatccaagcctcaccccactactaggcctcctcctagcagcagcaggcaaatcagcccaattaggtctccacccctgactcccctcagccatagaaggccccaccccagtctcagccctactccactcaagcactatagttgtagcaggaatcttcttactcatccgcttccaccccctagcagaaaatagcccactaatccaaactctaacactatgcttaggcgctatcaccactctgttcgcagcagtctgcgcccttacacaaaatgacatcaaaaaaatcgtagccttctccacttcaagtcaactaggactcataatagttacaatcggcatcaaccaaccacacctagcattcctgcacatctgtacccacgccttcttcaaagccatactatttatgtgctccgggtccatcatccacaaccttaacaatgaacaagatattcgaaaaataggaggactactcaaaaccatacctctcacttcaacctccctcaccattggcagcctagcattagcaggaatacctttcctcacaggtttctactccaaagaccacatcatcgaaaccgcaaacatatcatacacaaacgcctgagccctatctattactctcatcgctacctccctgacaagcgcctatagcactcgaataattcttctcaccctaacaggtcaacctcgcttccccacccttactaacattaacgaaaataaccccaccctactaaaccccattaaacgcctggcagccggaagcctattcgcaggatttctcattactaacaacatttcccccgcatcccccttccaaacaacaatccccctctacctaaaactcacagccctcgctgtcactttcctaggacttctaacagccctagacctcaactacctaaccaacaaacttaaaataaaatccccactatgcacattttatttctccaacatactcggattctaccctagcatcacacaccgcacaatcccctatctaggccttcttacgagccaaaacctgcccctactcctcctagacctaacctgactagaaaagctattacctaaaacaatttcacagcaccaaatctccacctccatcatcacctcaacccaaaaaggcataattaaactttacttcctctctttcttcttcccactcatcctaaccctactcctaatcacataacctattcccccgagcaatctcaattacaatatatacaccaacaaacaatgttcaaccagtaactactactaatcaacggccataatcatacaaagcccccgcaccaataggatcctcccgaatcaaccctgacccctctccttcataaattattcagcttcctacactattaaagtttaccacaaccaccaccccatcatactctttcacccacagcaccaatcctacctccatcggtaaccccactaaaacactcaccaagacctcaacccctgacccccatgcctcaggatactcctcaatagccatcgctggagtatatccaaagacaaccatcattccccctaaataaattaaaaaaactattaaacccatataacctcccccaaaattcagaataataacacacccgaccacaccgctaacaatcaatactaaacccccataaataggagaaggcttagaagaaaaccccacaaaccccattactaaacccacactcaacagaaacaaagcatacatcattattctcgcacggactacaaccacgaccaatgatatgaaaaaccatcgttgtatttcaactacaagaacaccaatgaccccaatacgcaaaattaaccccctaataaaattaattaaccactcattcatcgacctccccaccccatccaacatctccgcatgatgaaacttcggctcactccttggcgcctgcctgatcctccaaatcaccacaggactattcctagccatgcactactcaccagacgcctcaaccgccttttcatcaatcgcccacatcactcgagacgtaaattatggctgaatcatccgctaccttcacgccaatggcgcctcaatattctttatctgcctcttcctacacatcgggcgaggcctatattacggatcatttctctactcagaaacctgaaacatcggcattatcctcctgcttgcaactatagcaacagccttcataggctatgtcctcccgtgaggccaaatatcattctgaggggccacagtaattacaaacttactatccgccatcccatacattgggacagacctagttcaatgaatctgaggaggctactcagtagacagtcccaccctcacacgattctttacctttcacttcatcttgcccttcattattgcagccctagcagcactccacctcctattcttgcacgaaacgggatcaaacaaccccctaggaatcacctcccattccgataaaatcaccttccacccttactacacaatcaaagacgccctcggcttacttctcttccttctctccttaatgacattaacactattctcaccagacctcctaggcgacccagacaattataccctagccaaccccttaaacacccctccccacatcaagcccgaatgatatttcctattcgcctacacaattctccgatccgtccctaacaaactaggaggcgtccttgccctattactatccatcctcatcctagcaataatccccatcctccatatatccaaacaacaaagcataatatttcgcccactaagccaatcactttattgactcctagccgcagacctcctcattctaacctgaatcggaggacaaccagtaagctacccttttaccatcattggacaagtagcatccgtactatacttcacaacaatcctaatcctaataccaactatctccctaattgaaaacaaaatactcaaatgggcctgtccttgtagtataaactaatacaccagtcttgtaaaccggagatgaaaacctttttccaaggacaaatcagagaaaaagtctttaactccaccattagcacccaaagctaagattctaatttaaactattctctgttctttcatggggaagcagatttgggtaccacccaagtattgactcacccatcaacaaccgctatgtatttcgtacattactgccagtcaccatgaatattgtacggtaccataaatacttgaccacctgtagtacataaaaacccaatccacatcaaaaccccctccccatgcttacaagcaagtacagcaatcaaccttcaactatcacacatcaactgcaactccaaagccacccctcacccactaggataccaacaaacctattcacccttaacagtacatagtacataaaaccatttaccgtacatggcacattacagtcaaatcccttctcgcccccatggatgacccccctcagataggggtcccttgaccaccatcctccgtgaaatcaatatcccgcacaagagtgctactctcctcgctccgggcccataacacttgggggtagctaaagtgaactgtatccgacatctggttcctacttcagggtcataaaacctaaatagcccacacgttccccttaaataagacatcacgatg

SEQ ID NO: 173 - DNA, 16571 bp, Homo sapiens mitochondrial
  3109: "n" refers to a nucleotide at position 3107 of the Cambridge Reference Sequence (CRS, Anderson et al. 1981 Nature 290:457-465), later determined to be absent from the human mtDNA sequence according to the revised CRS (rCRS, Andrews et al. 1999 Nature Genetics 23:147); "n" therefore represents a single nucleotide deletion at a position corresponding to nucleotide 3107 of SEQ ID NO:1 as provided herein.
gatcacaggtctatcaccctattaaccactcacgggagctctccatgcatttggtattttcgtctggggggtgtgcacgcgatagcattgcgagacgctggagccggagcaccctatgtcgcagtatctgtctttgattcctgccccatcccattatttatcgcacctacgttcaatattacaggcgaacatacctactaaagtgtgttaattaattaatgcttgtaggacataataataacaattgaatgtctgcacagccgctttccacacagacatcataacaaaaaatttccaccaaaccccccctcccccccgcttctggccacagcacttaaacacatctctgccaaaccccaaaaacaaagaaccctaacaccagcctaaccagatttcaaattttatcttttggcggtatgcacttttaacagtcaccccccaactaacacattattttcccctcccactcccatactactaatctcatcaatacaacccccgcccatcctacccagcacacacacaccgctgctaaccccataccccgaaccaaccaaaccccaaagacaccccccacagtttatgtagcttacctcctcaaagcaatacactgaaaatgtttagacgggctcacatcaccccataaacaaataggtttggtcctagcctttctattagctcttagtaagattacacatgcaagcatccccgttccagtgagttcaccctctaaatcaccacgatcaaaagggacaagcatcaagcacgcaacaatgcagctcaaaacgcttagcctagccacacccccacgggaaacagcagtgattaacctttagcaataaacgaaagtttaactaagctatactaaccccagggttggtcaatttcgtgccagccaccgcggtcacacgattaacccaagtcaatagaagccggcgtaaagagtgttttagatcaccccctccccaataaagctaaaactcacctgagttgtaaaaaactccagttgacacaaaataaactacgaaagtggctttaacatatctgaacacacaatagctaagacccaaactgggattagataccccactatgcttagccctaaacctcaacagttaaatcaacaaaactgctcgccagaacactacgagccacagcttaaaactcaaaggacctggcggtgcttcatatccctctagaggagcctgttctgtaatcgataaaccccgatcaacctcaccacctcttgctcagcctatataccgccatcttcagcaaaccctgatgaaggctacaaagtaagcgcaagtacccacgtaaagacgttaggtcaaggtgtagcccatgaggtggcaagaaatgggctacattttctaccccagaaaactacgatagcccttatgaaacttaagggtcgaaggtggatttagcagtaaactgagagtagagtgcttagttgaacagggccctgaagcgcgtacacaccgcccgtcaccctcctcaagtatacttcaaaggacatttaactaaaacccctacgcatttatatagaggagacaagtcgtaacatggtaagtgtactggaaagtgcacttggacgaaccagagtgtagcttaacacaaagcacccaacttacacttaggagatttcaacttaacttgaccgctctgagctaaacctagccccaaacccactccaccttactaccagacaaccttagccaaaccatttacccaaataaagtataggcgatagaaattgaaacctggcgcaatagatatagtaccgcaagggaaagatgaaaaattataaccaagcataatatagcaaggactaacccctataccttctgcataatgaattaactagaaataactttgcaaggagagccaaagctaagacccccgaaaccagacgagctacctaagaacagctaaaagagcacacccgtctatgtagcaaaatagtgggaagatttataggtagaggcgacaaacctaccgagcctggtgatagctggttgtccaagatagaatcttagttcaactttaaatttgcccacagaaccctctaaatccccttgtaaatttaactgttagtccaaagaggaacagctctttggacactaggaaaaaaccttgtagagagagtaaaaaatttaacacccatagtaggcctaaaagcagccaccaattaagaaagcgttcaagctcaacacccactacctaaaaaatcccaaacatataactgaactcctcacacccaattggaccaatctatcaccctatagaagaactaatgttagtataagtaacatgaaaacattctcctccgcataagcctgcgtcagattaaaacactgaactgacaattaacagcccaatatctacaatcaaccaacaagtcattattacccccactgtcaacccaacacaggcatgctcataaggaaaggttaaaaaaagtaaaaggaactcggcaaatcttaccccgcctgtttaccaaaaacatcacctctagcatcaccagtattagaggcaccgcctgcccagtgacacatgtttaacggccgcggtaccctaaccgtgcaaaggtagcataatcacttgttccttaaatagggacctgtatgaatggctccacgagggttcagctgtctcttacttttaaccagtgaaattgacctgcccgtgaagaggcgggcatgacacagcaagacgagaagaccctatggagctttaatttattaatgcaaacagtacctaacaaacccacaggtcctaaactactaaacctgcattaaaaatttcggttggggcgacctcggagcagaacccaacctccgagcagtacatgctaagacttcaccagtcaaagcgaactactatactcaattgatccaataacttgaccaacggaacaagttaccctagggataacagcgcaatcctattctagagtccatatcaacaatagggtttacgacctcgatgttggatcaggacatcccgatggtgcagccgctattaaaggttcgtttgttcaacgattaaagtcctacgtgatctgagttcagaccggagtaatccaggtcggtttctatctacnttcaaattcctccctgtacgaaaggacaagagaaataaggcctacttcacaaagcgccttcccccgtaaatgatatcatctcaacttagtattatacccacacccacccaagaacagggtttgttaagatggcagagcccggtaatcgcataaaacttaaaactttacagtcagaggttcaattcctcttcttaacaacatacccatggccaacctcctactcctcattgtacccattctaatcgcaatggcattcctaatgcttaccgaacgaaaaattctaggctatatacaactacgcaaaggccccaacgttgtaggcccctacgggctactacaacccttcgctgacgccataaaactcttcaccaaagagcccctaaaaccagccacatctaccatcaccctctacatcaccgccccgaccttagctctcaccatcgctcttctactatgaacccccctccccatacccaaccccctggttaacctcaacctaggcctcctatttattctagccacctctagcctagccgtttactcaatcctctgatcagggtgagcatcaaactcaaactacgccctgatcggcgcactgcgagcagtagcccaaacaatctcatatgaagtcaccctagccatcattctactatcaacattactaataagtggctcctttaacctctccacccttatcacaacacaagaacacctctgattactcctgccatcatgacccttggccataatatgatttatctccacactagcagagaccaaccgaacccccttcgaccttgccgaaggggagtccgaactagtctcaggcttcaacatcgaatacgccgcaggccccttcgccctattcttcatagccgaatacacaaacattattataataaacaccctcaccactacaatcttcctaggaacaacatatgacgcactctcccctgaactctacacaacatattttgtcaccaagaccctacttctgacctccctgttcttatgaattcgaacagcatacccccgattccgctacgaccaactcatacacctcctatgaaaaaacttcctaccactcaccctagcattacttatatgatatgtctccatacccattacaatctccagcattccccctcaaacctaagaaatatgtctgataaaagagttactttgatagagtaaataataggagcttaaacccccttatttctaggactatgagaatcgaacccatccctgagaatccaaaattctccgtgccacctatcacaccccatcctaaagtaaggtcagctaaataagctatcgggcccataccccgaaaatgttggttatacccttcccgtactaattaatcccctggcccaacccgtcatctactctaccatctttgcaggcacactcatcacagcgctaagctcgcactgattttttacctgagtaggcctagaaataaacatgctagcttttattccagttctaaccaaaaaaataaaccctcgttccacagaagctgccatcaagtatttcctcacacaagcaaccgcatccataatccttctaatagctatcctcttcaacaatatactctccggacaatgaaccataaccaatactaccaatcaatactcatcattaataatcataatggctatagcaataaaactaggaatagccccctttcacttctgagtcccagaggttacccaaggcacccctctgacatccggcctgcttcttctcacatgacaaaaactagcccccatctcaatcatataccaaatctctccctcactaaacgtaagccttctcctcactctctcaatcttatccatcatagcaggcagttgaggtggattaaaccaaacccagctacgcaaaatcttagcatactcctcaattacccacataggatgaataatagcagttctaccgtacaaccctaacataaccattcttaatttaactatttatattatcctaactactaccgcattcctactactcaacttaaactccagcaccacgaccctactactatctcgcacctgaaacaagctaacatgactaacacccttaattccatccaccctcctctccctaggaggcctgcccccgctaaccggctttttgcccaaatgggccattatcgaagaattcacaaaaaacaatagcctcatcatccccaccatcatagccaccatcaccctccttaacctctacttctacctacgcctaatctactccacctcaatcacactactccccatatctaacaacgtaaaaataaaatgacagtttgaacatacaaaacccaccccattcctccccacactcatcgcccttaccacgctactcctacctatctccccttttatactaataatcttatagaaatttaggttaaatacagaccaagagccttcaaagccctcagtaagttgcaatacttaatttctgtaacagctaaggactgcaaaaccccactctgcatcaactgaacgcaaatcagccactttaattaagctaagcccttactagaccaatgggacttaaacccacaaacacttagttaacagctaagcaccctaatcaactggcttcaatctacttctcccgccgccgggaaaaaaggcgggagaagccccggcaggtttgaagctgcttcttcgaatttgcaattcaatatgaaaatcacctcggagctggtaaaaagaggcctaacccctgtctttagatttacagtccaatgcttcactcagccattttacctcacccccactgatgttcgccgaccgttgactattctctacaaaccacaaagacattggaacactatacctattattcggcgcatgagctggagtcctaggcacagctctaagcctccttattcgagccgagctgggccagccaggcaaccttctaggtaacgaccacatctacaacgttatcgtcacagcccatgcatttgtaataatcttcttcatagtaatacccatcataatcggaggctttggcaactgactagttcccctaataatcggtgcccccgatatggcgtttccccgcataaacaacataagcttctgactcttacctccctctctcctactcctgctcgcatctgctatagtggaggccggagcaggaacaggttgaacagtctaccctcccttagcagggaactactcccaccctggagcctccgtagacctaaccatcttctccttacacctagcaggtgtctcctctatcttaggggccatcaatttcatcacaacaattatcaatataaaaccccctgccataacccaataccaaacgcccctcttcgtctgatccgtcctaatcacagcagtcctacttctcctatctctcccagtcctagctgctggcatcactatactactaacagaccgcaacctcaacaccaccttcttcgaccccgccggaggaggagaccccattctataccaacacctattctgatttttcggtcaccctgaagtttatattcttatcctaccaggcttcggaataatctcccatattgtaacttactactccggaaaaaaagaaccatttggatacataggtatggtctgagctatgatatcaattggcttcctagggtttatcgtgtgagcacaccatatatttacagtaggaatagacgtagacacacgagcatatttcacctccgctaccataatcatcgctatccccaccggcgtcaaagtatttagctgactcgccacactccacggaagcaatatgaaatgatctgctgcagtgctctgagccctaggattcatctttcttttcaccgtaggtggcctgactggcattgtattagcaaactcatcactagacatcgtactacacgacacgtactacgttgtagctcacttccactatgtcctatcaataggagctgtatttgccatcataggaggcttcattcactgatttcccctattctcaggctacaccctagaccaaacctacgccaaaatccatttcactatcatattcatcggcgtaaatctaaccttcttcccacaacactttctcggcctatccggaatgccccgacgttactcggactaccccgatgcatacaccacatgaaatatcctatcatctgtaggttcattcatttctctaacagcagtaatattaataattttcatgatttgagaagccttcgcttcgaagcgaaaagtcctaatagtagaagaaccctccataaacctggagtgactatatggatgccccccaccctaccacacattcgaagaacccgtatacataaaatctagacaaaaaaggaaggaatcgaaccccccaaagctggtttcaagccaaccccatggcctccatgactttttcaaaaagatattagaaaaaccatttcataactttgtcaaagttaaattataggctaaatcctatatatcttaatggcacatgcagcgcaagtaggtctacaagacgctacttcccctatcatagaagagcttatcacctttcatgatcacgccctcataatcattttccttatctgcttcctagtcctgtatgcccttttcctaacactcacaacaaaactaactaatactaacatctcagacgctcaggaaatagagaccgtctgaactatcctgcccgccatcatcctagtcctcatcgccctcccatccctacgcatcctttacataacagacgaggtcaacgatccctcccttaccatcaaatcaattggccaccaatggtactgaacctacgagtacaccgactacggcggactaatcttcaactcctacatacttcccccattattcctagaaccaggggacctgcgactccttgacgttgacaatcgagtagtactcccgattgaagcccccattcgtataataattacatcacaagacgtcttgcactcatgagctgtccccacattaggcttaaaaacagatgcaattcccggacgtctaaaccaaaccactttcaccgctacacgaccgggggtatactacggtcaatgctctgaaatctgtggagcaaaccacagtttcatacccatcgtcctagaattaattcccctaaaaatctttgaaatagggcccgtatttaccctatagcaccccctctaccccctctagagcccactgtaaagctaacttagcattaaccttttaagttaaagattaagagaaccaacacctctttacagtgaaatgccccaactaaatactaccgtatggcccaccataattacccccatactccttacactattcctcatcacccaactaaaaatattaaacacaaactaccacctacctccctcaccaaagcccataaaaataaaaaattataacaaaccctgagaaccaaaatgaacgaaaatctattcgcttcattcattgcccccacaatcctaggcctacccgccgcagtactgatcattctatttccccctctattgatccccacctccaaatatctcatcaacaaccgactaatcaccacccaacaatgactaatcaaactaacctcaaaacaaatgatagccatacacaacactaaaggacgaacctgatctcttatactagtatccttaatcatttttattgccacaactaacctcctcggactcctacctcactcatttacaccaaccacccaactatctataaacctagccatggccatccccttatgagcgggcgcagtgattataggctttcgctctaagattaaaaatgccctagcccacttcttaccacaaggcacacctacaccccttatccccatactagttattatcgaaaccatcagcctactcattcaaccaatagccctggccgtacgcctaaccgctaacattactgcaggccacctactcatgcacctaattggaagcgccaccctagcaatatcaaccattaaccttccctctacacttatcatcttcacaattctaattctactgactatcctagaaatcgctgtcgccttaatccaagcctacgttttcacacttctagtaagcctctacctgcacgacaacacataatgacccaccaatcgcatgcctatcatatagtaaaacccagcccatgacccctaacaggggccctctcagccctcctaatgacctccggcctagccatgtgatttcacttccactccataacgctcctcatactaggcctactaaccaacacactaaccatataccaatgatggcgcgatgtaacacgagaaagcacataccaaggccaccacacaccacctgtccaaaaaggccttcgatacgggataatcctatttattacctcagaagtttttttcttcgcaggatttttctgagccttttaccactccagcctagcccctaccccccaactaggagggcactggcccccaacaggcatcaccccgctaaatcccctagaagtcccactcctaaacacatccgtattactcgcatcaggagtatcaatcacctgagctcaccatagtctaatagaaaacaaccgaaaccaaataattcaagcactgcttattacaattttactgggtctctattttaccctcctacaagcctcagagtacttcgagtctcccttcaccatttccgacggcatctacggctcaacattttttgtagccacaggcttccacggacttcacgtcattattggctcaactttcctcactatctgcttcatccgccaactaatatttcactttacatccaaacatcactttggcttcgaagccgccgcctgatactggcattttgtagatgtggtttgactatttctgtatgtctccatctattgatgagggtcttactcttttagtataaatagtaccgttaacttccaattaactagttttgacaacattcaaaaaagagtaataaacttcgccttaattttaataatcaacaccctcctagccttactactaataatcattacattttgactaccacaactcaacggctacatagaaaaatccaccccttacgagtgcggcttcgaccctatatcccccgcccgcgtccctttctccataaaattcttcttagtagctattaccttcttattatttgatctagaaattgccctccttttacccctaccatgagccctacaaacaactaacctgccactaatagttatgtcatccctcttattaatcatcatcctagccctaagtctggcctatgagtgactacaaaaaggattagactgagccgaattggtatatagtttaaacaaaacgaatgatttcgactcattaaattatgataatcatatttaccaaatgcccctcatttacataaatattatactagcatttaccatctcacttctaggaatactagtatatcgctcacacctcatatcctccctactatgcctagaaggaataatactatcgctgttcattatagctactctcataaccctcaacacccactccctcttagccaatattgtgcctattgccatactagtctttgccgcctgcgaagcagcggtgggcctagccctactagtctcaatctccaacacatatggcctagactacgtacataacctaaacctactccaatgctaaaactaatcgtcccaacaattatattactaccactgacatgactttccaaaaaacacataatttgaatcaacacaaccacccacagcctaattattagcatcatccccctactattttttaaccaaatcaacaacaacctatttagctgttccccaaccttttcctccgaccccctaacaacccccctcctaatactaactacctgactcctacccctcacaatcatggcaagccaacgccacttatccagtgaaccactatcacgaaaaaaactctacctctctatactaatctccctacaaatctccttaattataacattcacagccacagaactaatcatattttatatcttcttcgaaaccacacttatccccaccttggctatcatcacccgatgaggcaaccagccagaacgcctgaacgcaggcacatacttcctattctacaccctagtaggctcccttcccctactcatcgcactaatttacactcacaacaccctaggctcactaaacattctactactcactctcactgcccaagaactatcaaactcctgagccaacaacttaatatgactagcttacacaatagcttttatagtaaagatacctctttacggactccacttatgactccctaaagcccatgtcgaagcccccatcgctgggtcaatagtacttgccgcagtactcttaaaactaggcggctatggtataatacgcctcacactcattctcaaccccctgacaaaacacatagcctaccccttccttgtactatccctatgaggcataattataacaagctccatctgcctacgacaaacagacctaaaatcgctcattgcatactcttcaatcagccacatagccctcgtagtaacagccattctcatccaaaccccctgaagcttcaccggcgcagtcattctcataatcgcccacggacttacatcctcattactattctgcctagcaaactcaaactacgaacgcactcacagtcgcatcataatcctctctcaaggacttcaaactctactcccactaatagctttttgatgacttctagcaagcctcgctaacctcgccttaccccccactattaacctactgggagaactctctgtgctagtaaccacattctcctgatcaaatatcactctcctactcacaggactcaacatactagtcacagccctatactccctctacatatttaccacaacacaatggggctcactcacccaccacattaacaacataaaaccctcattcacacgagaaaacaccctcatgttcatacacctatcccccattctcctcctatccctcaaccccgacatcattaccgggttttcctcttgtaaatatagtttaaccaaaacatcagattgtgaatctgacaacagaggcttacgaccccttatttaccgagaaagctcacaagaactgctaactcatgcccccatgtctaacaacatggctttctcaacttttaaaggataacagctatccattggtcttaggccccaaaaattttggtgcaactccaaataaaagtaataaccatgcacactactataaccaccctaaccctgacttccctaattccccccatccttaccaccctcgttaaccctaacaaaaaaaactcatacccccattatgtaaaatccattgtcgcatccacctttattatcagtctcttccccacaacaatattcatgtgcctagaccaagaagttattatctcgaactgacactgagccacaacccaaacaacccagctctccctaagcttcaaactagactacttctccataatattcatccctgtagcattgttcgttacatgatccatcatagaattctcactgtgatatataaactcagacccaaacattaatcagttcttcaagtatctactcattttcctaattaccatactaatcttagttaccgctaacaacctattccaactgttcatcggctgagagggcgtaggaattatatccttcttgctcatcagttgatgatacgcccgagcagatgccaacacagcagccattcaagcaatcctatacaaccgtatcggcgatatcggtttcatcctcgccttagcatgatttatcctacactccaactcatgagacccacaacaaatagcccttctaaacgctaatccaagcctcaccccactactaggcctcctcctagcagcagcaggcaaatcagcccaattaggtctccacccctgactcccctcagccatagaaggccccaccccagtctcagccctactccactcaagcactatagttgtagcaggaatcttcttactcatccgcttccaccccctagcagaaaatagcccactaatccaaactctaacactatgcttaggcgctatcaccactctgttcgcagcagtctgcgcccttacacaaaatgacatcaaaaaaatcgtagccttctccacttcaagtcaactaggactcataatagttacaatcggcatcaaccaaccacacctagcattcctgcacatctgtacccacgccttcttcaaagccatactatttatgtgctccgggtccatcatccacaaccttaacaatgaacaagatattcgaaaaataggaggactactcaaaaccatacctctcacttcaacctccctcaccattggcagcctagcattagcaggaatacctttcctcacaggtttctactccaaagaccacatcatcgaaaccgcaaacatatcatacacaaacgcctgagccctatctattactctcatcgctacctccctaacaagcgcctatagcactcgaataattcttctcaccctaacaggtcaacctcgcttccctacccttactaacattaacgaaaataaccccaccctactaaaccccattaaacgcctggcagccggaagcctattcgcaggatttctcattactaacaacatttcccccgcatcccccttccaaacaacaatccccctctacctaaaactcacggccctcgctgtcactttcctaggacttctaacagccctagacctcaactacctaaccaacaaacttaaaataaaatccccactatgcacattttatttctccaacatactcggattctaccctagcatcacacaccgcacaatcccctatctaggccttcttacgagccaaaacctgcccctactcctcctagacctaacctgactagaaaagctattacctaaaacaatttcacagcaccaaatctccacctccatcatcacctcaacccaaaaaggcataattaaactttacttcctctctttcttcttcccactcatcctaaccctactcctaatcacataacctattcccccgagcaatctcaattacaatatatacaccaacaaacaatgttcaaccagtaactactactaatcaacgcccataatcatacaaagcccccgcaccaataggatcctcccgaatcaaccctgacccctctccttcataaattattcagcttcctacactattaaagtttaccacaaccaccaccccatcatactctttcacccacagcaccaatcctacctccatcgctaaccccactaaaacactcaccaagacctcaacccctgacccccatgcctcaggatactcctcaatagccatcgctgtagtatatccaaagacaaccatcattccccctaaataaattaaaaaaactattaaacccatataacctcccccaaaattcagaataataacacacccgaccacgccgctaacaatcaatactaaacccccataaatgggagaaggcttagaagaaaaccccacaaaccccattactaaacccacactcaacagaaacaaagcatacatcattattctcgcacggactacaaccacgaccaatgatatgaaaaaccatcgttgtatttcaactacaagaacaccaatgaccccaatacgcaaaattaaccccctaataaaattaattaaccactcattcatcgacctccccaccccatccaacatctccgcatgatgaaacttcggctcactccttggcgcctgcctgatcctccaaatcaccacaggactattcctagccatgcactactcaccagacgcctcaaccgccttttcatcaatcgcccacatcactcgagacgtaaattatggctgaatcatccgctaccttcacgccaatggcgcctcaatattctttatctgcctcttcctacacatcgggcgaggcctatattacggatcatttctctactcagaaacctgaaacatcggcattatcctcctgcttgcaactatagcaacagccttcataggctatgtcctcccgtgaggccaaatatcattctgaggggccacagtaattacaaacttactatccgccatcccatacattgggacagacctagttcaatgaatctgaggaggctactcagtagacagtcccaccctcacacgattctttacctttcacttcatcttacccttcattattgcagccctagcagcactccacctcctattcttgcacgaaacgggatcaaacaaccccctaggaatcacctcccattccgataaaatcaccttccacccttactacacaatcaaagacgccctcggcttacttctcttccttctctccttaatgacattaacactattctcaccagacctcctaggcgacccagacaattataccctagccaaccccttaaacacccctccccacatcaagcccgaatgatatttcctattcgcctacacaattctccgatccgtccctaacaaactaggaggcgtccttgccctattactatccatcctcatcctagcaataatccccatcctccatatatccaaacaacaaagcataatatttcgcccactaagccaatcactttattgactcctagccgcagacctcctcattctaacctgaatcggaggacaaccagtaagctacccctttaccatcattggacaagtagcatccgtactatacttcacaacaatcctaatcctaataccaactatctccctaattgaaaacaaaatactcaaatgggcctgtccttgtagtataaactaatacaccagtcttgtaaaccggagatgaaaacctttttccaaggacaaatcagagaaaaagtctttaactccaccattagcacccaaagctaagattctaatttaaactattctctgttctttcatggggaagcagatttgggtaccacccaagtattgactcacccatcaacaaccgccatgtatttcgtacattactgccagccaccatgaatattgtacggtaccataaatacttgaccacctgtagtacataaaaacccaatccacatcaaaaccccctccccatgcttacaagcaagtacagcaatcaaccttcaactatcacacatcaactgcaactccaaagccacccctcacccactaggatatcaacaaacctacccactcttaacagtacatagtacataaagccatttaccgtacatagcacattacagtcaaatcccttctcgtccccatggatgacccccctcagataggggtcccttgaccaccatcctccgtgaaatcaatatcccgcacaagagtgctactctcctcgctccgggcccataacacttgggggtagctaaagtgaactgtatccgacatctggttcctacttcagggccataaagcctaaatagcccacacgttccccttaaataagacatcacgatg

SEQ ID NO: 174 - DNA, 16570 bp, Homo sapiens mitochondrial
  3108: "n" refers to a nucleotide at position 3107 of the Cambridge Reference Sequence (CRS, Anderson et al. 1981 Nature 290:457-465), later determined to be absent from the human mtDNA sequence according to the revised CRS (rCRS, Andrews et al. 1999 Nature Genetics 23:147); "n" therefore represents a single nucleotide deletion at a position corresponding to nucleotide 3107 of SEQ ID NO:1 as provided herein.
gatcacaggtctatcaccctattaaccactcacgggagctctccatgcatttggtattttcgtctggggggtgtgcacgcgatagcattgcgagacgctggagccggagcaccctatgtcgcagtatctgtctttgattcctgcctcatcccattatttatcgcacctacgttcaatattataggagaccatacctattaaagtgtgttaattaattaatgcttgtaggacataataataacaattaaatgtctgcacagccgctttccacacagacatcataacaaaaaatttccgccaaaccccccctcccccccacttctggccacagcacttaaacacatctctgccaaaccccaaaaacaaagaaccctaacaccagcctaaccagatttcaaattttatcttttggcggtatgcacttttaacagtcaccccccaactaacacattattttcccctcccactcccatactactaatctcatcaatacaacccccgcccatcctacccagcacacacacaccgctgctaaccccataccccgaaccaaccaaaccccaaagacaccccccacagtttatgtagcttacctcctcaaagcaatacactgaaaatgtttagacgggctcacgtcaccccataaacaaataggtttggtcctagcctttctattagctcttagtaagattacacatgcaagcatccccgttccagtgagttcgccctctaaatcaccacgatcaaaagggacaagcatcaagcacgcaacaatgcagctcaaaacgcttagcctagccacacccccacgggaaacagcagtgataaacctttagcaataaacgaaagtttaactaagctatactaaccccagggttggtcaatttcgtgccagccaccgcggtcacacgattaacccaagtcaatagaagccggcgtaaagagtgttttagatcaccccctccccaataaagctaaaactcacctgagttgtaaaaaactccagttgacacaaaataaactacgaaagtggctttaacatatctgaacacacaatagctaagacccaaactgggattagataccccactatgcttagccctaaacctcaacagttaaatcaacaaaactgctcgccagaacactacgagccacagcttaaaactcaaaggacctggcggtgcttcatatccctctagaggagcctgttctgtaatcgataaaccccgatcaacctcaccacctcttgctcagcctatataccgccatcttcagcaaaccctgatgaaggctacaaagtaagcgcaagtacccacgtaaagacgttaggtcaaggtgtagcccatgaggtggcaagaaatgggctacattttctaccccagaaaactacgatagcccttatgaaacttaagggtcgaaggtggatttagcagtaaactgagagtagagtgcttagttgaacagggccctgaagcgcgtacacaccgcccgtcaccctcctcaagtatacttcaaaggacatttaactaaaacccctacgcatttatatagaggagacaagtcgtaacatggtaagtgtactggaaagtgcacttggacgaaccagagtgtagcttaacacaaagcacccaacttacacttaggagatttcaacttaacttgaccgctctgagctaaacctagccccaaacccactccaccttactaccagacaaccttagccaaaccatttacccaaataaagtataggcgatagaaattgaaacctggcgcaatagatatagtaccgcaagggaaagatgaaaaattataaccaagcataatatagcaaggactaacccctataccttctgcataatgaattaactagaaataactttgcaaggagagccaaagctaagacccccgaaaccagacgagctacctaagaacagctaaaagagcacacccgtctatgtagcaaaatagtgggaagatttataggtagaggcgacaaacctaccgagcctggtgatagctggttgtccaagatagaatcttagttcaactttaaatttgcccacagaaccctctaaatccccttgtaaatttaactgttagtccaaagaggaacagctctttggacactaggaaaaaaccttgtagagagagtaaaaaatttaacacccatagtaggcctaaaagcagccaccaattaagaaagcgttcaagctcaacacccactacctaaaaaatcccaaacatataactgaactcctcacacccaattggaccaatctatcaccctatagaagaactaatgttagtataagtaacatgaaaacattctcctccgcataagcctgcgtcagattaaaacactgaactgacaattaacagcccaatatctacaatcaccaacaagtcattattaccctcactgtcaacccaacacaggcatgctcataaggaaaggttaaaaaaagtaaaaggaactcggcaaatcttaccccgcctgtttaccaaaaacatcacctctagcatcaccagtattagaggcaccgcctgcccagtgacacatgtttaacggccgcggtaccctaaccgtgcaaaggtagcataatcacttgttccttaaatagggacctgtatgaatggctccacgagggttcagctgtctcttacttttaaccagtgaaattgacctgcccgtgaagaggcgggcatgacacagcaagacgagaagaccctatggagctttaatttattaatgcaaacaatacctaacaaacccacaggtcctaaactaccaaacctgcattaaaaatttcggttggggcgacctcggagcagaacccaacctccgagcagtacatgctaagacttcaccagtcaaagcgaactaccatactcaattgatccaataacttgaccaacggaacaagttaccctagggataacagcgcaatcctattctagagtccatatcaacaatagggtttacgacctcgatgttggatcaggacatcccgatggtgcagccgctattaaaggttcgtttgttcaacgattaaagtcctacgtgatctgagttcagaccggagtaatccaggtcggtttctatctacnttcaaattcctccctgtacgaaaggacaagagaaataaggcctacttcacaaagcgccttcccccgtaaatgatatcatctcaacttagtattatacccacacccacccaagaacagggtttgttaagatggcagagcccggtaatcgcataaaacttaaaactttacagtcagaggttcaattcctcttcttaacaacatacccatggccaacctcctactcctcattgtacccattctaatcgcaatggcattcctaatgcttaccgaacgaaaaattctaggctatatacaactacgcaaaggccccaacattgtaggcccctacgggctactacaacccttcgctgacgccataaaactcttcaccaaagagcccctaaaacccgccacatctaccatcaccctctacatcaccgccccgaccttagctctcaccatcgctcttctactatgaacccccctccccatacccaaccccctggttaacctcaacctaggcctcctatttattctagccacctctagcctagccgtttactcaatcctctgatcaggatgagcatcaaactcaaactacgccctgatcggcgcactgcgagcagtagcccaaacaatctcatatgaagtcaccctagccatcattctactatcaacattactaataagcggctcctttaacctctccacccttatcacaacacaagaacacctctgattactcctgccatcatgacccttggccataatatgatttatctccacactagcagagaccaaccgaacccccttcgaccttgccgaaggggagtccgaactagtctcaggcttcaacatcgaatacgccgcaggccccttcgccctattcttcatagccgaatacacaaacattattataataaacaccctcaccactacaatcttcctaggaacaacatatgacgcactctcccctgaactctacacaacatattttgtcaccaagaccctacttctgacctccctgttcttatgaattcgaacagcatacccccgattccgctacgaccaactcatacacctcctatgaaaaaacttcctaccactcaccctagcattacttatatgatatgtctccatacccattacaatctccagcattccccctcaaacctaagaaatatgtctgataaaagagttactttgatagagtaaataataggagcttaaacccccttatttctaggactatgagaatcgaacccatccctgagaatccaaaattctccgtgccacctatcacaccccatcctaaagtaaggtcagctaaataagctatcgggcccataccccgaaaatgttggttatacccttcccgtactaattaatcccctggcccaacccgtcatctactctaccatctttgcaggcacactcatcacagcgctaagctcgcactgattttttacctgagtaggcctagaaataaacatgctagcttttattccagttctaaccaaaaaaataaaccctcgttccacagaagctgccatcaagtatttcctcacgcaagcaaccgcatccataatccttctaatagctatcctcttcaacaatatactctccggacaatgaaccataaccaatactaccaatcaatactcatcattaataatcataatggctatagcaataaaactaggaatagccccctttcacttctgagtcccagaggttacccaaggcacccctctgacatccggcctgcttcttctcacatgacaaaaactagcccccatctcaatcatataccaaatctctccctcactaaacgtaagccttctcctcactctctcaatcttatccatcatagcaggcagttgaggtggattaaaccaaacccagctacgcaaaatcttagcatactcctcaattacccacataggatgaataatagcagttctaccgtacaaccctaacataaccattcttaatttaactatttatattatcctaactactaccgcattcctactactcaacttaaactccagcaccacgaccctactactatctcgcacctgaaacaagctaacatgactaacacccttaattccatccaccctcctctccctaggaggcctgcccccgctaaccggctttttgcccaaatgggccattatcgaagaattcacaaaaaacaatagcctcatcatccccaccatcatagccaccatcaccctccttaacctctacttctacctacgcctaatctactccacctcaatcacactactccccatatctaacaacgtaaaaataaaatgacagtttgaacatacaaaacccaccccattcctccccacactcatcgcccttaccacgctactcctacctatctccccttttatactaataatcttatagaaatttaggttaaatacagaccaagagccttcaaagccctcagtaagttgcaatacttaatttctgcaacagctaaggactgcaaaaccccactctgcatcaactgaacgcaaatcagccactttaattaagctaagcccttactagaccaatgggacttaaacccacaaacacttagttaacagctaagcaccctaatcaactggcttcaatctacttctcccgccgccgggaaaaaaggcgggagaagccccggcaggtttgaagctgcttcttcgaatttgcaattcaatatgaaaatcacctcggagctggtaaaaagaggcctaacccctgtctttagatttacagtccaatgcttcactcagccattttacctcacccccactgatgttcgccgaccgttgactattctctacaaaccacaaagacattgggacactatacctattattcggcgcatgagctggagtcctaggcacagctctaagcctccttattcgagccgagctgggccagccaggcaaccttctaggtaacgaccacatctacaacgtcatcgtcacagcccatgcatttgtaataatcttcttcatagtaatacccatcataatcggaggctttggcaactgactaattcccctaataatcggtgcccccgatatggcgtttccccgcataaacaacataagcttctgactcttacctccctctctcctactcctgctcgcatctgctacagtggaggccggagcaggaacaggttgaacagtctaccctcccttagcagggaactactcccaccctggagcctccgtagacctaaccatcttctccttacacctagcaggtgtctcctctatcttaggggccatcaatttcatcacaacaattatcaatataaaaccccctgccataacccaataccaaacgcccctcttcgtctgatccgtcctaatcacagcagtcctacttctcctatctctcccagtcctagctgctggcatcactatactactaacagaccgcaacctcaacaccaccttcttcgaccccgccggaggaggagaccccattctataccaacacctattctgatttttcggtcaccctgaagtttatattcttatcctaccaggcttcggaataatctcccatattgtaacttactactccggaaaaaaagaaccatttggatacataggtatggtctgagctatgatatcaattggcttcctagggtttatcgtgtgagcacaccatatatttacagtaggaatagacgtagacacacgagcatatttcacctccgctaccataatcatcgctatccccaccggcgtcaaagtatttagctgactcgccacactccacggaagcaatatgaaatgatctgctgcagtgctctgagccctaggattcatctttcttttcaccgtaggtggcctgactggcattgtattagcaaactcatcactagacatcgtactacacgacacgtactacgttgtagctcacttccactatgtcctatcaataggggctgtatttgccatcatagggggcttcattcactgatttcccctattctcaggctacaccctagaccaaacctacgccaaaatccatttcgctatcatattcatcggcgtaaatctaactttcttcccacaacactttctcggcctatccggaatgccccgacgttactcggactaccccgatgcatacaccacatgaaatatcctatcatctgtaggctcattcatttctctaacagcagtaatattaataattttcatgatttgagaagccttcgcttcaaagcgaaaagtcctaatagtagaagaaccctccataaacctggagtgactacatggatgccccccaccctaccacacattcgaagaacccgtatacataaaatctagacaaaaaaggaaggaatcgaaccccccaaagctggtttcaagccaaccccatggcctccatgactttttcaaaaagatattagaaaaaccatttcataactttgtcaaagttaaattataggctaaatcctatatatcttaatggcacatgcagcgcaagtaggtctacaagacgctacttcccctatcatagaagagcttatcacctttcatgatcacgccctcataatcattttccttatctgcttcctagtcctgtatgcccttttcctaacactcacaacaaaactaactaatactaacatctcagacgctcaggaaatagaaaccgtctgaactatcctgcccgccatcatcctagtcctcatcgccctcccatccctacgcatcctttacataacagacgaggtcaacgatccctcccttaccatcaaatcaattggccaccaatggtactgaacctacgagtacaccgactacggcggactaatcttcaactcctacatacttcccccattattcctagaaccaggcgacctgggactccttgacgttgacaatcgagtagtactcccgattgaaacccccattcgtataataattacatcacaagacgtcttgcactcatgagctgtccccacattaggcttaaaaacagatgcaattcccggacgtctaaaccaaaccactttcaccgctacacgaccgggggtatactacggtcaatgctctgaaatctgtggagcaaaccacagtttcatgcccatcgtcctagaattaattcccctaaaaatctttgaaatagggcccgtatttaccctatagcaccccctctaccccctctagagcccactgtaaagctaacttagcattaaccttttaagttaaagattaagagaaccaacacctctttacagtgaaatgccccaactaaatactaccgtatggcccaccataattacccccatactccttacactattcctcatcacccaactaaaaatattaaacacaaactaccacttacctccctcaccaaagcccataaaaataaaaaattataacaaaccctgagaaccaaaatgaacgaaaatctgttcgcttcattcattgcccccacaatcctaggcctacccgccgcagtactgatcattctatttccccctctattgatccccacctccaaatatctcatcaacaaccgactaattaccacccaacaatgactaatcaaactaacctcaaaacaaatgatagccatacacaacactaaaggacgaacctgatctcttatactagtatccttaatcatttttattgccacaactaacctcctcgggctcctgcctcactcatttacaccaaccacccaactatctataaacctagccatggccatccccttatgagcgggcgcagtgattataggcttccgctctaagattaaaaatgccctagcccacttcttaccacaaggcacacctacaccccttatccccatactagttattatcgaaaccatcagcctactcattcaaccaatagccctggccgtacgcctaaccgctaacattactgcaggccacctactcatgcacctaattggaagcgccaccctagcaatatcgaccattaaccttccctctacacttatcatcttcacaattctaattctactgactatcctagaaatcgctgtcgccttaatccaagcctacgttttcacacttctagtaagcctctacctgcacgacaacacataatgacccaccaatcacatgcctatcatatagtaaaacccagcccatgacccctaacaggggccctctcagccctcctaatgacctccggcctagccatgtgatttcacttccactccataacgctcctcatactaggcctactaaccaacacactaaccatataccaatgatggcgcgatgtaacacgagaaagcacataccaaggccaccacacaccacctgtccaaaaaggccttcgatacgggataatcctatttattacctcagaagtttttttcttcgcaggatttttctgagccttttaccactccagcctagcccctaccccccaactaggagggcactggcccccaacaggcatcaccccgctaaatcccctagaagtcccactcctaaacacatccgtattactcgcatcaggagtatcaatcacctgagctcaccatagtctaatagaaaacaaccgaaaccaaataattcaagcactgcttattacaattttactgggtctctattttaccctcctacaagcctcagagtacttcgagtctcccttcaccatttccgacggcatctacggctcaacattttttgtagccacaggcttccacggacttcacgtcattattggctcaactttcctcactatctgcttcatccgccaactaatatttcactttacatccaaacatcactttggcttcgaagccgccgcctgatactggcattttgtagatgtggtttgactatttctgtatgtctccatctattgatgagggtcttactcttttagtataaatagtaccgttaacttccaattaaccagttttgacaacattcaaaaaagagtaataaacttcgccctaattttaataatcaacaccctcctagccttactactaataattattacattttgactaccacaactcaacggctacatagaaaaatccaccccttacgagtgcggcttcgaccctatatcccccgcccgcgtccctttctccataaaattcttcttagtagctattaccttcttattatttgatctagaaattgccctccttttacccctaccatgagccctacaaacaactaacctgccactaatagctatgtcatccctcttattaatcatcatcctagccctaagtctggcctatgagtgactacaaaaaggattagactgagccgaattggtatatagtttaaacaaaacgaatgatttcgactcattaaattatgataatcatatttaccaaatgcccctcatttacataaatattatactagcatttaccatctcacttctaggaatactagtatatcgctcacacctcatatcctccctactatgcctagaaggaataatactatcactgttcattatagctactctcataaccctcaacacccactccctcttagccaatattgtgcctattgccatactagtctttgccgcctgcgaagcagcggtaggcctagccctactagtctcaatctccaacacatatggcctagactacgtacataacctaaacctactccaatgctaaaactaatcgtcccaacaattatattgttaccactgacatgactctccaaaaaacacataatttgaatcaacacaaccacccacagcctaattattagcatcatccccctactattttttaaccaaatcaacaacaacctatttagctgttccccaaccttttcctccgaccccctaacaacccccctcctaatactaactacctgactcctacccctcacaatcatggcaagccaacgccacttatccagtgaaccactatcacgaaaaaaactctacctctctatactaatctccctacaaatctccttaattataacattcacagccacagaactaatcatattttatatcttcttcgaaaccacacttatccccaccttggctatcatcacccggtgaggcaaccagccagaacgcctgaacgcaggcacatacttcctattctacaccctagtaggctcccttcccctactcatcgcactaatttacactcacaacaccctaggctcactaaacattctactactcactctcactgcccaagaactatcaaactcctgagccaacaacttaatatgactagcttacacaatagcttttatagtaaagatacctctttacggactccacttatgactccctaaagcccatgtcgaagcccccatcgctgggtcaatagtacttgccgcagtactcttaaaactaggcggctatggtataatacgcctcacactcattctcaaccccctgacaaaacacatagcctaccccttccttgtactatccctatgaggcataattataacaagctccatctgcctacgacaaacagacctaaaatcgctcattgcatactcttcaatcagccacatagccctcgtagtagcagccattctcatccaaaccccctgaagcttcaccggcgcagtcattctcataatcgcccacggacttacatcctcattactattctgcctagcaaactcaaactacgaacgcactcacagtcgcatcataatcctctctcaaggacttcaaactctactcccactaatagctttttgatgacttctagcaagcctcgctaacctcgccttaccccccactattaacctactgggagaactctctgtgctagtaaccacgttctcctgatcaaatatcactctcctacttacaggactcaacatactagtcacagccctatactccctctacatatttaccacaacacaatggggctcactcacccaccacattaacaacataaaaccctcatttacacgagaaaacaccctcatgttcatacacctatcccccattctcctcctatccctcaaccccgacatcattaccgggttttcctcttgtaaatatagtttaaccaaaacatcagattgtgaatctgacaacagaggcttacgaccccttatttaccgagaaagctcacaagaactgctaactcatgcccccatgtctaacaacatggctttctcaacttttaaaggataacagctatccattggtcttaggccccaaaaattttggtgcaactccaaataaaagtaataaccatgcacactactataaccaccctaaccctgacttccctaattccccccatccttaccaccctcgttaaccctaacaaaaaaaactcatacccccattatgtaaaatccattgtcgcatccacctttattatcagtctcttccccacaacaatattcatgtgcctagaccaagaagttattatctcgaactgacactgagccacaacccaaacaacccagctctccctaagcttcaaactagactacttctccataatattcatccctgtagcattgttcgttacatggtccatcatagaattctcactgtgatatataaactcagacccaaacattaatcagttcttcaaatatctactcattttcctaattaccatactaatcttagttaccgctaacaacctattccaactgttcatcggctgagagggcgtaggaattatatccttcttgctcatcagttgatggtacgcccgagcagatgccaacacagcagccattcaagcaatcctatacaaccgtatcggcgatatcggtttcatcctcgccttagcatgatttatcctacactccaactcatgagacccacaacaaatagcccttctaaacgctaatccaagcctcaccccactactaggcctcctcctagcagcagcaggcaaatcagcccaattaggtctccacccctgactcccctcagccatagaaggccccaccccagtctcagccctactccactcaagcactatagttgtagcaggagtcttcttactcatccgcttccaccccctagcagaaaatagcccgctaatccaaactctaacactatgcttaggcgctatcaccactctgttcgcagcagtctgcgcccttacacaaaatgacatcaaaaaaatcgtagccttctccacttcaagtcaactaggactcataatagttacaatcggcatcaaccaaccacacctagcattcctgcacatctgtacccacgccttcttcaaagccatactatttatgtgctccgggtccatcatccacaaccttaacaatgaacaagatattcgaaaaataggaggactactcaaaaccatacctctcacttcaacctccctcaccattggcagcctagcattagcaggaatgcctttcctcacaggtttctattccaaagaccacatcatcgaaaccgcaaacatatcatacacaaacgcctgagccctatctattactctcatcgctacctccctgacaagcgcctatagcactcgaataattcttctcaccctaacaggtcaacctcgcttccctacccttactaacattaacgaaaataaccccaccctactaaaccccattaaacgcctggcagccggaagcctattcgcaggatttctcattactaacaacatttcccccgcatcccccttccaaacaacaatccccctccacctaaaactcacagccctcgctgtcactttcctaggacttctaacagccctagacctcaactacctaaccaacaaacttaaaataaaatccccactatgcacattttatttctccaacatactcggattctaccctagcatcacacaccggacaatcccctatctaggccttcttacgagccaaaacctgcccctactcctcctagaccaaacctgactagaaaagctattacctaaaacaatttcacagcaccaaatctccacctccatcatcacctcaacccaaaaaggcataattaaactttacttcctctctttcttcttcccactcatcctaaccctactcctaatcacataacctattcccccgagcaatctcaattacaacatatacaccaacaaacaatgttcaaccagtaactactactaatcaacgcccataatcatacaaagcccccgcaccaataggatcctcccgaatcaaccctgacccctctccttcataaattattcagcttcctacactattaaagtttaccacaaccaccaccccatcatactctttcacccacagcaccaatcctacctccatcgctaaccccactaaaacactcaccaagacctcaacccctgacccccatgcctcaggatactcctcaatagccatcgctgtagtatatccaaagacaaccatcattccccctaaataaattaaaaaaactattaaacccatataacctcccccaaaattcagaataataacacacccaaccacaccgctaacaatcaatactaaacccccataaataggagaaggcttagaagaaaaccccacaaaccccattactaaacccacactcaacagaaacaaagcatacatcattattctcggacggactacaaccacgaccaatgatatgaaaaaccatcgttgtatttcaactacaagaacaccaatgaccccaatacgcaaaattaaccccctaataaaattaattaaccactcattcatcgacctccccaccccatccaacatctccgcatgatgaaacttcggctcactccttggcgcctgcctgatcctccaaatcaccacaggactattcctagccatgcactattcaccagacgcctcaaccgccttttcatcaatcgcccacatcactcgagacgtaaattatggctgaatcatccgctaccttcacgccaatggcgcctcaatattctttatctgcctcttcctacacatcgggcgaggcctatattacggatcatttctctactcagaaacctgaaacatcggcattatcctcctgcttgcaactatagcaacagccttcataggctatgtcctcccgtgaggccaaatatcattctgaggggccacagtaattacaaacttactatccgccatcccatacattgggacagacctagttcaatgaatctgaggaggctactcagtagacagtcccaccctcacacgattctttacctttcacttcatcttgcccttcattattgcagccctagcagcactccacctcctattcttgcacgaaacgggatcaaacaaccccctaggaatcacctcccattccgataaaatcaccttccacccttactacacaatcaaagacgccctcggcttacttctcttccttctctccttaatgacattaacactattctcaccagacctcctaggcgacccagacaattataccctagccaaccccttaaacacccctccccacatcaagcccgaatgatatttcctattcgcctacacaattctccgatccgtccctaacaaactaggaggcgtccttgccctattactatccatcctcatcctagcaataatccccatcctccatacatccaaacaacaaagcataatatttcgcccactaagccaatcactttattgactcctagccgcagacctcctcattctaacctgaatcggaggacaaccagtaagctacccttttaccatcattggacaagtagcatccgtactatacttcacaacaatcctaatcctaataccaactatctccctaattgaaaacaaaatactcaaatgggcctgtccttgtagtataaactaatacaccagtcttgtaaaccggagatgaaaacctttttccaaggacaaatcagagaaaaagtctttaactccaccattagcacccaaagctaagattctaatttaaactattctctgttctttcatggggaagcagatttgggtaccacccaagtattgactcacccatcaacaaccgctatgtatttcgtacattactgccagccaccatgaatattgtacagtaccataaatacttgaccacctgtagtacataaaaacccaatccacatcaaaaccctccccccatgcttacaagcaagtacagcaatcaaccttcaactatcacacatcaactgcaactccaaagccacccctcccccactaggatatcaacaaaactacctatccttaacagtacatagcacataaagccatttaccgtacatagcacattacagtcaaatcccttcttgtccccatggatgacccccctcagataggggtcccttgaccaccatcctccgtgaaatcaatatcccgcacaagagtgctactctcctcgctccgggcccataacacttgggggtagctaaagtgaactgtatccgacatctggttcctacttcagggccataaagtctaaatagcccacacgttccccttaaataagacatcacgatg

SEQ ID NO: 175 - DNA, 16566 bp, Homo sapiens mitochondrial
  3104: "n" refers to a nucleotide at position 3107 of the Cambridge Reference Sequence (CRS, Anderson et al. 1981 Nature 290:457-465), later determined to be absent from the human mtDNA sequence according to the revised CRS (rCRS, Andrews et al. 1999 Nature Genetics 23:147); "n" therefore represents a single nucleotide deletion at a position corresponding to nucleotide 3107 of SEQ ID NO:1 as provided herein.
gatcacaggtctatcaccctattaaccactcacgggagctctccatgcatttggtattttcgtctggggggtgtgcacgcgatagcattgcgagacgctggagccggagcaccctatgtcgcagtatctgtctttgattcctgcctcatcctattatttatcgcacctacgttcaatattacaggcgaacatacttactaaagtgtgttaattaattaatgcttgtaggacataataataacaattgatgtctgcacagccgctttccacacagacatcataacaaaatttccaccaaaccccccctcccccccgcttctggccacagcacttaaacacatctctgccaaaccccaaaaacaaagaaccctaacaccagcctaaccagatttcaaattttatcttttggcggtatgcacttttaacagtcaccccccaactaacacattattttcccctcccactcccatactactaatctcatcaacacagcccccgcccatcctacccagcacacacaccgctgctaaccccataccccgaaccaaccaaaccccaaagacaccccccacagtttatgtagcttacctcctcaaagcaatacactgaaaatgtttagacgggctcacatcaccccataaacaaataggtttggtcctagcctttctattagctcttagtaagattacacatgcaagcatccccgttccagtgagttcaccctctaaatcaccacgatcaaaagggacaagcatcaagcacgcagcaatgcagctcaaaacgcttagcctagccacacccccacgggaaacagcagtgattaacctttagcaataaacgaaagtttaactaagctatactaaccccagggttggtcaatttcgtgccagccaccgcggtcacacgattaacccaagtcaatagaagccggcgtaaagagtgttttagatcaccccctccccaataaagctaaaactcacctgagttgtaaaaaactccagttgacacaaaatagactacgaaagtggctttaacatatctgaacacacaatagctaagacccaaactgggattagataccccactatgcttagccctaaacctcaacagttaaatcaacaaaactgctcgccagaacactacgagccacagcttaaaactcaaaggacctggcggtgcttcatatccctctagaggagcctgttctgtaatcgataaaccccgatcaacctcaccacctcttgctcagcctatataccgccatcttcagcaaaccctgatgaaggctacaaagtaagcgcaagtacccacgtaaagacgttaggtcaaggtgtagcccatgaggtggcaagaaatgggctacattttctaccccagaaaactacgatagcccttatgaaacttaagggtcgaaggtggatttagcagtaaactgagagtagagtgcttagttgaacagggccctgaagcgcgtacacaccgcccgtcaccctcctcaagtatacttcaaaggacatttaactaaaacccctacgcatttatatagaggagacaagtcgtaacatggtaagtgtactggaaagtgcacttggacgaaccagagtgtagcttaacacaaagcacccaacttacacttaggagatttcaacttaacttgaccgctctgagctaaacctagccccaaacccactccaccttactaccagacaaccttagccaaaccatttacccaaataaagtataggcgatagaaattgaaacctggcgcaatagatatagtaccgcaagggaaagatgaaaaattataaccaagcataatatagcaaggactaacccctataccttctgcataatgaattaactagaaataactttgcaaggagagccaaagctaagacccccgaaaccagacgagctacctaagaacagctaaaagagcacacccgtctatgtagcaaaatagtgggaagatttataggtagaggcgacaaacctaccgagcctggtgatagctggttgtccaagatagaatcttagttcaactttaaatttgcccacagaaccctctaaatccccttgtaaatttaactgttagtccaaagaggaacagctctttggacactaggaaaaaaccttgtagagagagtaaaaaatttaacacccatagtaggcctaaaagcagccaccaattaagaaagcgttcaagctcaacacccactacctaaaaaatcccaaacatataactgaactcctcacacccaattggaccaatctatcaccctatagaagaactaatgttagtataagtaacatgaaaacattctcctccgcataagcctgcgtcagattaaaacactgaactgacaattaacagcccaatatctacaatcaaccaacaagtcattattaccctcactgtcaacccaacacaggcatgctcataaggaaaggttaaaaaaagtaaaaggaactcggcaaatcttaccccgcctgtttaccaaaaacatcacctctagcatcaccagtattagaggcaccgcctgcccagtgacacatgtttaacggccgcggtaccctaaccgtgcaaaggtagcataatcacttgttccttaaatagggacctgtatgaatggctccacgagggttcagctgtctcttacttttaaccagtgaaattgacctgcccgtgaagaggcgggcatgacacagcaagacgagaagaccctatggagctttaatttattaatgcaaacagtacctaacaaacccacaggtcctaaactaccaaacctgcattaaaaatttcggttggggcgacctcggagcagaacccaacctccgagcagtacatgctaagacttcaccagtcaaagcgaactactatactcaattgatccaataacttgaccaacggaacaagttaccctagggataacagcgcaatcctattctagagtccatatcaacaatagggtttacgacctcgatgttggatcaggacatcccgatggtgcagccgctattaaaggttcgtttgttcaacgattaaagtcctacgtgatctgagttcagaccggagtaatccaggtcggtttctatctacnttcaaattcctccctgtacgaaaggacaagagaaataaggcctacttcacaaagcgccttcccccgtaaatgatatcatctcaacttagtattatacccacacccacccaagaacagggtttgttaagatggcagagcccggtaatcgcataaaacttaaaactttacagtcagaggttcaattcctcttcttaacaacatacccatggccaacctcctactcctcattgtacccattctaatcgcaatggcattcctaatgcttaccgaacgaaaaattctaggctatatacaactacgcaaaggccccaacgttgtaggcccctacgggctactacaacccttcgctgacgccataaaactcttcaccaaagagcccctaaaacccgccacatctaccatcaccctctacatcaccgccccgaccttagctctcaccatcgcacttctactatgaacccccctccccatacccaaccccctggtcaacctcaacctaggcctcctatttattctagccacctctagcctagccgtttactcaatcctctgatcagggtgagcatcaaactcaaactacgccctgatcggcgcactgcgagcagtagcccaaacaatctcatatgaagtcaccctagccatcattctactatcaacattactaataagtggctcctttaacctctccacccttatcacaacacaagaacacctctgattactcctgccatcatgacccttggccataatatgatttatctccacactagcagagaccaaccgaacccccttcgaccttgccgaaggggagtccgaactagtctcaggcttcaacatcgaatacgccgcaggccccttcgccctattcttcatagccgaatacacaaacattattataataaacaccctcaccactacaatcttcctaggaacaacatatgacgcactctcccctgaactctacacaacatattttgtcaccaagaccctacttctaacctccctgttcttatgaattcgaacagcatacccccgattccgctacgaccaactcatacacctcctatgaaaaaacttcctaccactcaccctagcattacttatatgatatgtctccatacccattacaatctccagcattccccctcaaacctaagaaatatgtctgataaaagagttactttgatagagtaaataataggagcttaaacccccttatttctaggactatgagaatcgaacccatccctgagaatccaaaattctccgtgccacctatcacaccccatcctaaagtaaggtcagctaaataagctatcgggcccataccccgaaaatgttggttatacccttcccgtactaattaatcccctggcccaacccgtcatctactctaccatctttgcaggcacactcatcacagcgctaagctcgcactgattttttacctgagtaggcctagaaataaacatgctagcttttattccagttctaaccaaaaaaataaaccctcgttccacagaagctgccatcaagtatttcctcacgcaagcaaccgcatccataatccttctaatagctatcctcttcaacaatatactctccgggcaatgaaccataaccaatactaccaatcaatactcatcattaataatcataatggctatagcaataaaactaggaatagccccctttcacttctgagtcccagaggttacccaaggcacccctctgacatccggcctgcttcttctcacatgacaaaaactagcccccatctcaatcatataccaaatctctccctcactaaacgtaagccttctcctcactctctcaatcttatccatcatagcaggcagttgaggtggattaaaccaaacccagctacgcaaaatcttagcatactcctcaattacccacataggatgaataatagcagttctaccgtacaaccctaacataaccattcttaatttaactatttatattatcctaactactaccgcattcctactactcaacttaaactccagcaccacgaccctactactatctcgcacctgaaacaagctaacatgactaacacccttaattccatccaccctcctctccctaggaggcctgcccccgctaaccggctttttgcccaaatgggccattatcgaagaattcacaaaaaacaatagcctcatcatccccaccatcatagccaccatcaccctccttaacctctacttctacctacgcctaatctactccacctcaatcacactactccccatatctaacaacgtaaaaataaaatgacagtttgaacatacaaaacccaccccattcctccccacactcatcgcccttaccacgctactcctacctatctccccttttatactaataatcttatagaaatttaggttaaatacagaccaagagccttcaaagccctcagtaagttgcaatacttaatttctgtaacagctaaggactgcaaaaccccactctgcatcaactgaacgcaaatcagccactttaattaagctaagcccttactagaccaatgggacttaaacccacaaacacttagttaacagctaagcaccctaatcaactggcttcaatctacttctcccgccgccgggaaaaaaggcgggagaagccccggcaggtttgaagctgcttcttcgaatttgcaattcaatatgaaaatcacctcggagctggtaaaaagaggcctaacccctgtctttagatttacagtccaatgcttcactcagccattttacctcgcccccactgatgttcgccgaccgttgactattctctacaaaccacaaagacattggaacactatacctattattcggcgcatgagctggagtcctaggcacagctctaagcctccttattcgagccgagctgggccagccaggcaaccttctaggtaacgaccacatctacaacgttatcgtcacagcccatgcatttgtaataatcttcttcatagtaatacccatcataatcggaggctttggcaactgactagttcccctaataatcggtgcccccgatatggcgtttccccgcataaacaacataagcttctgactcttacctccctctctcctactcctgctcgcatctgctatagtggagaccggagcaggaacaggttgaacagtctaccctcccttagcagggaactactcccaccctggagcctccgtagacctaaccatcttctccttacacctagcaggtgtctcctctatcttaggggccatcaatttcatcacaacaattatcaatataaaaccccctgccataacccaataccaaacgcccctcttcgtctgatccgtcctaatcacagcagtcctacttctcctatctctcccagtcctagctgctggcatcactatactactaacagaccgcaacctcaacaccaccttcttcgaccccgccggaggaggagaccccattctataccaacacctattctgatttttcggtcaccctgaagtttatattcttatcctaccaggcttcggaataatctcccatattgtaacttactactccggaaaaaaagaaccatttggatacataggtatggtctgagctatgatatcaattggcttcctagggtttatcgtgtgagcacaccatatatttacagtaggaatagacgtagacacacgagcatatttcacctccgctaccataatcatcgctatccccaccggcgtcaaagtatttagctgactcgccacactccacggaagcaatatgaaatgatctgctgcagtgctctgagccctaggattcatctttcttttcaccgtaggtggcctgactggcattgtattagcaaactcatcactagacatcgtactacacgacacgtactacgttgtagctcacttccactatgtcctatcaataggagctgtatttgccatcataggaggcttcattcactgatttcccctattctcaggctacaccctagaccaaacctacgccaaaatccatttcactatcatattcatcggcgtaaatctaactttcttcccacaacactttctaggcctatccggaatgccccgacgttactcggactaccccgatgcatacaccacatgaaacatcctatcatctgtaggctcattcatttctctaacagcagtaatattaataattttcatgatttgagaagccttcgcttcgaagcgaaaagtcctaatagtagaagaaccctccataaacctggagtgactatatggatgccccccaccctaccacacattcgaagaacccgtatacataaaatctagacaaaaaaggaaggaatcgaaccccccaaagctggtttcaagccaaccccatggcctccatgactttttcaaaaaggtattagaaaaaccatttcataactttgtcaaagttaaattataggctaaatcctatatatcttaatggcacatgcagcgcaagtaggtctacaagacgctacttcccctatcatagaagagcttatcacctttcatgatcacgccctcataatcattttccttatctgcttcctagtcctgtatgcccttttcctaacactcacaacaaaactaactaatactaacatctcagacgctcaggaaatagaaaccgtctgaactatcctgcccgccatcatcctagtcctcatcgccctcccatccctacgcatcctttacataacagacgaggtcaacgatccctcccttaccatcaaatcaattggccaccaatggtactgaacctacgagtacaccgactacggcggactaatcttcaactcctacatacttcccccattattcctagaaccaggcgacctgggactccttgacgttgacaatcgagtagtactcccgattgaagcccccattcgtataataattacatcacaagacgtcttgcactcatgagctgtccccacattaggcttaaaaacagatgcaattcccggacgtctaaaccaaaccactttcaccgctacacgaccgggggtatactacggtcaatgctctgaaatctgtggagcaaaccacagtttcatgcccatcgtcctagaattaattcccctaaaaatctttgaaatagggcccgtatttaccctatagcaccccctctaccccctctagagcccactgtaaagctaacttagcattaaccttttaagttaaagattaagagaaccaacacctctttacagtgaaatgccccaactaaatactaccgtatggcccaccataattacccccatactccttacactattcctcatcacccaactaaaaatattaaacacaaactaccacctacctccctcaccaaagcccataaaaataaaaaattataacaaaccctgagaaccaaaatgaacgaaaatctgttcgcttcattcattgcccccacaatcctaggcctacccgccacagtactgatcattctatttccccctctattgatccccacctccaaatatctcatcaacaaccgactaatcaccacccaacaatgactaatcaaactaacctcaaaacaaatgatagccatacacaacactaaaggacgaacctgatctcttatactagtatccttaatcatttttattgccacaactaacctcctcggactcctgcctcactcatttacaccaaccacccaactatctataaacctagccatggccatccccttatgagcgggcgcagtgattataggctttcgctctaagattaaaaatgccctagcccacttcttaccacaaggcacacctacaccccttatccccatactagttattatcgaaaccatcagcctactcattcaaccaatagccctggccgtacgcctaaccgctaacattactgcaggccacctactcatgcacctaattggaagcgccaccctagcaatatcaaccattaaccttccctctacacttatcatcttcacaattctaattctactgactatcctagaaatcgctgtcgccttaatccaagcctacgttttcacacttctagtaagcctctacctgcacgacaacacataatgacccaccaatcacatgcctatcatatagtaaaacccagcccatgacccctaacaggggccctctcagccctcctaatgacctccggcctagccatgtgatttcacttccactccataacgctcctcatactaggcctactaaccaacacactaaccatataccaatgatggcgcgatgtaacacgagaaagcacataccaaggccaccacacaccacctgtccaaaaaggccttcgatacgggataatcctatttattacctcagaagtttttttcttcgcaggatttttctgagccttttaccactccagcctagcccctaccccccaactaggggggcactggcccccaacaggcatcaccccgctaaatcccctagaagtcccactcctaaacacatccgtattactcgcatcaggagtatcaatcacctgagctcaccatagtctaatagaaaacaaccgaaaccaaataattcaagcactgcttattacaattttactgggtctctattttaccctcctacaagcctcagagtacttcgagtctcccttcaccatttccgacggcatctacggctcaacattttttgtagccacaggcttccacggacttcacgtcattattggctcaactttcctcactatctgcttcatccgccaactaatatttcactttacatccaaacatcactttggcttcgaagccgccgcctgatactggcattttgtagatgtggtttgactatttctgtatgtctccatctattgatgagggtcttactcttttagtataaatagtaccgttaacttccaattaactagttttgacaacattcaaaaaagagtaataaacttcgccttaattttaataatcaacaccctcctagccttactactaataattattacattttgactaccacaactcaacggctacatagaaaaatccaccccttacgagtgcggcttcgaccctatatcccccgcccgcgtccctttctccataaaattcttcttagtagctattaccttcttattatttgatctagaaattgccctccttttacccctaccatgagccctacaaacaactaacctgccactaatagttatgtcatccctcttattaatcatcatcctagccctaagtctggcctatgagtgactacaaaaaggattagactgggctgaattggtatatagtttaaacaaaacgaatgatttcgactcattaaattatgataatcatatttaccaaatgcccctcatttacataaatattatactagcatttaccatctcacttctaggaatactagtatatcgctcacacctcatatcctccctactatgcctagaaggaataatactatcgctgttcattatagctactctcataaccctcaacacccactccctcttagccaatattgtgcctattgccatactagtctttgccgcctgcgaagcagcggtgggcctagccctactagtctcaatctccaacacatatggcctagactacgtacataacctaaacctactccaatgctaaaactaatcgtcccaacaattatattactaccactgacatgactttccaaaaaacacataatttgaatcaacacaaccacccacagcctaattattagcatcatccccctactattttttaaccaaatcaacaacaacctatttagctgttccccaaccttttcctccgaccccctaacaacccccctcctaatactaactacctgactcctacccctcacaatcatggcaagccaacgccacttatccagtgaaccactatcacgaaaaaaactctacctctctatactaatctccctacaaatctccttaattataacattcacagccacagaactaatcatattttatatcttcttcgaaaccacacttatccccaccttggctatcatcacccgatgaggcaaccagccagaacgcctgaacgcaggcacatacttcctattctacaccctagtaggctcccttcccctactcatcgcactaatttacactcacaacaccctaggctcactaaacattctactactcactctcactgcccaagaactatcaaactcctgagccaacaacttaatatgactagcttacacaatagcttttatagtaaagatacctctttacggactccacttatgactccctaaagcccatgtcgaagcccccatcgctgggtcaatagtacttgccgcagtactcttaaaactaggcggctatggtataatacgcctcacactcattctcaaccccctgacaaaacacatagcctaccccttccttgtactatccctatgaggcataattataacaagctccatctgcctacgacaaacagacctaaaatcgctcattgcatactcttcaatcagccacatagccctcgtagtaacagccattctcatccaaaccccctgaagcttcaccggcgcagtcattctcataatcgcccacggacttacatcctcattactattctgcctagcaaactcaaactacgaacgcactcacagtcgcatcataatcctctctcaaggacttcaaactctactcccactaatagctttttgatgacttctagcaagcctcgctaacctcgccttaccccccactattaacctactgggagaactctctgtgctagtaaccacattctcctgatcaaatatcactctcctacttacaggactcaacatactagtcacagccctatactccctctacatatttaccacaacacaatggggctcactcacccaccacattaacaacataaaaccctcattcacacgagaaaacaccctcatgttcatacacctatcccccattctcctcctatccctcaaccccgacatcattaccgggttttcctcttgtaaatatagtttaaccaaaacatcagattgtgaatctgacaacagaggcttacgaccccttatttaccgagaaagctcacaagaactgctaactcatgcccccatgtctaacaacatggctttctcaacttttaaaggataacagctatccattggtcttaggccccaaaaattttggtgcaactccaaataaaagtaataaccatgcacactactataaccaccctaaccctgacttccctaattccccccatccttaccaccctcgttaaccctaacaaaaaaaactcatacccccattatgtaaaatccattgtcgcatccacctttattatcagtctcttccccacaacaatattcatgtgcctagaccaagaagttattatctcgaactgacactgagccacaacccaaacaacccagctctccctaagcttcaaactagactacttctccataatattcatccctgtagcattgttcgttacatggtccatcatagaattctcactgtgatatataaactcagacccaaacattaatcagttcttcaaatatctactcattttcctaattaccatactaatcttagttaccgctaacaacctattccaactgttcatcggctgagagggcgtaggaattatatccttcttgctcatcagttgatgatacgcccgagcagatgccaacacagcagccattcaagcaatcctatacaaccgtatcggcgatatcggtttcatcctcgccttagcatgatttatcctacactccaactcatgagacccacaacaaatagcccttctaaacgctaatccaagcctcaccccactactaggcctcctcctagcagcagcaggcaaatcagcccaattaggtctccacccctgactcccctcagccatagaaggccccaccccagtctcagccctactccactcaagcactatagttgtagcaggaatcttcttactcatccgcttccaccccctagcagaaaatagcccactaatccaaactctaacactatgcttaggcgctatcaccactctgttcgcagcagtctgcgcccttacacaaaatgacatcaaaaaaatcgtagccttctccacttcaagtcagctaggactcataatagttacaatcggcatcaaccaaccacacctagcattcctgcacatctgtacccacgccttcttcaaagccatactatttatgtgctccgggtccatcatccacaaccttaacaatgaacaagatattcgaaaaataggaggactactcaaaaccatacctctcacttcaacctccctcaccattggcagcctagcattagcaggaatacctttcctcacaggtttctactccaaagaccacatcatcgaaaccgcaaacatatcatacacaaacgcctgagccctatctattactctcatcgctacctccctgacaagcgcctatagcactcgaataattcttctcaccctaacaggtcaacctcgcttccccacccttactaacattaacgaaaataaccccaccctactaaaccccattaaacgcctggcagccggaagcctattcgcaggatttctcattactaacaacatttcccccgcatcccccttccaaacaacaatccccctctacctaaaactcacagccctcgctatcactttcctaggacttctaacagccctagacctcaactacctaaccaacaaacttaaaataaaatccccactatgcacattttatttctccaacatactcggattctaccctagcatcacacaccgcacaatcccctatctaggccttcttacgagccaaaacctgcccctactcctcctagacctaacctgactagaaaagctattacctaaaacaatttcacagcaccaaatctccacctccatcatcacctcaacccaaaaaggcataattaaactttacttcctctctttcttcttcccactcatcctaaccctactcctaatcacataacctattcccccgagcaatctcaattacaatatatacaccaacaaacaatgttcaaccagtaactaccactaatcaacgcccataatcatacaaagcccccgcaccaataggatcctcccgaatcaaccctgacccctctccttcataaattattcagcttcctacactactaaagtttaccacaaccaccaccccatcatactctttcacccacagcaccaatcctacctccatcgctaaccccactaaaacactcaccaagacctcaacccctgacccccatgcctcaggatactcctcaatagccatcgctgtagtatatccaaagacaaccatcattccccctaaataaattaaaaaaactattaaacccatataacctcccccaaaattcagaataataacacacccgaccacaccgctaacaatcaatactaaacccccataaataggagaaggcttagaagaaaaccccacaaaccccattactaaacccacactcaacagaaacaaagcatacatcattattctcgcacggactacaaccacgaccaatgatatgaaaaaccatcgttgtatttcaactacaagaacaccaatgaccccaatacgcaaaattaaccccctaataaaactaattaaccactcattcatcgacctccccaccccatccaacatctccgcatgatgaaacttcggctcactccttggcgcctgcctgatcctccaaatcaccacaggactattcctagccatgcactactcaccagacgcctcaaccgccttttcatcaatcgcccacatcactcgagacgtaaattatggctgaatcatccgctaccttcacgccaatggcgcctcaatattctttatctgcctcttcctacacatcggacgaggcctatattacggatcatttctctactcagaaacctgaaacatcggcattatcctcctgcttgcaactatagcaacagccttcataggctatgtcctcccgtgaggccaaatatcattctgaggggccacagtaattacaaacttactatccgccatcccatacattgggacagacctagttcaatgaatctgaggaggctactcagtagacagtcccaccctcacacgattctttacctttcacttcatcttacccttcattattgcagccctagcagcactccacctcctattcttgcacgaaacgggatcaaacaaccccctaggaatcacctcccattccgataaaatcaccttccacccttactacacaatcaaagacgccctcggcttacttctcttccttctctccttaatgacattaacactattctcacctgacctcctaggcgacccagacaattataccctagccaaccccttaaacacccctccccacatcaagcccgaatgatatttcctattcgcctacacaattctccgatccgtccctaacaaactaggaggcgtccttgccctattactatccatcctcatcctagcaataatccccatcctccatatatccaaacaacaaagcataatatttcgcccactaagccaatcactttattgactcctagccgcagacctcctcattctaacctgaatcggaggacaaccagtaagctacccttttaccatcattggacaagtagcatccgtactatacttcacaacaatcctaatcctaataccaactatctccctaattgaaaacaaaatactcaaatgggcctgtccttgtagtataaactaatacaccagtcttgtaaaccggagatgaaaacctttttccaaggacaaatcagagaaaaagtctttaactccaccattagcacccaaagctaagattctaatttaaactattctctgttctttcatggggaagcagatttgggtaccacccaagtattgactcacccatcaacaaccgctatgtatttcgtacattactgccagccaccatgaatattgtacggtaccataaatacttgaccacctgtagtacataaaaacccaatccacatcagaaccccctccccatgcttacaagcaagtacagcaatcaaccttcaactatcacacatcaactgcaactccaaagccacccctcacccactaggataccaacaaacctacccaccctcaacagtacatagtacataaagccattcatcgtacatagcacattacagtcaaatcccttctcgcccccatggatgacccccctcagataggggtcccttgaccaccatcctccgtgaaatcaatatcccgcacaagagtgctactctcctcgctccgggcccataacacttgggggtagctaaagtgaactgtatccgacatctggttcctacttcagggtcataaagcctaaatagcccacacgttccccttaaataagacatcacgatg

(The sequence listing continues in the following parts.)

What is claimed is:

1. A method for determining the mitochondrial haplogroup of a subject, comprising:
determining, in a biological sample comprising mitochondrial DNA from a subject, the presence of at least one mitochondrial single nucleotide polymorphism that is associated with a mitochondrial haplogroup.

2. The method of claim 1 wherein the mitochondrial DNA is amplified.

3. The method of claim 1 wherein at least one mitochondrial single nucleotide polymorphism that is associated with a mitochondrial haplogroup is present in a mitochondrial DNA region selected from the group consisting of a D-loop, a mitochondrial rRNA gene, a mitochondrial NADH dehydrogenase gene, a mitochondrial tRNA gene, a mitochondrial cytochrome c oxidase gene, a mitochondrial ATP synthase gene and a mitochondrial cytochrome b gene.

4. The method of claim 1 wherein at least one mitochondrial single nucleotide polymorphism that is associated with a mitochondrial haplogroup is selected from the group consisting of a haplogroup-specific polymorphism and a haplogroup-associated polymorphism, wherein a mitochondrial single nucleotide polymorphism that is haplogroup-specific is, for a halogroup selected from the group consisting of A, B, C, D, E, H, I, J, K, L1, L2, L3, T, U, V, W and X, located at a nucleotide that corresponds to a nucleotide position of SEQ ID NO:1 that is selected from the group consisting of:

| Nucleotide | | HAPLO- |
|---|---|---|
| Position | GENE | GROUP |
| 64 | D-LOOP | A |
| 235 | D-LOOP | A |
| 663 | 12S rRNA | A |
| 1598 | 12S rRNA | A |
| 1736 | 16S rRNA | A |
| 3316 | ND1 | A |
| 4248 | ND1 | A |
| 4824 | ND2 | A |
| 4970 | ND2 | A |
| 6308 | COI | A |
| 7112 | COI | A |
| 7724 | COII | A |
| 8794 | ATPase6 | A |
| 11314 | ND4 | A |
| 12468 | ND5 | A |
| 12811 | ND5 | A |
| 13855 | ND5 | A |
| 14364 | ND6 | A |
| 16111 | D-LOOP | A |
| 16290 | D-LOOP | A |
| 16319 | D-LOOP | A |
| 827 | 12S rRNA | B |
| 3547 | ND1 | B |
| 4820 | ND2 | B |
| 4977 | ND2 | B |
| 6023 | COI | B |
| 6216 | COI | B |
| 6413 | COI | B |
| 6473 | COI | B |
| 6755 | COI | B |
| 7241 | COI | B |
| 9950 | COIII | B |
| 11177 | ND4 | B |
| 15535 | CYT B | B |
| 16217 | D-LOOP | B |
| 249 | D-LOOP | C |
| 289 | D-LOOP | C |
| 290 | D-LOOP | C |
| 3552 | ND1 | C |
| 4715 | ND2 | C |
| 7196 | COI | C |
| 7694 | COII | C |
| 8584 | ATPase6 | C |
| 9545 | COIII | C |
| 10454 | tRNA-R | C |
| 12642 | ND5 | C |
| 12978 | ND5 | C |
| 14318 | ND6 | C |
| 15487 | CYT B | C |
| 15930 | tRNA-T | C |
| 2092 | 16S rRNA | D |
| 4883 | ND2 | D |
| 5178 | ND2 | D |
| 8414 | ATPase8 | D |
| 11593 | ND4 | D |
| 14668 | ND6 | D |
| 3027 | 16S rRNA | E |
| 3705 | ND1 | E |
| 4491 | ND2 | E |
| 7598 | COII | E |
| 239 | D-LOOP | H |
| 456 | D-LOOP | H |
| 477 | D-LOOP | H |
| 951 | 12S rRNA | H |
| 961 | 12S rRNA | H |
| 3277 | tRNA-L | H |
| 3333 | ND1 | H |
| 3591 | ND1 | H |
| 3796 | ND1 | H |
| 3915 | ND1 | H |
| 3992 | ND1 | H |
| 4024 | ND1 | H |
| 4310 | tRNA-l | H |
| 4336 | tRNA-Q | H |
| 4531 | ND2 | H |
| 4727 | ND2 | H |
| 4745 | ND2 | H |
| 4772 | ND2 | H |
| 4793 | ND2 | H |
| 5004 | ND2 | H |
| 6365 | COI | H |
| 6776 | COI | H |
| 6869 | COI | H |
| 7013 | COI | H |
| 8269 | COII | H |
| 8448 | ATPase8 | H |
| 8602 | ATPase6 | H |
| 8803 | ATPase6 | H |
| 8839 | ATPase6 | H |
| 8843 | ATPase6 | H |
| 8898 | ATPase6 | H |
| 9123 | ATPase6 | H |
| 9150 | ATPase6 | H |
| 9380 | COIII | H |
| 9804 | COIII | H |
| 10044 | tRNA-G | H |
| 11353 | ND4 | H |
| 11560 | ND4 | H |
| 12579 | ND5 | H |
| 13404 | ND5 | H |
| 13680 | ND5 | H |
| 13759 | ND5 | H |
| 14125 | ND5 | H |
| 14350 | ND6 | H |
| 14365 | ND6 | H |
| 14470 | ND6 | H |
| 14582 | ND6 | H |
| 14872 | CYT B | H |
| 15466 | CYT B | H |
| 15789 | CYT B | H |
| 15808 | CYT B | H |
| 15833 | CYT B | H |
| 16162 | D-LOOP | H |
| 16293 | D-LOOP | H |
| 199 | D-LOOP | I |
| 250 | D-LOOP | I |
| 3447 | ND1 | I |
| 3990 | ND1 | I |
| 4529 | ND2 | I |
| 6734 | COI | I |
| 8616 | ATPase6 | I |
| 9947 | COIII | I |
| 10034 | tRNA-G | I |
| 10238 | ND3 | I |
| 11065 | ND4 | I |
| 12501 | ND5 | I |
| 13780 | ND5 | I |
| 15758 | CYT B | I |
| 16391 | D-LOOP | I |
| 228 | D-LOOP | J |
| 295 | D-LOOP | J |
| 462 | D-LOOP | J |
| 2158 | 16S rRNA | J |
| 2387 | 16S rRNA | J |
| 3394 | ND1 | J |
| 5198 | ND2 | J |
| 5633 | tRNA-A | J |
| 6464 | COI | J |
| 6554 | COI | J |
| 6671 | COI | J |
| 7476 | tRNA-S | J |
| 7711 | COII | J |
| 10084 | ND3 | J |
| 10172 | ND3 | J |
| 10192 | ND3 | J |
| 10499 | ND4L | J |
| 10598 | ND4L | J |
| 10685 | ND4L | J |
| 11377 | ND4 | J |
| 12127 | ND4 | J |
| 12570 | ND5 | J |
| 12612 | ND5 | J |
| 13281 | ND5 | J |
| 13681 | ND5 | J |
| 13879 | ND5 | J |
| 13933 | ND5 | J |
| 14569 | ND6 | J |
| 15679 | CYT B | J |
| 15812 | CYT B | J |
| 16069 | D-LOOP | J |
| 16092 | D-LOOP | J |
| 16261 | D-LOOP | J |
| 114 | D-LOOP | K |
| 497 | D-LOOP | K |
| 593 | tRNA-F | K |
| 1189 | 12S rRNA | K |
| 2217 | 16S rRNA | K |
| 2483 | 16S rRNA | K |
| 3480 | ND1 | K |
| 4295 | tRNA-I | K |
| 4561 | ND2 | K |
| 5814 | tRNA-C | K |
| 6260 | COI | K |
| 9006 | ATPase6 | K |
| 9055 | ATPase6 | K |
| 9698 | COIII | K |
| 9716 | COIII | K |
| 9962 | COIII | K |
| 10289 | ND3 | K |
| 10550 | ND4L | K |
| 10978 | ND4 | K |
| 11299 | ND4 | K |
| 11470 | ND4 | K |
| 11485 | ND4 | K |
| 11840 | ND4 | K |
| 11869 | ND4 | K |
| 11923 | ND4 | K |
| 12954 | ND5 | K |
| 13135 | ND5 | K |
| 13740 | ND5 | K |
| 13967 | ND5 | K |
| 14002 | ND5 | K |
| 14037 | ND5 | K |
| 14040 | ND5 | K |
| 14167 | ND6 | K |
| 15884 | CYT B | K |
| 15946 | tRNA-T | K |
| 16224 | D-LOOP | K |
| 16234 | D-LOOP | K |
| 16463 | D-LOOP | K |
| 185 | D-LOOP | L1 |
| 186 | D-LOOP | L1 |
| 189 | D-LOOP | L1 |
| 236 | D-LOOP | L1 |
| 247 | D-LOOP | L1 |
| 297 | D-LOOP | L1 |
| 357 | D-LOOP | L1 |
| 710 | 12S rRNA | L1 |
| 825 | 12S rRNA | L1 |
| 1048 | 12S rRNA | L1 |
| 1738 | 16S rRNA | L1 |
| 2245 | 16S rRNA | L1 |
| 2395 | 16S rRNA | L1 |
| 2758 | 16S rRNA | L1 |
| 2768 | 16S rRNA | L1 |
| 2885 | 16S rRNA | L1 |
| 3308 | ND1 | L1 |
| 3516 | ND1 | L1 |
| 3666 | ND1 | L1 |
| 3693 | ND1 | L1 |
| 3777 | ND1 | L1 |
| 3796 | ND1 | L1 |
| 3843 | ND1 | L1 |
| 4312 | tRNA-I | L1 |
| 4586 | ND2 | L1 |
| 5036 | ND2 | L1 |
| 5393 | ND2 | L1 |
| 5442 | ND2 | L1 |
| 5603 | tRNA-A | L1 |
| 5655 | tRNA-A | L1 |
| 5913 | COI | L1 |
| 5951 | COI | L1 |
| 6071 | COI | L1 |
| 6150 | COI | L1 |
| 6185 | COI | L1 |
| 6253 | COI | L1 |
| 6548 | COI | L1 |
| 6827 | COI | L1 |
| 6989 | COI | L1 |
| 7055 | COI | L1 |
| 7076 | COI | L1 |
| 7146 | COI | L1 |
| 7337 | COI | L1 |
| 7389 | COI | L1 |
| 7867 | COII | L1 |
| 8248 | COII | L1 |
| 8428 | ATPase8 | L1 |
| 8655 | ATPase6 | L1 |
| 8784 | ATPase6 | L1 |
| 8877 | ATPase6 | L1 |
| 9042 | ATPase6 | L1 |
| 9072 | ATPase6 | L1 |
| 9347 | COIII | L1 |
| 9755 | COIII | L1 |
| 9818 | COIII | L1 |
| 10321 | ND3 | L1 |
| 10586 | ND4L | L1 |
| 10589 | ND4L | L1 |
| 10664 | ND4L | L1 |
| 10688 | ND4L | L1 |
| 10792 | ND4 | L1 |
| 10793 | ND4 | L1 |
| 10810 | ND4 | L1 |
| 11176 | ND4 | L1 |
| 11641 | ND4 | L1 |
| 11654 | ND4 | L1 |
| 11899 | ND4 | L1 |
| 12007 | ND4 | L1 |
| 12049 | ND4 | L1 |
| 12519 | ND5 | L1 |
| 12720 | ND5 | L1 |
| 12810 | ND5 | L1 |
| 13149 | ND5 | L1 |
| 13276 | ND5 | L1 |
| 13485 | ND5 | L1 |
| 13506 | ND5 | L1 |
| 13789 | ND5 | L1 |
| 13880 | ND5 | L1 |
| 13980 | ND5 | L1 |
| 14000 | ND5 | L1 |
| 14148 | ND5 | L1 |
| 14178 | ND6 | L1 |
| 14203 | ND6 | L1 |
| 14308 | ND6 | L1 |
| 14560 | ND6 | L1 |
| 14769 | CYT B | L1 |
| 14911 | CYT B | L1 |
| 15115 | CYT B | L1 |
| 15136 | CYT B | L1 |
| 16148 | D-LOOP | L1 |
| 16187 | D-LOOP | L1 |
| 16188 | D-LOOP | L1 |
| 16230 | D-LOOP | L1 |
| 16264 | D-LOOP | L1 |
| 16265 | D-LOOP | L1 |
| 16360 | D-LOOP | L1 |
| 16527 | D-LOOP | L1 |
| 143 | D-LOOP | L2 |
| 1442 | 12S rRNA | L2 |
| 1706 | 16S rRNA | L2 |
| 2332 | 16S rRNA | L2 |
| 2358 | 16S rRNA | L2 |
| 2416 | 16S rRNA | L2 |
| 2789 | 16S rRNA | L2 |
| 3495 | ND1 | L2 |
| 3918 | ND1 | L2 |
| 4158 | ND1 | L2 |
| 4185 | ND1 | L2 |
| 4370 | tRNA-Q | L2 |
| 4767 | ND2 | L2 |
| 5027 | ND2 | L2 |
| 5285 | ND2 | L2 |
| 5331 | ND2 | L2 |
| 5581 | tRNA-W | L2 |
| 5744 | NON-CODING | L2 |
| 6713 | COI | L2 |
| 7175 | COI | L2 |
| 7274 | COI | L2 |
| 7624 | COII | L2 |
| 7771 | COII | L2 |
| 8080 | COII | L2 |
| 8206 | COII | L2 |
| 8387 | ATPase8 | L2 |
| 8541 | ATPase8 | L2 |
| 8790 | ATPase6 | L2 |
| 8925 | ATPase6 | L2 |
| 9221 | COIII | L2 |
| 10115 | ND3 | L2 |
| 11944 | ND4 | L2 |
| 12236 | tRNA-S | L2 |
| 12630 | ND5 | L2 |
| 12693 | ND5 | L2 |
| 12948 | ND5 | L2 |
| 13803 | ND5 | L2 |
| 14059 | ND5 | L2 |
| 14544 | ND6 | L2 |
| 14566 | ND6 | L2 |
| 14599 | ND6 | L2 |
| 15110 | CYT B | L2 |
| 15217 | CYT B | L2 |
| 15229 | CYT B | L2 |
| 15236 | CYT B | L2 |
| 15244 | CYT B | L2 |
| 15391 | CYT B | L2 |
| 15629 | CYT B | L2 |
| 15945 | tRNA-T | L2 |
| 16114 | D-LOOP | L2 |
| 16213 | D-LOOP | L2 |
| 16309 | D-LOOP | L2 |
| 16390 | D-LOOP | L2 |
| 200 | D-LOOP | L3 |
| 2000 | 16S rRNA | L3 |
| 3438 | ND1 | L3 |
| 3450 | ND1 | L3 |
| 5773 | tRNA-C | L3 |
| 6524 | COI | L3 |
| 6587 | COI | L3 |
| 6680 | COI | L3 |
| 7424 | COI | L3 |
| 7618 | COII | L3 |
| 8616 | ATPase6 | L3 |
| 8618 | ATPase6 | L3 |
| 8650 | ATPase6 | L3 |
| 9554 | COIII | L3 |
| 10086 | ND3 | L3 |
| 10373 | ND3 | L3 |
| 10667 | ND4L | L3 |
| 10819 | ND4 | L3 |
| 11800 | ND4 | L3 |
| 13101 | ND5 | L3 |
| 13886 | ND5 | L3 |
| 13914 | ND5 | L3 |
| 14152 | ND6 | L3 |
| 14212 | ND6 | L3 |
| 14284 | ND6 | L3 |
| 15099 | CYT B | L3 |
| 15311 | CYT B | L3 |
| 15670 | CYT B | L3 |
| 15824 | CYT B | L3 |
| 15942 | tRNA-T | L3 |
| 15944 | tRNA-T | L3 |
| 16124 | D-LOOP | L3 |
| 16327 | D-LOOP | L3 |
| 930 | 12S rRNA | T |
| 2141 | 16S rRNA | T |
| 2850 | 16S rRNA | T |
| 4688 | ND2 | T |
| 4917 | ND2 | T |
| 5277 | ND2 | T |
| 6489 | COI | T |
| 7022 | COI | T |
| 8572 | ATPase6 | T |
| 8697 | ATPase6 | T |
| 9117 | ATPase6 | T |
| 9899 | COIII | T |
| 10463 | tRNA-R | T |
| 11242 | ND4 | T |
| 11812 | ND4 | T |
| 12633 | ND5 | T |
| 13368 | ND5 | T |
| 13758 | ND5 | T |
| 13965 | ND5 | T |
| 14233 | ND6 | T |
| 14687 | tRNA-E | T |
| 14905 | CYT B | T |
| 15028 | CYT B | T |
| 15274 | CYT B | T |
| 15607 | CYT B | T |
| 15928 | tRNA-T | T |
| 16163 | D-LOOP | T |
| 16182 | D-LOOP | T |
| 16186 | D-LOOP | T |
| 16294 | D-LOOP | T |
| 16296 | D-LOOP | T |
| 16324 | D-LOOP | T |
| 988 | 12S rRNA | U |
| 1700 | 16S rRNA | U |
| 1721 | 16S rRNA | U |
| 2294 | 16S rRNA | U |
| 3116 | 16S rRNA | U |
| 3197 | 16S rRNA | U |
| 3348 | ND1 | U |
| 3720 | ND1 | U |
| 3849 | ND1 | U |
| 4553 | ND2 | U |
| 4646 | ND2 | U |
| 4703 | ND2 | U |
| 4732 | ND2 | U |
| 4811 | ND2 | U |
| 5319 | ND2 | U |
| 5390 | ND2 | U |
| 5495 | ND2 | U |
| 5656 | NON-CODING | U |
| 5999 | COI | U |
| 6045 | COI | U |
| 6047 | COI | U |
| 6146 | COI | U |
| 6518 | COI | U |
| 6629 | COI | U |
| 6719 | COI | U |
| 7109 | COI | U |
| 7385 | COI | U |
| 7768 | COII | U |
| 7805 | COII | U |
| 8473 | ATPase8 | U |
| 9070 | ATPase6 | U |
| 9266 | COIII | U |
| 9477 | COIII | U |
| 9667 | COIII | U |
| 10506 | ND4L | U |
| 10876 | ND4 | U |
| 10907 | ND4 | U |
| 10927 | ND4 | U |
| 11197 | ND4 | U |
| 11332 | ND4 | U |
| 11732 | ND4 | U |
| 12346 | ND5 | U |
| 12557 | ND5 | U |
| 12618 | ND5 | U |
| 13020 | ND5 | U |
| 13617 | ND5 | U |
| 13637 | ND5 | U |
| 14139 | ND5 | U |
| 14179 | ND6 | U |
| 14182 | ND6 | U |
| 14620 | ND6 | U |
| 14793 | CYT B | U |
| 14866 | CYT B | U |
| 15191 | CYT B | U |
| 15218 | CYT B | U |
| 15454 | CYT B | U |
| 15693 | CYT B | U |
| 15907 | tRNA-T | U |
| 16051 | D-LOOP | U |
| 16256 | D-LOOP | U |
| 16270 | D-LOOP | U |
| 16399 | D-LOOP | U |
| 4580 | ND2 | V |
| 15904 | tRNA-T | V |
| 194 | D-LOOP | W |
| 1243 | 12S rRNA | W |
| 1406 | 12S rRNA | W |
| 3505 | ND1 | W |
| 6528 | COI | W |
| 8994 | ATPase6 | W |
| 10097 | ND3 | W |
| 11674 | ND4 | W |
| 11947 | ND4 | W |
| 12414 | ND5 | W |
| 13263 | ND5 | W |
| 15775 | CYT B | W |
| 15884 | CYT B | W |
| 16292 | D-LOOP | W |
| 225 | D-LOOP | X |
| 226 | D-LOOP | X |
| 6371 | COI | X |
| 8393 | ATPase8 | X |
| 8705 | ATPase6 | X |
| 14470 | ND6 | X |
| 15927 | tRNA-T | X |
| −73 | D-LOOP | not present in [H] |
| −7028 | COI | not present in [H] |
| −11698 | ND4 | not present in [H] |
| and | CYT B | not present in [H] |
| 14766, | | |

and wherein a mitochondrial single nucleotide polymorphism that is haplogroup-associated is, for a haplogroup selected from the group consisting of A, B, C, D, E, H, I, J, K, L1, L2, L3, T, U, W and X, located at a nucleotide that corresponds to a nucleotide position of SEQ ID NO:1 that is selected from the group consisting of:

| Nucleotide | | |
|---|---|---|
| Position | Gene | Haplogroup |
| 16362 | D-LOOP | A, C, D, E, H, L3 |
| 12705 | ND5 | A, C, D, E, I, L1, L2, L3, W, X |
| 1888 | 16S rRNA | A, C, T |
| 13708 | ND5 | A, J, X |
| 8027 | COII | A, L1 |
| 153 | D-LOOP | A, X |
| 207 | D-LOOP | B, I, L2, W |
| 13590 | ND5 | B, L2 |
| 9449 | COIII | B, L3 |
| 499 | D-LOOP | B, U |
| 16325 | D-LOOP | C, D |
| 10400 | ND3 | C, D, E |
| 14783 | CYT B | C, D, E |
| 10398 | ND3 | C, D, E, I, J, K, L1, L2, L3 |
| 15043 | CYT B | C, D, E, I, T |
| 489 | D-LOOP | C, D, E, J |
| 8701 | ATPase6 | C, D, E, L1, L2, L3 |
| 9540 | COIII | C, D, E, L1, L2, L3 |
| 10873 | ND4 | C, D, E, L1, L2, L3 |
| 15301 | CYT B | C, D, E, L2, L3 |
| 11914 | ND4 | C, K, L1, L2 |
| 16298 | D-LOOP | C, V |
| 3010 | 16S rRNA | D, H, J, U |
| 16311 | D-LOOP | H, K, L1, L3 |
| 93 | D-LOOP | H, L1 |
| 16304 | D-LOOP | H, T |
| 16291 | D-LOOP | H, U |
| 16356 | D-LOOP | H, U |
| 16482 | D-LOOP | H, U |
| 15924 | tRNA-T | I, K, U |
| 10915 | ND4 | I, L1 |
| 204 | D-LOOP | I, L2, W |
| 8251 | COII | I, W |
| 1719 | 16S rRNA | I, X |
| 14798 | CYT B | J, K |
| 15257 | CYT B | J, K |
| 5460 | ND2 | J, L1, W |
| 185 | D-LOOP | J, L3 |
| 11002 | ND4 | J, L3 |
| 4216 | ND1 | J, T |
| 11251 | ND4 | J, T |
| 15452 | CYT B | J, T |
| 16126 | D-LOOP | J, T |
| 9548 | COIII | J, U |
| 13934 | ND5 | J, U |
| 5231 | ND2 | K, L1 |
| 709 | 12S rRNA | K, L1, T, W |
| 1811 | 16S rRNA | K, U |
| 11467 | ND4 | K, U |
| 12308 | tRNA-L | K, U |
| 12372 | ND5 | K, U |
| 182 | D-LOOP | L1, L2 |
| 198 | D-LOOP | L1, L2 |
| 769 | 12S rRNA | L1, L2 |
| 1018 | 12S rRNA | L1, L2 |
| 3594 | ND1 | L1, L2 |
| 4104 | ND1 | L1, L2 |
| 7256 | COI | L1, L2 |
| 7521 | tRNA-D | L1, L2 |
| 13650 | ND5 | L1, L2 |
| 16278 | D-LOOP | L1, L2, L3, X |
| 189 | D-LOOP | L1, L3 |
| 2352 | 16S rRNA | L1, L3 |
| 13105 | ND5 | L1, L3 |
| 5046 | ND2 | L1, W |
| 6152 | COI | L2, U |
| 15784 | CYT B | L2, U, W |
| 5147 | ND2 | L3, T |
| 6221 | COI | L3, X |
| 5426 | ND2 | T, U |
| 13734 | ND5 | T, U |
| and | ND5 | T, X |
| 13966. | | |

5. The method of claim 1 wherein the mitochondrial single nucleotide polymorphism that is associated with a mitochondrial haplogroup is a haplogroup-specific polymorphism that is present in members of only one haplogroup selected from the group consisting of A, B, C, D, E, H, I, J, K, L1, L2, L3, T, U, V, W and X, located at a nucleotide that corresponds to a nucleotide position of SEQ ID NO:1 that is selected from the group consisting of:

| Nucleotide | | HAPLO- |
|---|---|---|
| Position | GENE | GROUP |
| 64 | D-LOOP | A |
| 235 | D-LOOP | A |
| 663 | 12S rRNA | A |
| 1598 | 12S rRNA | A |
| 1736 | 16S rRNA | A |
| 3316 | ND1 | A |
| 4248 | ND1 | A |
| 4824 | ND2 | A |
| 4970 | ND2 | A |
| 6308 | COI | A |
| 7112 | COI | A |
| 7724 | COII | A |
| 8794 | ATPase6 | A |
| 11314 | ND4 | A |
| 12468 | ND5 | A |
| 12811 | ND5 | A |
| 13855 | ND5 | A |
| 14364 | ND6 | A |
| 16111 | D-LOOP | A |
| 16290 | D-LOOP | A |
| 16319 | D-LOOP | A |
| 827 | 12S rRNA | B |
| 3547 | ND1 | B |
| 4820 | ND2 | B |
| 4977 | ND2 | B |
| 6023 | COI | B |
| 6216 | COI | B |
| 6413 | COI | B |
| 6473 | COI | B |
| 6755 | COI | B |
| 7241 | COI | B |
| 9950 | COIII | B |
| 11177 | ND4 | B |
| 15535 | CYT B | B |
| 16217 | D-LOOP | B |
| 249 | D-LOOP | C |
| 289 | D-LOOP | C |
| 290 | D-LOOP | C |
| 3552 | ND1 | C |
| 4715 | ND2 | C |
| 7196 | COI | C |
| 7694 | COII | C |
| 8584 | ATPase6 | C |
| 9545 | COIII | C |
| 10454 | tRNA-R | C |
| 12642 | ND5 | C |
| 12978 | ND5 | C |
| 14318 | ND6 | C |
| 15487 | CYT B | C |
| 15930 | tRNA-T | C |
| 2092 | 16S rRNA | D |
| 4883 | ND2 | D |
| 5178 | ND2 | D |
| 8414 | ATPase8 | D |
| 11593 | ND4 | D |
| 14668 | ND6 | D |
| 3027 | 16S rRNA | E |
| 3705 | ND1 | E |
| 4491 | ND2 | E |
| 7598 | COII | E |
| 239 | D-LOOP | H |
| 456 | D-LOOP | H |
| 477 | D-LOOP | H |
| 951 | 12S rRNA | H |
| 961 | 12S rRNA | H |
| 3277 | tRNA-L | H |
| 3333 | ND1 | H |
| 3591 | ND1 | H |
| 3796 | ND1 | H |
| 3915 | ND1 | H |
| 3992 | ND1 | H |
| 4024 | ND1 | H |
| 4310 | tRNA-I | H |
| 4336 | tRNA-Q | H |
| 4531 | ND2 | H |
| 4727 | ND2 | H |
| 4745 | ND2 | H |
| 4772 | ND2 | H |
| 4793 | ND2 | H |
| 5004 | ND2 | H |
| 6365 | COI | H |
| 6776 | COI | H |
| 6869 | COI | H |
| 7013 | COI | H |
| 8269 | COII | H |
| 8448 | ATPase8 | H |
| 8602 | ATPase6 | H |
| 8803 | ATPase6 | H |
| 8839 | ATPase6 | H |
| 8843 | ATPase6 | H |
| 8898 | ATPase6 | H |
| 9123 | ATPase6 | H |
| 9150 | ATPase6 | H |
| 9380 | COIII | H |
| 9804 | COIII | H |
| 10044 | tRNA-G | H |
| 11353 | ND4 | H |
| 11560 | ND4 | H |
| 12579 | ND5 | H |
| 13404 | ND5 | H |
| 13680 | ND5 | H |
| 13759 | ND5 | H |
| 14125 | ND5 | H |
| 14350 | ND6 | H |
| 14365 | ND6 | H |
| 14470 | ND6 | H |
| 14582 | ND6 | H |
| 14872 | CYT B | H |
| 15466 | CYT B | H |
| 15789 | CYT B | H |
| 15808 | CYT B | H |
| 15833 | CYT B | H |
| 16162 | D-LOOP | H |
| 16293 | D-LOOP | H |
| 199 | D-LOOP | I |
| 250 | D-LOOP | I |
| 3447 | ND1 | I |
| 3990 | ND1 | I |
| 4529 | ND2 | I |
| 6734 | COI | I |
| 8616 | ATPase6 | I |
| 9947 | COIII | I |
| 10034 | tRNA-G | I |
| 10238 | ND3 | I |
| 11065 | ND4 | I |
| 12501 | ND5 | I |
| 13780 | ND5 | I |
| 15758 | CYT B | I |
| 16391 | D-LOOP | I |
| 228 | D-LOOP | J |
| 295 | D-LOOP | J |
| 462 | D-LOOP | J |
| 2158 | 16S rRNA | J |
| 2387 | 16S rRNA | J |
| 3394 | ND1 | J |
| 5198 | ND2 | J |
| 5633 | tRNA-A | J |
| 6464 | COI | J |
| 6554 | COI | J |
| 6671 | COI | J |
| 7476 | tRNA-S | J |
| 7711 | COII | J |
| 10084 | ND3 | J |
| 10172 | ND3 | J |
| 10192 | ND3 | J |
| 10499 | ND4L | J |
| 10598 | ND4L | J |
| 10685 | ND4L | J |
| 11377 | ND4 | J |
| 12127 | ND4 | J |
| 12570 | ND5 | J |
| 12612 | ND5 | J |
| 13281 | ND5 | J |
| 13681 | ND5 | J |
| 13879 | ND5 | J |
| 13933 | ND5 | J |
| 14569 | ND6 | J |
| 15679 | CYT B | J |
| 15812 | CYT B | J |
| 16069 | D-LOOP | J |
| 16092 | D-LOOP | J |
| 16261 | D-LOOP | J |
| 114 | D-LOOP | K |
| 497 | D-LOOP | K |
| 593 | tRNA-F | K |
| 1189 | 12S rRNA | K |
| 2217 | 16S rRNA | K |
| 2483 | 16S rRNA | K |
| 3480 | ND1 | K |
| 4295 | tRNA-I | K |
| 4561 | ND2 | K |
| 5814 | tRNA-C | K |
| 6260 | COI | K |
| 9006 | ATPase6 | K |
| 9055 | ATPase6 | K |
| 9698 | COIII | K |
| 9716 | COIII | K |
| 9962 | COIII | K |
| 10289 | ND3 | K |
| 10550 | ND4L | K |
| 10978 | ND4 | K |
| 11299 | ND4 | K |
| 11470 | ND4 | K |
| 11485 | ND4 | K |
| 11840 | ND4 | K |
| 11869 | ND4 | K |
| 11923 | ND4 | K |
| 12954 | ND5 | K |
| 13135 | ND5 | K |
| 13740 | ND5 | K |
| 13967 | ND5 | K |
| 14002 | ND5 | K |
| 14037 | ND5 | K |
| 14040 | ND5 | K |
| 14167 | ND6 | K |
| 15884 | CYT B | K |
| 15946 | tRNA-T | K |
| 16224 | D-LOOP | K |
| 16234 | D-LOOP | K |
| 16463 | D-LOOP | K |
| 185 | D-LOOP | L1 |
| 186 | D-LOOP | L1 |
| 189 | D-LOOP | L1 |
| 236 | D-LOOP | L1 |
| 247 | D-LOOP | L1 |
| 297 | D-LOOP | L1 |
| 357 | D-LOOP | L1 |
| 710 | 12S rRNA | L1 |
| 825 | 12S rRNA | L1 |
| 1048 | 12S rRNA | L1 |
| 1738 | 16S rRNA | L1 |
| 2245 | 16S rRNA | L1 |
| 2395 | 16S rRNA | L1 |
| 2758 | 16S rRNA | L1 |
| 2768 | 16S rRNA | L1 |
| 2885 | 16S rRNA | L1 |
| 3308 | ND1 | L1 |
| 3516 | ND1 | L1 |
| 3666 | ND1 | L1 |
| 3693 | ND1 | L1 |
| 3777 | ND1 | L1 |
| 3796 | ND1 | L1 |
| 3843 | ND1 | L1 |
| 4312 | tRNA-I | L1 |
| 4586 | ND2 | L1 |
| 5036 | ND2 | L1 |
| 5393 | ND2 | L1 |
| 5442 | ND2 | L1 |
| 5603 | tRNA-A | L1 |
| 5655 | tRNA-A | L1 |
| 5913 | COI | L1 |
| 5951 | COI | L1 |
| 6071 | COI | L1 |
| 6150 | COI | L1 |
| 6185 | COI | L1 |
| 6253 | COI | L1 |
| 6548 | COI | L1 |
| 6827 | COI | L1 |
| 6989 | COI | L1 |
| 7055 | COI | L1 |
| 7076 | COI | L1 |
| 7146 | COI | L1 |
| 7337 | COI | L1 |
| 7389 | COI | L1 |
| 7867 | COII | L1 |
| 8248 | COII | L1 |
| 8428 | ATPase8 | L1 |
| 8655 | ATPase6 | L1 |
| 8784 | ATPase6 | L1 |
| 8877 | ATPase6 | L1 |
| 9042 | ATPase6 | L1 |
| 9072 | ATPase6 | L1 |
| 9347 | COIII | L1 |
| 9755 | COIII | L1 |
| 9818 | COIII | L1 |
| 10321 | ND3 | L1 |
| 10586 | ND4L | L1 |
| 10589 | ND4L | L1 |
| 10664 | ND4L | L1 |
| 10688 | ND4L | L1 |
| 10792 | ND4 | L1 |
| 10793 | ND4 | L1 |
| 10810 | ND4 | L1 |
| 11176 | ND4 | L1 |
| 11641 | ND4 | L1 |
| 11654 | ND4 | L1 |
| 11899 | ND4 | L1 |
| 12007 | ND4 | L1 |
| 12049 | ND4 | L1 |
| 12519 | ND5 | L1 |
| 12720 | ND5 | L1 |
| 12810 | ND5 | L1 |
| 13149 | ND5 | L1 |
| 13276 | ND5 | L1 |
| 13485 | ND5 | L1 |
| 13506 | ND5 | L1 |
| 13789 | ND5 | L1 |
| 13880 | ND5 | L1 |
| 13980 | ND5 | L1 |
| 14000 | ND5 | L1 |
| 14148 | ND5 | L1 |
| 14178 | ND6 | L1 |
| 14203 | ND6 | L1 |
| 14308 | ND6 | L1 |
| 14560 | ND6 | L1 |
| 14769 | CYT B | L1 |
| 14911 | CYT B | L1 |
| 15115 | CYT B | L1 |
| 15136 | CYT B | L1 |
| 16148 | D-LOOP | L1 |
| 16187 | D-LOOP | L1 |
| 16188 | D-LOOP | L1 |
| 16230 | D-LOOP | L1 |
| 16264 | D-LOOP | L1 |
| 16265 | D-LOOP | L1 |
| 16360 | D-LOOP | L1 |
| 16527 | D-LOOP | L1 |
| 143 | D-LOOP | L2 |
| 1442 | 12S rRNA | L2 |
| 1706 | 16S rRNA | L2 |
| 2332 | 16S rRNA | L2 |
| 2358 | 16S rRNA | L2 |
| 2416 | 16S rRNA | L2 |
| 2789 | 16S rRNA | L2 |
| 3495 | ND1 | L2 |
| 3918 | ND1 | L2 |
| 4158 | ND1 | L2 |
| 4185 | ND1 | L2 |
| 4370 | tRNA-Q | L2 |
| 4767 | ND2 | L2 |
| 5027 | ND2 | L2 |
| 5285 | ND2 | L2 |
| 5331 | ND2 | L2 |
| 5581 | tRNA-W | L2 |
| 5744 | NON-CODING | L2 |
| 6713 | COI | L2 |
| 7175 | COI | L2 |
| 7274 | COI | L2 |
| 7624 | COII | L2 |
| 7771 | COII | L2 |
| 8080 | COII | L2 |
| 8206 | COII | L2 |
| 8387 | ATPase8 | L2 |
| 8541 | ATPase8 | L2 |
| 8790 | ATPase6 | L2 |
| 8925 | ATPase6 | L2 |
| 9221 | COIII | L2 |
| 10115 | ND3 | L2 |
| 11944 | ND4 | L2 |
| 12236 | tRNA-S | L2 |
| 12630 | ND5 | L2 |
| 12693 | ND5 | L2 |
| 12948 | ND5 | L2 |
| 13803 | ND5 | L2 |
| 14059 | ND5 | L2 |
| 14544 | ND6 | L2 |
| 14566 | ND6 | L2 |
| 14599 | ND6 | L2 |
| 15110 | CYT B | L2 |
| 15217 | CYT B | L2 |
| 15229 | CYT B | L2 |
| 15236 | CYT B | L2 |
| 15244 | CYT B | L2 |
| 15391 | CYT B | L2 |
| 15629 | CYT B | L2 |
| 15945 | tRNA-T | L2 |
| 16114 | D-LOOP | L2 |
| 16213 | D-LOOP | L2 |
| 16309 | D-LOOP | L2 |
| 16390 | D-LOOP | L2 |
| 200 | D-LOOP | L3 |
| 2000 | 16S rRNA | L3 |
| 3438 | ND1 | L3 |
| 3450 | ND1 | L3 |
| 5773 | tRNA-C | L3 |
| 6524 | COI | L3 |
| 6587 | COI | L3 |
| 6680 | COI | L3 |
| 7424 | COI | L3 |
| 7618 | COII | L3 |
| 8616 | ATPase6 | L3 |
| 8618 | ATPase6 | L3 |
| 8650 | ATPase6 | L3 |
| 9554 | COIII | L3 |
| 10086 | ND3 | L3 |
| 10373 | ND3 | L3 |
| 10667 | ND4L | L3 |
| 10819 | ND4 | L3 |
| 11800 | ND4 | L3 |
| 13101 | ND5 | L3 |
| 13886 | ND5 | L3 |
| 13914 | ND5 | L3 |
| 14152 | ND6 | L3 |
| 14212 | ND6 | L3 |
| 14284 | ND6 | L3 |
| 15099 | CYT B | L3 |
| 15311 | CYT B | L3 |
| 15670 | CYT B | L3 |
| 15824 | CYT B | L3 |
| 15942 | tRNA-T | L3 |
| 15944 | tRNA-T | L3 |
| 16124 | D-LOOP | L3 |
| 16327 | D-LOOP | L3 |
| 930 | 12S rRNA | T |
| 2141 | 16S rRNA | T |
| 2850 | 16S rRNA | T |
| 4688 | ND2 | T |
| 4917 | ND2 | T |
| 5277 | ND2 | T |
| 6489 | COI | T |
| 7022 | COI | T |
| 8572 | ATPase6 | T |
| 8697 | ATPase6 | T |
| 9117 | ATPase6 | T |
| 9899 | COIII | T |
| 10463 | tRNA-R | T |
| 11242 | ND4 | T |
| 11812 | ND4 | T |
| 12633 | ND5 | T |
| 13368 | ND5 | T |
| 13758 | ND5 | T |
| 13965 | ND5 | T |
| 14233 | ND6 | T |
| 14687 | tRNA-E | T |
| 14905 | CYT B | T |
| 15028 | CYT B | T |
| 15274 | CYT B | T |
| 15607 | CYT B | T |
| 15928 | tRNA-T | T |
| 16163 | D-LOOP | T |
| 16182 | D-LOOP | T |
| 16186 | D-LOOP | T |
| 16294 | D-LOOP | T |
| 16296 | D-LOOP | T |
| 16324 | D-LOOP | T |
| 988 | 12S rRNA | U |
| 1700 | 16S rRNA | U |
| 1721 | 16S rRNA | U |
| 2294 | 16S rRNA | U |
| 3116 | 16S rRNA | U |
| 3197 | 16S rRNA | U |
| 3348 | ND1 | U |
| 3720 | ND1 | U |
| 3849 | ND1 | U |
| 4553 | ND2 | U |
| 4646 | ND2 | U |
| 4703 | ND2 | U |
| 4732 | ND2 | U |
| 4811 | ND2 | U |
| 5319 | ND2 | U |
| 5390 | ND2 | U |
| 5495 | ND2 | U |
| 5656 | NON-CODING | U |
| 5999 | COI | U |
| 6045 | COI | U |
| 6047 | COI | U |
| 6146 | COI | U |
| 6518 | COI | U |
| 6629 | COI | U |
| 6719 | COI | U |
| 7109 | COI | U |
| 7385 | COI | U |
| 7768 | COII | U |
| 7805 | COII | U |
| 8473 | ATPase8 | U |
| 9070 | ATPase6 | U |
| 9266 | COIII | U |
| 9477 | COIII | U |
| 9667 | COIII | U |
| 10506 | ND4L | U |
| 10876 | ND4 | U |
| 10907 | ND4 | U |
| 10927 | ND4 | U |
| 11197 | ND4 | U |
| 11332 | ND4 | U |
| 11732 | ND4 | U |
| 12346 | ND5 | U |
| 12557 | ND5 | U |
| 12618 | ND5 | U |
| 13020 | ND5 | U |
| 13617 | ND5 | U |
| 13637 | ND5 | U |
| 14139 | ND5 | U |
| 14179 | ND6 | U |
| 14182 | ND6 | U |
| 14620 | ND6 | U |
| 14793 | CYT B | U |
| 14866 | CYT B | U |
| 15191 | CYT B | U |
| 15218 | CYT B | U |
| 15454 | CYT B | U |
| 15693 | CYT B | U |
| 15907 | tRNA-T | U |
| 16051 | D-LOOP | U |
| 16256 | D-LOOP | U |
| 16270 | D-LOOP | U |
| 16399 | D-LOOP | U |
| 4580 | ND2 | V |
| 15904 | tRNA-T | V |
| 194 | D-LOOP | W |
| 1243 | 12S rRNA | W |
| 1406 | 12S rRNA | W |
| 3505 | ND1 | W |
| 6528 | COI | W |
| 8994 | ATPase6 | W |
| 10097 | ND3 | W |
| 11674 | ND4 | W |
| 11947 | ND4 | W |
| 12414 | ND5 | W |
| 13263 | ND5 | W |
| 15775 | CYT B | W |
| 15884 | CYT B | W |
| 16292 | D-LOOP | W |
| 225 | D-LOOP | X |
| 226 | D-LOOP | X |
| 6371 | COI | X |
| 8393 | ATPase8 | X |
| 8705 | ATPase6 | X |
| 14470 | ND6 | X |
| and | tRNA-T | X |
| 15927. | | |

6. A method for determining a mitochondrial haplogroup subgroup of a subject, comprising:
determining, in a biological sample comprising mitochondrial DNA from a subject, the presence of at least one mitochondrial single nucleotide polymorphism that is associated with a mitochondrial haplogroup subgroup.

7. The method of claim 6 wherein the mitochondrial haplogroup is selected from the group consisting of haplogroups K, U, J, T, W, I, H, V, X, L1, L2 and L3.

8. The method of claim 6 wherein at least one mitochondrial single nucleotide polymorphism that is associated with a mitochondrial haplogroup subgroup is a mitochondrial single nucleotide polymorphism located at a nucleotide that corresponds to a nucleotide position of SEQ ID NO:1 that is selected from the group consisting of position 3010, 16162, 16189, 16304, 1811, 3197, 9477, 14793, 16256, 13617, 16270, 7768, 14182, 3480, 9055, 9698, 10550, 11299, 14167, 14798, 16224, 16311, 1189, 10398, 497, 11470, 11914, 15924, 3010, 10398, 12612, 13798, 16069, 295, 489, 228, 462, 16193, 709, 1888, 4917, 8697, 10463, 13368, 14905, 15607, 15928, 16189, 16294, 5426, 6489, 11812, 15043, 16298, 12633, 16163 and 16186.

9. A method for determining a mitochondrial haplogroup subgroup of a subject, comprising:
determining in a biological sample comprising mitochondrial DNA from a subject of known mitochondrial haplogroup selected from the group consisting of haplogroups K, U, X, I, J, T, L1, L2 and L3, the presence or absence of a set comprising a plurality of single nucleotide polymorphisms wherein each polymorphism is located at a nucleotide that corresponds to a nucleotide position of SEQ ID NO:1, the set selected from the group consisting of:
a first haplogroup K subgroup comprising a polymorphism at positions 1147, 12308, 12372, 1811, 3480, 9055, 9698, 10550, 11299, 14167, 14798, 16224, 16311 and 709;
a second haplogroup K subgroup comprising a polymorphism at positions 1147, 12308, 12372, 1811, 3480, 9055, 9698, 10550, 11299, 14167, 14798, 16224, 16311, 1189 and 10398;
a third haplogroup K subgroup comprising a polymorphism at positions 1147, 12308, 12372, 1811, 3480, 9055, 9698, 10550, 11299, 14167, 14798, 16224, 16311, 1189, 10398 and 497;
a fourth haplogroup K subgroup comprising a polymorphism at positions 1147, 12308, 12372, 1811, 3480, 9055, 9698, 10550, 11299, 14167, 14798, 16224, 16311, 1189, 10398, 497 and 11914;
a fifth haplogroup K subgroup comprising a polymorphism at positions 1147, 12308, 12372, 1811, 3480, 9055, 9698, 10550, 11299, 14167, 14798, 16224, 16311, 1189, 10398, 497, 11914, 11470 and 15924;
a sixth haplogroup K subgroup comprising a polymorphism at positions 1147, 12308, 12372, 1811, 3480, 9055, 9698, 10550, 11299, 14167, 14798, 16224, 16311, 1189, 10398, 497; 11914, 11470, 15924, 12978 and 12954;
a seventh haplogroup K subgroup comprising a polymorphism at positions 1147, 12308, 12372, 1811, 3480, 9055, 9698, 10550, 11299, 14167, 14798, 16224, 16311, 1189, 10398, 497; 11914, 11470, 15924, 12978, 12954 and 114;
a first haplogroup U subgroup comprising a polymorphism at positions 11467, 12308, 12372 and 1811;
a second haplogroup U subgroup comprising a polymorphism at positions 11467, 12308, 12372, 3197, 9477, 13617, 16270;
a third haplogroup U subgroup comprising a polymorphism at positions 11467, 12308, 12372, 3197, 9477, 13617, 16270, 7768 and 14182;
a fourth haplogroup U subgroup comprising a polymorphism at positions 11467, 12308, 12372, 3197, 9477, 13617, 16270, 14793 and 16256;
a fifth haplogroup U subgroup comprising a polymorphism at positions 11467, 12308, 12372, 3197, 9477, 13617, 16270, 14793, 16256 and 15218;
a first haplogroup X subgroup comprising a polymorphism at positions 12705, 16223, 1719, 6221, 6371, 13966, 14470, 16278 and 225;
a second haplogroup X subgroup comprising a polymorphism at positions 12705, 16223, 1719, 6221, 6371, 13966, 14470, 16278, 225 and 226;
a first haplogroup I subgroup comprising a polymorphism at positions 12705, 16223, 1719, 10238, 10398, 12501, 13780 and 15043;
a second haplogroup I subgroup comprising a polymorphism at positions 12705, 16223, 1719, 10238, 10398, 12501, 13780, 15043, 250, 4529, 10034, 15924 and 16391;
a first haplogroup J subgroup comprising a polymorphism at positions 4216, 11251, 15452, 3010, 10398, 12612, 13708, 16069 and 16126;
a second haplogroup J subgroup comprising a polymorphism at positions 4216, 11251, 15452, 3010, 10398, 12612, 13708, 16069, 16126, 295 and 489;
a third haplogroup J subgroup comprising a polymorphism at positions 4216, 11251, 15452, 3010, 10398, 12612, 13708, 16069, 16126, 295, 489 and 15257;
a fifth haplogroup J subgroup comprising a polymorphism at positions 4216, 11251, 15452, 3010, 10398, 12612, 13708, 16069, 16126, 295, 489 and 462;
a sixth haplogroup J subgroup comprising a polymorphism at positions 4216, 11251, 15452, 3010, 10398, 12612, 13708, 16069, 16126, 295, 489, 462 and 228;
a first haplogroup T subgroup comprising a polymorphism at positions 709, 1888, 4917, 8697, 10463, 13368, 14905, 15607, 15928, 16126, 16294 and 12633;
a second haplogroup T subgroup comprising a polymorphism at positions 709, 1888, 4917, 8697, 10463, 13368, 14905, 15607, 15928, 16126, 16294, 12633, 16163 and 16186;
a third haplogroup T subgroup comprising a polymorphism at positions 709, 1888, 4917, 8697, 10463, 13368, 14905, 15607, 15928, 16126, 16294, 11812, 14233 and 16296;
a fourth haplogroup T subgroup comprising a polymorphism at positions 709, 1888, 4917, 8697, 10463, 13368, 14905, 15607, 15928, 16126, 16294, 11812, 14233, 16296, 930, 5147 and 16304;
a fifth haplogroup T subgroup comprising a polymorphism at positions 709, 1888, 4917, 8697, 10463, 13368, 14905, 15607, 15928, 16126, 16294, 11812, 14233, 16296, 5426, 6489 and 15043;
a first haplogroup L1 subgroup comprising a polymorphism at positions 8701, 9540, 10398, 10873, 12705, 16223, 769, 1018, 3594, 4104, 7256, 7521, 13650, 247, 825, 2758, 2885, 2666, 7055, 7146, 7389, 8468, 8655, 10688, 10810, 13105, 13506, 13789, 14178, 14560, 16187 and 16311;
a second haplogroup L1 subgroup comprising a polymorphism at positions 8701, 9540, 10398, 10873, 12705, 16223, 769, 1018, 3594, 4104, 7256, 7521, 13650, 247, 825, 2758, 2885, 2666, 7055, 7146, 7389, 8468, 8655, 10688, 10810, 13105, 13506, 13789, 14178, 14560, 16187, 16311 and 182;
a third haplogroup L1 subgroup comprising a polymorphism at positions 8701, 9540, 10398, 10873, 12705, 16223, 769, 1018, 3594, 4104, 7256, 7521, 13650, 247, 825, 2758, 2885, 2666, 7055, 7146, 7389, 8468, 8655, 10688, 10810, 13105, 13506, 13789, 14178, 14560, 16187, 16311, 182, 8027 and 16294;
a fourth haplogroup L1 subgroup comprising a polymorphism at positions 8701, 9540, 10398, 10873, 12705, 16223, 769, 1018, 3594, 4104, 7256, 7521, 13650, 247, 825, 2758, 2885, 2666, 7055, 7146, 7389, 8468, 8655, 10688, 10810, 13105, 13506, 13789, 14178, 14560, 16187, 16311, 182, 357, 709, 710, 1738, 2352, 2768, 3308, 3693, 5036, 5393, 5655, 6548, 6827, 6989, 7867, 8248, 12519, 13880, 14203, 15115, 16126 and 16264;
a fifth haplogroup L1 subgroup comprising a polymorphism at positions 8701, 9540, 10398, 10873, 12705, 16223, 769, 1018, 3594, 4104, 7256, 7521, 13650, 247, 825, 2758, 2885, 2666, 7055, 7146, 7389, 8468, 8655, 10688, 10810, 13105, 13506, 13789, 14178, 14560, 16187, 16311, 182, 357, 709, 710, 1738, 2352, 2768, 3308, 3693, 5036, 5393, 5655, 6548, 6827, 6989, 7867, 8248, 12519, 13880, 14203, 15115, 16126, 16264 and 14769;
a first haplogroup L2 subgroup comprising a polymorphism at positions 8701, 9540, 10398, 10873, 12705, 16223, 769, 1018, 3594, 4104, 7256, 7521, 13650, 2416, 8206, 9221, 10115, 11944, 13590, 15301, 16278 and 16390;
a second haplogroup L2 subgroup comprising a polymorphism at positions 8701, 9540, 10398, 10873, 12705, 16223, 769, 1018, 3594, 4104, 7256, 7521, 13650, 2416, 8206, 9221, 10115, 11944, 13590, 15301, 16278, 16390 and 182;
a third haplogroup L2 subgroup comprising a polymorphism at positions 8701, 9540, 10398, 10873, 12705, 16223, 769, 1018, 3594, 4104, 7256, 7521, 13650, 2416, 8206, 9221, 10115, 11944, 13590, 15301, 16278, 16390, 2789, 7175, 7274, 7771, 11914, 12693, 13803, 14566, 15784 and 16294;
a fourth haplogroup L2 subgroup comprising a polymorphism at positions 8701, 9540, 10398, 10873, 12705, 16223, 769, 1018, 3594, 4104, 7256, 7521, 13650, 2416, 8206, 9221, 10115, 11944, 13590, 15301, 16278, 16390, 2789, 7175, 7274, 7771, 11914, 12693, 13803, 14566, 15784, 16294 and 16309;
a fifth haplogroup L2 subgroup comprising a polymorphism at positions 8701, 9540, 10398, 10873, 12705, 16223, 769, 1018, 3594, 4104, 7256, 7521, 13650, 2416, 8206, 9221, 10115, 11944, 13590, 15301, 16278, 16390, 2789, 7175, 7274, 7771, 11914, 12693, 13803, 14566, 15784, 16294, 16309, 3918, 5285, 15244, 15629;
a first haplogroup L3 subgroup comprising a polymorphism at positions 8701, 9540, 10398, 10873, 12705, 16223, 15301;
a second haplogroup L3 subgroup comprising a polymorphism at positions 8701, 9540, 10398, 10873, 12705, 16223, 15301, 13105;
a third haplogroup L3 subgroup comprising a polymorphism at positions 8701, 9540, 10398, 10873, 12705, 16223, 15301, 13105, 3450, 5773, 6221, 9449, 10089, 10373, 13914, 15311, 15824, 15944, 16124, 16278 and 16362;
a fourth haplogroup L3 subgroup comprising a polymorphism at positions 8701, 9540, 10398, 10873, 12705, 16223, 15301, 489, 10400, 14783 and 15043;
a fifth haplogroup L3 subgroup comprising a polymorphism at positions 8701, 9540, 10398, 10873, 12705, 16223, 15301, 489, 10400, 14783, 15043, 2092, 3010, 4883, 5178, 6578, 14668 and 16325;
a sixth haplogroup L3 subgroup comprising a polymorphism at positions 8701, 9540, 10398, 10873, 12705, 16223, 15301, 489, 10400, 14783, 15043 and 16362;
a seventh haplogroup L3 subgroup comprising a polymorphism at positions 8701, 9540, 10398, 10873, 12705, 16223, 15301, 489, 10400, 14783, 15043, 4715, 7196, 8584 and 16298;
an eighth haplogroup L3 subgroup comprising a polymorphism at positions 8701, 9540, 10398, 10873, 12705, 16223, 15301, 489, 10400, 14783, 15043, 4715, 7196, 8584, 16298, 249, 3552, 9545, 11914, 13263, 14318, 15487, 16325 and 16327;
a ninth haplogroup L3 subgroup comprising a polymorphism at positions 8701, 9540, 10398, 10873, 12705, 16223, 15301, 489, 10400, 14783, 15043, 4715, 7196, 8584, 16298, 249, 3552, 9545, 11914, 13263, 14318, 15487, 16325, 16327, 289 and 290; and
a tenth haplogroup L3 subgroup comprising a polymorphism at positions 8701, 9540, 10398, 10873, 12705, 16223, 15301, 489, 10400, 14783, 15043, 4715, 7196, 8584, 16298, 249, 3552, 9545, 11914, 13263, 14318, 15487, 16325, 16327, 289, 290 and 15930.

10. A method for determining a genetic relationship between two subjects, comprising:
determining, in each of a first biological sample comprising mitochondrial DNA from a first subject and a second biological sample comprising mitochondrial DNA from a second subject, the presence or absence of at least one mitochondrial single nucleotide polymorphism,
wherein either (i) the presence of at least one mitochondrial single nucleotide polymorphism in both of said first and second biological samples, or (ii) the absence of at least one mitochondrial single nucleotide polymorphism from both of said first and second biological samples, indicates a genetic relationship between the subjects,
and therefrom determining the genetic relationship between the subjects.

11. The method of claim 10 wherein at least one mitochondrial single nucleotide polymorphism is associated with a mitochondrial haplogroup that is selected from the group consisting of haplogroups A, B, C, D, E, H, I, J, K, L1, L2, L3, T, U, V, W and X.

12. The method of claim 10 wherein at least one mitochondrial single nucleotide polymorphism that is associated with a mitochondrial haplogroup is a haplogroup-specific polymorphism that is present in members of only one haplogroup selected from the group consisting of A, B, C, D, E, H, I, J, K, L1, L2, L3, T, U, V, W and X, located at a nucleotide that corresponds to a nucleotide position of SEQ ID NO:1 that is selected from the group consisting of:

| Nucleotide | | HAPLO- |
|---|---|---|
| Position | GENE | GROUP |
| 64 | D-LOOP | A |
| 235 | D-LOOP | A |
| 663 | 12S rRNA | A |
| 1598 | 12S rRNA | A |
| 1736 | 16S rRNA | A |
| 3316 | ND1 | A |
| 4248 | ND1 | A |
| 4824 | ND2 | A |
| 4970 | ND2 | A |
| 6308 | COI | A |
| 7112 | COI | A |
| 7724 | COII | A |
| 8794 | ATPase6 | A |
| 11314 | ND4 | A |
| 12468 | ND5 | A |
| 12811 | ND5 | A |
| 13855 | ND5 | A |
| 14364 | ND6 | A |
| 16111 | D-LOOP | A |
| 16290 | D-LOOP | A |
| 16319 | D-LOOP | A |
| 827 | 12S rRNA | B |
| 3547 | ND1 | B |
| 4820 | ND2 | B |
| 4977 | ND2 | B |
| 6023 | COI | B |
| 6216 | COI | B |
| 6413 | COI | B |
| 6473 | COI | B |
| 6755 | COI | B |
| 7241 | COI | B |
| 9950 | COIII | B |
| 11177 | ND4 | B |
| 15535 | CYT B | B |
| 16217 | D-LOOP | B |
| 249 | D-LOOP | C |
| 289 | D-LOOP | C |
| 290 | D-LOOP | C |
| 3552 | ND1 | C |
| 4715 | ND2 | C |
| 7196 | COI | C |
| 7694 | COII | C |
| 8584 | ATPase6 | C |
| 9545 | COIII | C |
| 10454 | tRNA-R | C |
| 12642 | ND5 | C |
| 12978 | ND5 | C |
| 14318 | ND6 | C |
| 15487 | CYT B | C |
| 15930 | tRNA-T | C |
| 2092 | 16S rRNA | D |
| 4883 | ND2 | D |
| 5178 | ND2 | D |
| 8414 | ATPase8 | D |
| 11593 | ND4 | D |
| 14668 | ND6 | D |
| 3027 | 16S rRNA | E |
| 3705 | ND1 | E |
| 4491 | ND2 | E |
| 7598 | COII | E |
| 239 | D-LOOP | H |
| 456 | D-LOOP | H |
| 477 | D-LOOP | H |
| 951 | 12S rRNA | H |
| 961 | 12S rRNA | H |
| 3277 | tRNA-L | H |
| 3333 | ND1 | H |
| 3591 | ND1 | H |
| 3796 | ND1 | H |
| 3915 | ND1 | H |
| 3992 | ND1 | H |
| 4024 | ND1 | H |
| 4310 | tRNA-I | H |
| 4336 | tRNA-Q | H |
| 4531 | ND2 | H |
| 4727 | ND2 | H |
| 4745 | ND2 | H |
| 4772 | ND2 | H |
| 4793 | ND2 | H |
| 5004 | ND2 | H |
| 6365 | COI | H |
| 6776 | COI | H |
| 6869 | COI | H |
| 7013 | COI | H |
| 8269 | COII | H |
| 8448 | ATPase8 | H |
| 8602 | ATPase6 | H |
| 8803 | ATPase6 | H |
| 8839 | ATPase6 | H |
| 8843 | ATPase6 | H |
| 8898 | ATPase6 | H |
| 9123 | ATPase6 | H |
| 9150 | ATPase6 | H |
| 9380 | COIII | H |
| 9804 | COIII | H |
| 10044 | tRNA-G | H |
| 11353 | ND4 | H |
| 11560 | ND4 | H |
| 12579 | ND5 | H |
| 13404 | ND5 | H |
| 13680 | ND5 | H |
| 13759 | ND5 | H |
| 14125 | ND5 | H |
| 14350 | ND6 | H |
| 14365 | ND6 | H |
| 14470 | ND6 | H |
| 14582 | ND6 | H |
| 14872 | CYT B | H |
| 15466 | CYT B | H |
| 15789 | CYT B | H |
| 15808 | CYT B | H |
| 15833 | CYT B | H |
| 16162 | D-LOOP | H |
| 16293 | D-LOOP | H |
| 199 | D-LOOP | I |
| 250 | D-LOOP | I |
| 3447 | ND1 | I |
| 3990 | ND1 | I |
| 4529 | ND2 | I |
| 6734 | COI | I |
| 8616 | ATPase6 | I |
| 9947 | COIII | I |
| 10034 | tRNA-G | I |
| 10238 | ND3 | I |
| 11065 | ND4 | I |
| 12501 | ND5 | I |
| 13780 | ND5 | I |
| 15758 | CYT B | I |
| 16391 | D-LOOP | I |
| 228 | D-LOOP | J |
| 295 | D-LOOP | J |
| 462 | D-LOOP | J |
| 2158 | 16S rRNA | J |
| 2387 | 16S rRNA | J |
| 3394 | ND1 | J |
| 5198 | ND2 | J |
| 5633 | tRNA-A | J |
| 6464 | COI | J |
| 6554 | COI | J |
| 6671 | COI | J |
| 7476 | tRNA-S | J |
| 7711 | COII | J |
| 10084 | ND3 | J |
| 10172 | ND3 | J |
| 10192 | ND3 | J |
| 10499 | ND4L | J |
| 10598 | ND4L | J |
| 10685 | ND4L | J |
| 11377 | ND4 | J |
| 12127 | ND4 | J |
| 12570 | ND5 | J |
| 12612 | ND5 | J |
| 13281 | ND5 | J |
| 13681 | ND5 | J |
| 13879 | ND5 | J |
| 13933 | ND5 | J |
| 14569 | ND6 | J |
| 15679 | CYT B | J |
| 15812 | CYT B | J |
| 16069 | D-LOOP | J |
| 16092 | D-LOOP | J |
| 16261 | D-LOOP | J |
| 114 | D-LOOP | K |
| 497 | D-LOOP | K |
| 593 | tRNA-F | K |
| 1189 | 12S rRNA | K |
| 2217 | 16S rRNA | K |
| 2483 | 16S rRNA | K |
| 3480 | ND1 | K |
| 4295 | tRNA-I | K |
| 4561 | ND2 | K |
| 5814 | tRNA-C | K |
| 6260 | COI | K |
| 9006 | ATPase6 | K |
| 9055 | ATPase6 | K |
| 9698 | COIII | K |
| 9716 | COIII | K |
| 9962 | COIII | K |
| 10289 | ND3 | K |
| 10550 | ND4L | K |
| 10978 | ND4 | K |
| 11299 | ND4 | K |
| 11470 | ND4 | K |
| 11485 | ND4 | K |
| 11840 | ND4 | K |
| 11869 | ND4 | K |
| 11923 | ND4 | K |
| 12954 | ND5 | K |
| 13135 | ND5 | K |
| 13740 | ND5 | K |
| 13967 | ND5 | K |
| 14002 | ND5 | K |
| 14037 | ND5 | K |
| 14040 | ND5 | K |
| 14167 | ND6 | K |
| 15884 | CYT B | K |
| 15946 | tRNA-T | K |
| 16224 | D-LOOP | K |
| 16234 | D-LOOP | K |
| 16463 | D-LOOP | K |
| 185 | D-LOOP | L1 |
| 186 | D-LOOP | L1 |
| 189 | D-LOOP | L1 |
| 236 | D-LOOP | L1 |
| 247 | D-LOOP | L1 |
| 297 | D-LOOP | L1 |
| 357 | D-LOOP | L1 |
| 710 | 12S rRNA | L1 |
| 825 | 12S rRNA | L1 |
| 1048 | 12S rRNA | L1 |
| 1738 | 16S rRNA | L1 |
| 2245 | 16S rRNA | L1 |
| 2395 | 16S rRNA | L1 |
| 2758 | 16S rRNA | L1 |
| 2768 | 16S rRNA | L1 |
| 2885 | 16S rRNA | L1 |
| 3308 | ND1 | L1 |
| 3516 | ND1 | L1 |
| 3666 | ND1 | L1 |
| 3693 | ND1 | L1 |
| 3777 | ND1 | L1 |
| 3796 | ND1 | L1 |
| 3843 | ND1 | L1 |
| 4312 | tRNA-I | L1 |
| 4586 | ND2 | L1 |
| 5036 | ND2 | L1 |
| 5393 | ND2 | L1 |
| 5442 | ND2 | L1 |
| 5603 | tRNA-A | L1 |
| 5655 | tRNA-A | L1 |
| 5913 | COI | L1 |
| 5951 | COI | L1 |
| 6071 | COI | L1 |
| 6150 | COI | L1 |
| 6185 | COI | L1 |
| 6253 | COI | L1 |
| 6548 | COI | L1 |
| 6827 | COI | L1 |
| 6989 | COI | L1 |
| 7055 | COI | L1 |
| 7076 | COI | L1 |
| 7146 | COI | L1 |
| 7337 | COI | L1 |
| 7389 | COI | L1 |
| 7867 | COII | L1 |
| 8248 | COII | L1 |
| 8428 | ATPase8 | L1 |
| 8655 | ATPase6 | L1 |
| 8784 | ATPase6 | L1 |
| 8877 | ATPase6 | L1 |
| 9042 | ATPase6 | L1 |
| 9072 | ATPase6 | L1 |
| 9347 | COIII | L1 |
| 9755 | COIII | L1 |
| 9818 | COIII | L1 |
| 10321 | ND3 | L1 |
| 10586 | ND4L | L1 |
| 10589 | ND4L | L1 |
| 10664 | ND4L | L1 |
| 10688 | ND4L | L1 |
| 10792 | ND4 | L1 |
| 10793 | ND4 | L1 |
| 10810 | ND4 | L1 |
| 11176 | ND4 | L1 |
| 11641 | ND4 | L1 |
| 11654 | ND4 | L1 |
| 11899 | ND4 | L1 |
| 12007 | ND4 | L1 |
| 12049 | ND4 | L1 |
| 12519 | ND5 | L1 |
| 12720 | ND5 | L1 |
| 12810 | ND5 | L1 |
| 13149 | ND5 | L1 |
| 13276 | ND5 | L1 |
| 13485 | ND5 | L1 |
| 13506 | ND5 | L1 |
| 13789 | ND5 | L1 |
| 13880 | ND5 | L1 |
| 13980 | ND5 | L1 |
| 14000 | ND5 | L1 |
| 14148 | ND5 | L1 |
| 14178 | ND6 | L1 |
| 14203 | ND6 | L1 |
| 14308 | ND6 | L1 |
| 14560 | ND6 | L1 |
| 14769 | CYT B | L1 |
| 14911 | CYT B | L1 |
| 15115 | CYT B | L1 |
| 15136 | CYT B | L1 |
| 16148 | D-LOOP | L1 |
| 16187 | D-LOOP | L1 |
| 16188 | D-LOOP | L1 |
| 16230 | D-LOOP | L1 |
| 16264 | D-LOOP | L1 |
| 16265 | D-LOOP | L1 |
| 16360 | D-LOOP | L1 |
| 16527 | D-LOOP | L1 |
| 143 | D-LOOP | L2 |
| 1442 | 12S rRNA | L2 |
| 1706 | 16S rRNA | L2 |
| 2332 | 16S rRNA | L2 |
| 2358 | 16S rRNA | L2 |
| 2416 | 16S rRNA | L2 |
| 2789 | 16S rRNA | L2 |
| 3495 | ND1 | L2 |
| 3918 | ND1 | L2 |
| 4158 | ND1 | L2 |
| 4185 | ND1 | L2 |
| 4370 | tRNA-Q | L2 |
| 4767 | ND2 | L2 |
| 5027 | ND2 | L2 |
| 5285 | ND2 | L2 |
| 5331 | ND2 | L2 |
| 5581 | tRNA-W | L2 |
| 5744 | NON-CODING | L2 |
| 6713 | COI | L2 |
| 7175 | COI | L2 |
| 7274 | COI | L2 |
| 7624 | COII | L2 |
| 7771 | COII | L2 |
| 8080 | COII | L2 |
| 8206 | COII | L2 |
| 8387 | ATPase8 | L2 |
| 8541 | ATPase8 | L2 |
| 8790 | ATPase6 | L2 |
| 8925 | ATPase6 | L2 |
| 9221 | COIII | L2 |
| 10115 | ND3 | L2 |
| 11944 | ND4 | L2 |
| 12236 | tRNA-S | L2 |
| 12630 | ND5 | L2 |
| 12693 | ND5 | L2 |
| 12948 | ND5 | L2 |
| 13803 | ND5 | L2 |
| 14059 | ND5 | L2 |
| 14544 | ND6 | L2 |
| 14566 | ND6 | L2 |
| 14599 | ND6 | L2 |
| 15110 | CYT B | L2 |
| 15217 | CYT B | L2 |
| 15229 | CYT B | L2 |
| 15236 | CYT B | L2 |
| 15244 | CYT B | L2 |
| 15391 | CYT B | L2 |
| 15629 | CYT B | L2 |
| 15945 | tRNA-T | L2 |
| 16114 | D-LOOP | L2 |
| 16213 | D-LOOP | L2 |
| 16309 | D-LOOP | L2 |
| 16390 | D-LOOP | L2 |
| 200 | D-LOOP | L3 |
| 2000 | 16S rRNA | L3 |
| 3438 | ND1 | L3 |
| 3450 | ND1 | L3 |
| 5773 | tRNA-C | L3 |
| 6524 | COI | L3 |
| 6587 | COI | L3 |
| 6680 | COI | L3 |
| 7424 | COI | L3 |
| 7618 | COII | L3 |
| 8616 | ATPase6 | L3 |
| 8618 | ATPase6 | L3 |
| 8650 | ATPase6 | L3 |
| 9554 | COIII | L3 |
| 10086 | ND3 | L3 |
| 10373 | ND3 | L3 |
| 10667 | ND4L | L3 |
| 10819 | ND4 | L3 |
| 11800 | ND4 | L3 |
| 13101 | ND5 | L3 |
| 13886 | ND5 | L3 |
| 13914 | ND5 | L3 |
| 14152 | ND6 | L3 |
| 14212 | ND6 | L3 |
| 14284 | ND6 | L3 |
| 15099 | CYT B | L3 |
| 15311 | CYT B | L3 |
| 15670 | CYT B | L3 |
| 15824 | CYT B | L3 |
| 15942 | tRNA-T | L3 |
| 15944 | tRNA-T | L3 |
| 16124 | D-LOOP | L3 |
| 16327 | D-LOOP | L3 |
| 930 | 12S rRNA | T |
| 2141 | 16S rRNA | T |
| 2850 | 16S rRNA | T |
| 4688 | ND2 | T |
| 4917 | ND2 | T |
| 5277 | ND2 | T |
| 6489 | COI | T |
| 7022 | COI | T |
| 8572 | ATPase6 | T |
| 8697 | ATPase6 | T |
| 9117 | ATPase6 | T |
| 9899 | COIII | T |
| 10463 | tRNA-R | T |
| 11242 | ND4 | T |
| 11812 | ND4 | T |
| 12633 | ND5 | T |
| 13368 | ND5 | T |
| 13758 | ND5 | T |
| 13965 | ND5 | T |
| 14233 | ND6 | T |
| 14687 | tRNA-E | T |
| 14905 | CYT B | T |
| 15028 | CYT B | T |
| 15274 | CYT B | T |
| 15607 | CYT B | T |
| 15928 | tRNA-T | T |
| 16163 | D-LOOP | T |
| 16182 | D-LOOP | T |
| 16186 | D-LOOP | T |
| 16294 | D-LOOP | T |
| 16296 | D-LOOP | T |
| 16324 | D-LOOP | T |
| 988 | 12S rRNA | U |
| 1700 | 16S rRNA | U |
| 1721 | 16S rRNA | U |
| 2294 | 16S rRNA | U |
| 3116 | 16S rRNA | U |
| 3197 | 16S rRNA | U |
| 3348 | ND1 | U |
| 3720 | ND1 | U |
| 3849 | ND1 | U |
| 4553 | ND2 | U |
| 4646 | ND2 | U |
| 4703 | ND2 | U |
| 4732 | ND2 | U |
| 4811 | ND2 | U |
| 5319 | ND2 | U |
| 5390 | ND2 | U |
| 5495 | ND2 | U |
| 5656 | NON-CODING | U |
| 5999 | COI | U |
| 6045 | COI | U |
| 6047 | COI | U |
| 6146 | COI | U |
| 6518 | COI | U |
| 6629 | COI | U |
| 6719 | COI | U |
| 7109 | COI | U |
| 7385 | COI | U |
| 7768 | COII | U |
| 7805 | COII | U |
| 8473 | ATPase8 | U |
| 9070 | ATPase6 | U |
| 9266 | COIII | U |
| 9477 | COIII | U |
| 9667 | COIII | U |
| 10506 | ND4L | U |
| 10876 | ND4 | U |
| 10907 | ND4 | U |
| 10927 | ND4 | U |
| 11197 | ND4 | U |
| 11332 | ND4 | U |
| 11732 | ND4 | U |
| 12346 | ND5 | U |
| 12557 | ND5 | U |
| 12618 | ND5 | U |
| 13020 | ND5 | U |
| 13617 | ND5 | U |
| 13637 | ND5 | U |
| 14139 | ND5 | U |
| 14179 | ND6 | U |
| 14182 | ND6 | U |
| 14620 | ND6 | U |
| 14793 | CYT B | U |
| 14866 | CYT B | U |
| 15191 | CYT B | U |
| 15218 | CYT B | U |
| 15454 | CYT B | U |
| 15693 | CYT B | U |
| 15907 | tRNA-T | U |
| 16051 | D-LOOP | U |
| 16256 | D-LOOP | U |
| 16270 | D-LOOP | U |
| 16399 | D-LOOP | U |
| 4580 | ND2 | V |
| 15904 | tRNA-T | V |
| 194 | D-LOOP | W |
| 1243 | 12S rRNA | W |
| 1406 | 12S rRNA | W |
| 3505 | ND1 | W |
| 6528 | COI | W |
| 8994 | ATPase6 | W |
| 10097 | ND3 | W |
| 11674 | ND4 | W |
| 11947 | ND4 | W |
| 12414 | ND5 | W |
| 13263 | ND5 | W |
| 15775 | CYT B | W |
| 15884 | CYT B | W |
| 16292 | D-LOOP | W |
| 225 | D-LOOP | X |
| 226 | D-LOOP | X |
| 6371 | COI | X |
| 8393 | ATPase8 | X |
| 8705 | ATPase6 | X |
| 14470 | ND6 | X |
| and | tRNA-T | X |
| 15927. | | |

13. A method for determining a genetic relationship between (i) an unknown source or biological subject from which an unidentified sample is obtained, and (ii) a known source or biological subject from an identified sample is obtained, comprising:
determining presence or absence of at least one mitochondrial single nucleotide polymorphism, in each of a first biological sample derived from an unknown subject or biological source and a second biological sample derived from a known subject or biological source, wherein said first and second biological samples each comprise mitochondrial DNA,
wherein either (i) the presence of at least one mitochondrial single nucleotide polymorphism in both of said first and second biological samples, or (ii) the absence of at least one mitochondrial single nucleotide polymorphism from both of said first and second biological samples, indicates a genetic relationship between the subjects, and therefrom determining the genetic relationship between the biological samples.

14. A method of determining the presence of or the risk for having a disease associated with a mitochondrial DNA single nucleotide polymorphism, comprising:
(a) identifying at least one haplogroup-associated mitochondrial DNA single nucleotide polymorphism in a biological sample comprising mitochondrial DNA from a subject suspected of having or being at risk for having a disease associated with a mitochondrial DNA single nucleotide polymorphism; and
(b) identifying in said sample at least one disease associated mitochondrial DNA single nucleotide polymorphism that is not a haplogroup-associated mitochondrial DNA single nucleotide polymorphism, and therefrom determining the presence or risk of disease.

15. The method of claim 14 wherein the disease associated mitochondrial DNA single nucleotide polymorphism that is not a haplogroup-associated mitochondrial DNA single nucleotide polymorphism is a type 2 diabetes-associated polymorphism.

16. The method of claim 14 wherein the disease associated mitochondrial DNA single nucleotide polymorphism that is not a haplogroup-associated mitochondrial DNA single nucleotide polymorphism is an Alzheimer's disease-associated polymorphism.
